(19) United States
(12) Patent Application Publication
(10) Pub. No.: US 2005/0130172 A1
(43) Pub. Date: Jun. 16, 2005

(54) Identification and verification of methylation marker sequences

(75) Inventors: Chris Beard, Concord, CA (US); Chris Burgess, Westwood, MA (US); Allison Gannon, Walnut Creek, CA (US); Jeanne Harvey, Livermore, CA (US); John F. Lechner, Richmond, CA (US); Zheng Li, Hayward, CA (US)

Correspondence Address: PALMER & DODGE, LLP;PAULA CAMPBELL EVANS, 111 HUNTINGTON AVENUE, BOSTON, MA, 02199, US

(73) Assignee: Bayer Corporation

(21) Appl. No.: 10/765,790

(22) Filed: Jan. 27, 2004

Related U.S. Application Data
(63) Continuation-in-part of application No. 10/737,082, filed on Dec. 16, 2003.

(51) Int. Cl. C12Q 1/68; G06F 19/00; G01N 33/48; G01N 33/50

(52) U.S. Cl. 435/6; 702/20

(57) ABSTRACT

The present invention relates to methods for identifying among the genes that are down-regulated in cells or tissues having disease including cancer, the CpG sites within the CpG islands of said genes, wherein the identified CpG sites show great potential for diagnostic utility. In another aspect, the present invention also provides methods of using the selected CpG sites for purposes of diagnosis, prognosis, staging, assessing or monitoring the therapy of or recovery from a disease such as cancer.

### RELATED APPLICATION

[0001] This application is a continuation-in-part of application Ser. No. 10/737,082 filed on Dec. 16, 2003.

### SEQUENCE LISTING

[0002] This application includes a sequence listing submitted on compact disc in triplicate (three) compact discs: Computer Readable Copy (disk 1), Copy 1 (disk 2) and Copy 2 (disk 3), the contents of which are hereby incorporated by reference in its entirety. All three compact discs contain identical sequences. The following information is identical for each CD-ROM submitted: Machine Format: IBM-PC; Operating System: MS-Windows;

| | | DATE |
|---|---|---|
| FILE NAME | SIZE | OF CREATION |
| SEQUENCE_LISTING-Bayer-2035 | 9,554 KB | Jan. 26, 2004 |

The information on each CD-ROM is incorporated herein by reference in its entirety.

### FIELD OF THE INVENTION

[0003] The present invention generally relates to methods for identifying the CpG sites that show great potential for diagnostic utility. Furthermore, the present invention relates to methods of using the identified CpG sites for diagnosis, prognosis, and staging of a disease, and assessment of therapy in a subject.

### BACKGROUND OF THE INVENTION

[0004] In mammals, DNA methylation usually occurs at cytosines located 5′ of guanines, known as CpG dinucleotides. DNA (cytosine-5)-methyltransferase (DNA-Mtase) catalyzes this reaction by adding a methyl group from S-adenosyl-L-methionine to the fifth carbon position of the cytosine. Chiang, P K, et al., “S-adenosylmethionine and methylation,” FASEB J., 10: 471-480 (1996). Most cytosines within CpG dinucleotides are methylated in the human genome, but some remain unmethylated in specific GC-rich areas. These areas are called CpG islands. Antequera, F. et al., “High levels of de novo methylation and altered chromatin structure at CpG islands in cell lines,” Cell, 62: 503-514 (1990). CpG islands are typically between 0.2 to about 1 kb in length and are located upstream of many housekeeping and tissue-specific genes, but may also extend into gene coding regions. Antequera, F. et al., “High levels of de novo methylation and altered chromatin structure at CpG islands in cell lines,” Cell, 62: 503-514 (1990).

[0005] DNA methylation is a heritable, reversible, and epigenetic change; it has the potential to alter gene expression, which has profound developmental and genetic consequences. DNA methylation is known to play a role in regulating gene expression during cell development. This epigenetic event frequently is associated with transcriptional silencing of imprinted genes, some repetitive elements and genes on the inactive X chromosome. Li, E. et al, “Role for DNA methylation in genomic imprinting,” Nature, 366: 362-365 (1993); Singer-Sam, J. and Riggs, A D, X chromosome inactivation and DNA methylation; Jost, J. P. and Saluz, H. P. (eds), DNA Methylation: molecular Biology and Biological Significance, Birkhaeuser Verlag, Basel, Switzerland, pp. 358-384 (1993). In neoplastic cells, it has been observed that the normally unmethylated CpG islands can become aberrantly methylated, or hypermethylated. Jones, P A, “DNA methylation errors and cancer,” Cancer Res., 56:2463-2467 (1996).

[0006] Aberrantly methylated cytosine at CpG dinucleotides is a widespread phenomenon in cancer. Jones, P A and Laird, P W, “Cancer epigenetics comes of age,” Nat. Genet. 21: 163-167 (1999). As a result of CpG island hypermethylation, chromatin structure in the promoter can be altered, preventing normal interaction with the transcriptional machinery. Baylin, SB, et al. “Alterations in DNA methylation: A fundamental aspect of neoplasia,” in Advances in cancer research (eds. G. F. Vande Woude and G. Klein), vol. 72: 141-196 (1998), Academic Press, San Diego, Calif. When this occurs in genes critical to growth inhibition, the resulting silencing of transcription could promote tumor progression. In addition, promoter CpG island hypermethylation has been shown to be a common mechanism for transcriptional inactivation of classic tumor suppressor genes and genes important for cell cycle regulation, and DNA mismatch repair. Methylation of cytosine, therefore, plays a significant role in control of gene expression, and a change in the methylation pattern or status is likely to cause disease.

### SUMMARY OF THE INVENTION

[0007] The present invention relates to methods for identifying among nucleic acid sequences that are down-regulated in cells or tissues having disease, including cancer, these CpG sites within the CpG islands of said nucleic acid sequences, the methylation status or state of which is indicative of the presence or stage of the disease. The invention further pertains to the use of such sequences as biomarkers for the presence or stage of the disease, or as indicators of the efficacy of therapy.

[0008] In one aspect, the present invention pertains to identification of down-regulated (under-expressed) nucleic acid marker sequences in a biological sample from a patient having or suspected of having a disease or disorder, such as cancer or a pre-malignant condition. In general, the method of identifying the nucleic acid marker sequences includes (1) providing a pool of target nucleic acids preferably derived from both disease and normal cells and/or tissues and preferably comprising RNA transcripts of the target markers derived from the RNA transcripts; (2) hybridizing the nucleic acid samples to one or more probes; and (3) detecting the hybridized nucleic acids and determining the expression levels derived from the diseased cells/tissues relative to the expression levels of the same nucleic acids from normal cells and/or tissues. Various conventional methods known in the art may be employed to identify the nucleic acid marker sequences that are down-regulated in a disease, especially cancer. In one embodiment, microarrays such as DNA arrays are employed in the method.

[0009] The present invention further provides nucleic acid marker sequences that are down-regulated in disease, including cancer or tumor, identified using the above method. The present invention further provides polynucleotides which are at least about 85%, at least about 90%, or more preferably at least about 95% identical to the sequences of the RNA transcripts or cDNAs of the down-regulated nucleic acid marker sequences, and polypeptides encoded by the nucleic acid marker sequences.

[0010] In another aspect, the present invention pertains to the identification of CpG islands on the down-regulated nucleic acid marker sequences. CpG islands are defined to be short nucleic acid sequences greater than 200 bp in length, with a GC content greater than 0.5 and an observed to expected ratio based on GC content greater than 0.6. See Gardiner-Garden and Frommer, “CpG islands in vertebrate genomes,” J. Mol. Biol. 196(2): 261-282 (1987). CpG islands may be identified by any method known in the art using the Gardiner-Garden and Frommer definition. The present invention further provides the nucleic acid sequences containing the CpG islands within the promoter-first exon region of the genes encoded by the nucleic acid marker sequences that are down-regulated in disease such as cancerous or premalignant cells or tissues.

[0011] In another aspect, the present invention pertains to determining whether the candidate CpG sites within the CpG islands of the down-regulated marker sequences are methylated in diseased cells or tissues. This can be performed by using methylation assays capable of determining differential methylation levels within CpG sites between diseased cells or tissues and normal cells or tissues. Methylation-specific assays useful for this purpose include, for example, methylation-specific PCR, bisulfite genomic sequencing methods, methylation-specific primer extension methods, and all other methods known in the art, and with high throughput or microarrays.

[0012] In another aspect, the present invention pertains to selection of CpG sites within the CpG islands of the down-regulated marker sequences that have the greatest potential in diagnostic, prognostic and therapeutic assays for detecting a disease. Generally, the selection comprises the steps of (1) determining the functional recovery of the down-regulated marker sequences containing the methylated CpG sites after demethylation treatment, and (2) validating the CpG sites on the nucleic acid marker sequences in clinical samples.

[0013] In step (1), the nucleic acid sequences containing the methylated CpG sites are further determined for functional recovery after demethylation treatment. Functional recovery after demethylation treatment would result in a significant increase in the nucleic acid expression levels of the nucleic acid sequences containing the CpG sites after the demethylation treatment. The term “significant increase in the nucleic acid expression levels” as used herein, refers to an increase in nucleic acid expression levels by at least about 10%, preferably at least about 15%, about 25%, about 30%, about 40%, about 50%, about 65%, about 75%, about 85%, about 90%, about 95% or greater. In another embodiment, functional recovery after demethylation treatment would also result in a significant increase in the levels of the proteins encoded by the down-regulated marker sequences containing the CpG sites after demethylation treatment. The term “significant increase in the levels of the proteins” as used herein, refers to an increase in protein levels by at least about 15%, preferably at least about 25%, 35%, 50%, or greater. In yet another embodiment, functional recovery after demethylation treatment would also mean a significant restoration of functional phenotypes associated with the functionality of the proteins encoded by the down-regulated marker sequences containing methylated CpG sites after the demethylation treatment.

[0014] In step (2), the validation of the CpG sites selected by methods in step (1) comprises determining correlation of the methylation of the CpG sites with a disease in clinical samples. Preferably, the correlation is determined by detecting the methylation of the CpG sites in clinical samples obtained from a subject afflicted with or suspected of having a disease to be detected compared to that in a normal, disease-free sample. A good correlation between the methylation at a specific CpG site and a disease could mean that the said specific CpG site is hypermethylated in samples obtained from a subject afflicted with or suspected of having disease compared to that in normal, disease-free samples. The CpG sites that show a significant increase in methylation in samples obtained from a subject afflicted with or suspected of having disease compared to that in normal, disease-free samples, are preferably selected. Preferably, the increase in methylation of the CpG sites in the disease sample is by at least about 1.5 fold, more preferably at least about 2 fold over that in a normal sample.

[0015] In addition, a good correlation between the methylation at a specific CpG site and a disease could also mean that the degree of methylation at the CpG site shows distinct differences at different stages of a disease.

[0016] A good correlation could also encompass the relationship between multiple CpG sites on a single nucleic acid marker sequence and a disease. For example, for one specific disease to be assayed, the methylation at one or more CpG sites on a single nucleic acid marker sequence could either increase or decrease as the disease progresses to advanced stages. Alternatively, either increased number of or decreased number of CpG sites on a single nucleic acid marker sequence could be methylated as the disease progresses to advanced stages.

[0017] The nucleic acid sequences whose CpG sites show good correlation between the methylation of the CpG sites and disease in clinical samples, are preferably selected for uses in diagnosis, prognosis, staging, monitoring, and therapeutic treatment of a disease. Preferably, diagnosis, prognosis, staging, monitoring, and therapeutic treatment of a disease are performed by detecting the methylation of the CpG sites on the nucleic acid sequences from samples obtained from a subject having or suspected of having a disease to be detected.

[0018] As a result of the selection, the selected nucleic acid sequences should contain the CpG sites showing a significant increase in methylation in samples from tissues or cells afflicted with or suspected of disease compared to samples from normal tissues or cells, and exhibit functional recovery after demethylation treatment.

[0019] In another aspect, the present invention provides methods of using the identified CpG sites on the selected nucleic acid marker sequences for purposes of diagnosis, prognosis, staging, assessing or monitoring the therapy of or recovery from a disease such as cancer including colon cancer, breast cancer, lung cancer, head and neck cancer, liver cancer, and leukemia, neurodegenerative diseases such as Huntington's disease, Alzheimer's disease, Rett syndrome, hypertension, etc.

[0020] The present invention provides methods for detecting the presence, or predisposition of a disease such as cancer, by detecting methylation levels of one or more selected CpG sites within one or more down-regulated marker sequences, wherein the methylation of the CpG sites corresponds to a disease. Preferably, the CpG sites are the ones selected by the methods of the present invention. Particularly, the method of detecting, or diagnosing a disease in a subject, comprises:
[0021] (a) determining the degree of methylation of one or more CpG sites on nucleic acid sequences in a biological sample obtained from the subject;
[0022] (b) determining the presence of, predisposition to, or stage of the disease in the subject based on the degree of methylation.

[0023] The present invention also provides methods for determining disease prognosis and stage based on examining the methylation levels of the selected CpG sites within one or more down-regulated marker sequences, wherein the different methylation levels of the CpG sites correspond to different stages of a disease. Particularly, the method of monitoring the onset, progression, or regression of a disease in a subject, comprises:
[0024] (a) detecting in a biological sample of the subject at a first point in time, methylation levels of one or more CpG sites, wherein the CpG sites are differentially methylated at different stages of the disease;
[0025] (b) repeating step (a) at a subsequent point in time; and
[0026] (c) comparing the methylation levels of the CpG sites in step (a) and (b), wherein a change in the methylation levels is indicative of disease progression in the subject.

[0027] The present invention also provides methods that permit the assessment and/or monitoring of patients who will be likely to benefit from both traditional and non-traditional treatments and therapies for disease such as, particularly colon cancer. The method for determining the efficacy of a test compound for ameliorating or inhibiting a disease in a subject comprises:
[0028] (a) detecting in a first biological sample of the subject, methylation levels of one or more CpG sites, wherein the sample has not been exposed to the test compound, and wherein the CpG sites are methylated in the disease;
[0029] (b) detecting in a second biological sample of the subject, methylation levels of the same CpG sites, wherein the sample has been exposed to the test compound; and
[0030] (c) comparing the methylation levels of the CpG sites in step (a) and (b), wherein a decrease in methylation after the sample has been exposed to the test compound, is indicative of the efficacy of the test compound.

[0031] The present invention also provides a kit for practicing the uses of the selected CpG sites on the nucleic acid marker sequences in diagnosis, prognosis, staging, and monitoring of the therapy. The kit may comprise a bisulfite-containing reagent that modifies the unmethylated cytosine, as well as oligonucleotides involved in detecting the methylation of one or more specific CpG sites on a specific nucleic acid marker sequence, wherein said detection of the methylation comprises one or more of the following techniques: methylation-specific PCR, bisulfite genomic sequencing methods, methylation-specific primer extension methods, and all other methods known in the art, and with high throughput or microarrays.

[0032] A kit may also comprise a control/reference value or a set of control/reference values indicating normal and various clinical progression stages of a disease. In one embodiment, the control/reference value or a set of control/reference values is indicative of various clinical progression stages of cancer. In a preferred embodiment, the control/reference value or a set of control/reference values is indicative of various clinical progression stages of colon cancer. Moreover, a kit may also comprise positive controls, and/or negative controls for comparison with the test sample. A negative control may comprise a sample that does not have any nucleic acid marker sequences. A positive control may comprise various degrees of methylation at one or more specific CpG sites. A kit may further comprise instructions for carrying out and evaluating the results.

### DETAILED DESCRIPTION OF THE INVENTION

I Definitions

[0033] As used herein, the term “a biological sample” refers to a whole organism or a subset of its tissues, cells or component parts (e.g. body fluids, including but not limited to blood, mucus, lymphatic fluid, synovial fluid, cerebrospinal fluid, saliva, amniotic fluid, amniotic cord blood, urine, vaginal fluid and semen). “A biological sample” further refers to a homogenate, lysate or extract prepared from a whole organism or a subset of its tissues, cells or component parts, or a fraction or portion thereof, including but not limited to, for example, plasma, serum, spinal fluid, lymph fluid, the external sections of the skin, respiratory, intestinal, and genitourinary tracts, tears, saliva, milk, blood cells, tumors, organs. Most often, the sample has been removed from an animal, but the term “biological sample” can also refer to cells or tissue analyzed in vivo, i.e., without removal from animal. Typically, a “biological sample” will contain cells from the animal, but the term can also refer to non-cellular biological material, such as non-cellular fractions of blood, saliva, or urine, that can be used to measure the cancer-associated polynucleotide or polypeptide levels. “A biological sample” further refers to a medium, such as a nutrient broth or gel in which an organism has been propagated, which contains cellular components, such as proteins or nucleic acid molecules.

[0034] As used herein, the term “biomarker” or “marker” refers to a biological molecule, e.g., a nucleic acid, peptide, hormone, etc., whose presence or concentration can be detected and correlated with a known condition, such as a disease state. The term “biomarker” also refers to any molecule derived from a gene, e.g., a transcript of the gene or a fragment thereof, a sense (coding) or antisense (non-coding) probe sequence derived from the gene, or a full length or partial length translation product of the gene or an antibody thereto, which can be used to monitor a condition, disorder, disease, or the status in the progression of a process.

[0035] As used herein, the term “a clinical sample” refers to a sample as defined herein from a medical patient.

[0036] As used herein, the term “nucleic acid” refers to polynucleotides such as deoxyribonucleic acid (DNA), and, where appropriate, ribonucleic acid (RNA). The term should also be understood to include, as equivalents, analogs of either RNA or DNA made from nucleotide analogs, and, as applicable to the embodiment being described, single (sense or antisense) and double-stranded polynucleotides. ESTs, chromosomes, cDNAs, mRNAs, and rRNAs are representative examples of molecules that may be referred to as nucleic acids.

[0037] As used herein, the term “a polynucleotide primer/probe” refers to a nucleic acid capable of binding to a target nucleic acid of complementary sequence through one or more types of chemical bonds, usually through complementary base pairing, usually through hydrogen bond formation. As used herein, a probe may include natural (i.e., A, G, C, or T) or modified bases (7-deazaguanosine, inosine, etc.) or sugar moiety. In addition, the bases in a primer/probe may be joined by a linkage other than a phosphodiester bond, so long as it does not interfere with hybridization. Thus, for example, primer/probes may be peptide nucleic acids in which the constituent bases are joined by peptide bonds rather than phosphodiester linkages. It will be understood by one of skill in the art that probes may bind target sequences lacking complete complementarity with the primer/probe sequence depending upon the stringency of the hybridization conditions. The primers/probes are preferably directly labeled as with isotopes, chromophores, lumiphores, chromogens, or indirectly labeled such as with biotin to which a streptavidin complex may later bind. By assaying for the presence or absence of the primer/probe, one can detect the presence or absence of the select sequence or subsequence.

[0038] As used herein, the term “expression level of nucleic acid sequences” refers to the amount of mRNA transcribed from the corresponding genes that are present in a biological sample. The expression level can be detected with or without comparison to a level from a control sample or a level expected of a control sample.

[0039] As used herein, the term “down-regulated” refers to nucleic acid molecules whose levels decrease by at least25%, or 30%, or 40% or 50% or greater in disease or cancerous cells or tissues as compared with the levels in normal, disease-free cells or tissues.

[0040] As used herein, the term “methylation” refers to the covalent attachment of a methyl group at the C5-position of the nucleotide base cytosine within the CpG dinucleotides of gene regulatory region. The term “hypermethylation” refers to the methylation state corresponding to an increased presence of 5-methyl-cytosine (“5-mCyt”) at one or a plurality of CpG dinucleotides within a DNA sequence of a test DNA sample, relative to the amount of 5-mCyt found at corresponding CpG dinucleotides within a normal control DNA sample. The term “methylation state” or “methylation status” or “methylation level” or “the degree of methylation” refers to the presence or absence of 5-mCyt at one or a plurality of CpG dinucleotides within a DNA sequence. As used herein, the terms “methylation status” or “methylation state” or “methylation level” or “degree of methylation” are used interchangeably. A methylation site refers to a sequence of contiguous linked nucleotides that is recognized and methylated by a sequence-specific methylase. Furthermore, a methylation site also refers to a specific cytosine of a CpG dinucleotide in the CpG islands. A methylase is an enzyme that methylates (i.e., covalently attaches a methyl group to) one or more nucleotides at a methylation site.

[0041] As used here, the term “CpG islands” are short DNA sequences rich in the CpG dinucleotide and defined as sequences greater than 200 bp in length, with a GC content greater than 0.5 and an observed to expected ratio based on GC content greater than 0.6. See Gardiner-Garden and Frommer, “CpG islands in vertebrate genomes,” J. Mol. Biol. 196(2): 261-282 (1987). CpG islands were associated with the 5′ ends of all housekeeping genes and many tissue-specific genes, and with the 3′ ends of some tissue-specific genes. A few genes contain both the 5′ and the 3′ CpG islands, separated by several thousand base pairs of CpG-depleted DNA. The 5′ CpG islands extended through 5′-flanking DNA, exons, and introns, whereas most of the 3′ CpG islands appeared to be associated with exons. CpG islands are generally found in the same position relative to the transcription unit of equivalent genes in different species, with some notable exceptions. CpG islands have been estimated to constitute 1%-2% of the mammalian genome, and are found in the promoters of all housekeeping genes, as well as in a less conserved position in 40% of genes showing tissue-specific expression. The persistence of CpG dinucleotides in CpG islands is largely attributed to a general lack of methylation of CpG islands, regardless of expression status. The term “CpG site” refers to the CpG dinucleotide within the CpG islands. CpG islands are typically, but not always, between about 0.2 to about 1 kb in length.

[0042] The term “significant increase in the expression levels” refers to an increase from the standard level by an amount greater than the standard error of the assay employed to assess expression. Preferably, the increase is at least about 10%, preferably at least about 15%, about 25%, about 30%, about 40%, about 50%, about 65%, about 75%, about 85%, about 90%, about 95% or greater.

[0043] The term “significant increase in the levels of the proteins” as used herein, refers to an increase in protein levels by an amount greater than the standard error of the assay employed to assess expression. Preferably, the increase is at least about 15%, preferably at least about 25%, 35%, 50%, or greater.

[0044] As used herein, the term “standard expression level of nucleic acid sequences” refers to the amount of mRNA transcribed from the corresponding genes that are present in a biological sample representative of healthy, disease-free subjects. The term “standard expression level of nucleic acid sequences” can also refer to an established level of mRNA representative of the disease-free population, that has been previously established based on measurement from healthy, disease-free subjects.

[0045] As used herein, the term “cancerous cell” or “cancer cell”, used either in the singular or plural form, refers to cells that have undergone a malignant transformation that makes them pathological to the host organism. Malignant transformation is a single- or multi-step process, which involves in part an alteration in the genetic makeup of the cell and/or the gene expression profile. Malignant transformation may occur either spontaneously, or via an event or combination of events such as drug or chemical treatment, radiation, fusion with other cells, viral infection, or activation or inactivation of particular genes. Malignant transformation may occur in vivo or in vitro, and can if necessary be experimentally induced. Malignant cells may be found within the well-defined tumor mass or may have metastasized to other physical locations. A feature of cancer cells is the tendency to grow in a manner that is uncontrollable by the host, but the pathology associated with a particular cancer cell may take any form. Primary cancer cells (that is, cells obtained from near the site of malignant transformation) can be readily distinguished from non-cancerous cells by well-established pathology techniques, particularly histological examination. The definition of a cancer cell, as used herein, includes not only a primary cancer cell, but also any cell derived from a cancer cell ancestor. This includes metastasized cancer cells, and in vitro cultures and cell lines derived from cancer cells.

[0046] As used herein, the term “subject” refers to any human or non-human organism.

[0047] As used herein, “individual” refers to a mammal, preferably a human.

[0048] As used herein, “detecting” refers to the identification of the presence or absence of a molecule in a sample. Where the molecule to be detected is a polypeptide, the step of detecting can be performed by binding the polypeptide with an antibody that is detectably labeled. A detectable label is a molecule which is capable of generating, either independently, or in response to a stimulus, an observable signal. A detectable label can be, but is not limited to a fluorescent label, a chromogenic label, a luminescent label, or a radioactive label. Methods for “detecting” a label include quantitative and qualitative methods adapted for standard or confocal microscopy, FACS analysis, and those adapted for high throughput methods involving multi-well plates, arrays or microarrays. One of skill in the art can select appropriate filter sets and excitation energy sources for the detection of fluorescent emission from a given fluorescent polypeptide or dye. “Detecting” as used herein can also include the use of multiple antibodies to a polypeptide to be detected, wherein the multiple antibodies bind to different epitopes on the polypeptide to be detected. Antibodies used in this manner can employ two or more detectable labels, and can include, for example a FRET pair. A polypeptide molecule is “detected” according to the present invention when the level of detectable signal is at all greater than the background level of the detectable label, or where the level of measured nucleic acid is at all greater than the level measured in a control sample.

[0049] As used herein, “detecting” also refers to detecting the presence of a target nucleic acid molecule (e.g., a nucleic acid molecule encoding the marker gene) during a process wherein the signal generated by a directly or indirectly labeled probe nucleic acid molecule (capable of hybridizing to a target in a serum sample) is measured or observed. Thus, detection of the probe nucleic acid is directly indicative of the presence, and thus the detection, of a target nucleic acid, such as a sequence encoding a marker gene. For example, if the detectable label is a fluorescent label, the target nucleic acid is “detected” by observing or measuring the light emitted by the fluorescent label on the probe nucleic acid when it is excited by the appropriate wavelength, or if the detectable label is a fluorescence/quencher pair, the target nucleic acid is “detected” by observing or measuring the light emitted upon association or dissociation of the fluorescence/quencher pair present on the probe nucleic acid, wherein detection of the probe nucleic acid indicates detection of the target nucleic acid. If the detectable label is a radioactive label, the target nucleic acid, following hybridization with a radioactively labeled probe is “detected” by, for example, autoradiography. Methods and techniques for “detecting” fluorescent, radioactive, and other chemical labels may be found in Ausubel et al. (1995, Short Protocols in Molecular Biology, 3^{rd} Ed. John Wiley and Sons, Inc.). Alternatively, a nucleic acid may be “indirectly detected” wherein a moiety is attached to a probe nucleic acid which will hybridize with the target, such as an enzyme activity, allowing detection in the presence of an appropriate substrate, or a specific antigen or other marker allowing detection by addition of an antibody or other specific indicator. Alternatively, a target nucleic acid molecule can be detected by amplifying a nucleic acid sample prepared from a patient clinical sample, using oligonucleotide primers which are specifically designed to hybridize with a portion of the target nucleic acid sequence. Quantitative amplification methods, such as, but not limited to TaqMan, may also be used to “detect” a target nucleic acid according to the invention. A nucleic acid molecule is “detected” as used herein where the level of nucleic acid measured (such as by quantitative PCR), or the level of detectable signal provided by the detectable label is at all above the background level.

[0050] As used herein, “detecting” further refers to detecting methylation state or status on a specific CpG site of a target nucleic acid molecule that are indicative of a disease condition in a cell or tissue. The methylation state or status on a specific CpG site of a target nucleic acid molecule can provide useful information for diagnosis, disease monitoring, and therapeutic approaches. Various methods known in the art may be used for determining the methylation status of specific CpG dinucleotides. Such methods include but are not limited to, restriction landmark genomic scanning, see Kawai et al., “Comparison of DNA methylation patterns among mouse cell lines by restriction landmark genomic scanning,” Mol. Cell Biol. 14(11): 7421-7427 (1994); methylated CpG island amplification, see Toyota et al., “Identification of differentially methylated sequences in colorectal cancer by methylated CpG island amplification,” Cancer Res., 59: 2307-2312 (1999), see also WO00/26401A1; differential methylation hybridization, see Huang et al., “Methylation profiling of CpG islands in human breast cancer cells,” Hum. Mol. Genet., 8: 459-470 (1999); methylation-specific PCR (MSP), see Herman et al., “Methylation-specific PCR: a novel PCR assay for methylation status of CpG islands,” PNAS USA 93: 9821-9826 (1992), see also U.S. Pat. No. 5,786,146; methylation-sensitive single nucleotide primer extension (Ms-SnuPE), see U.S. Pat. No. 6,251,594; combined bisulfite restriction analysis (COBRA), see Xiong and Laird, “COBRA: a sensitive and quantitative DNA methylation assay,” Nucleic Acids Research, 25(12): 2532-2534 (1997); bisulfite genomic sequencing, see Frommer et al., “A genomic sequencing protocol that yields a positive display of 5-methylcytosine residues in individual DNA strands,” PNAS USA, 89: 1827-1831 (1992); and methylation-specific primer extension (MSPE), etc.

[0051] As used herein, “detecting” refers further to the early detection of disease, such as cancer, particularly colorectal cancer in a patient, wherein “early” detection refers to the detection of colorectal cancer at Dukes stage A or preferably, prior to a time when the colorectal cancer is morphologically able to be classified in a particular Dukes stage. “Detecting” as used herein further refers to the detection of colorectal cancer recurrence in an individual, using the same detection criteria as indicated above. “Detecting” as used herein still further refers to the measuring of a change in the degree of colorectal cancer before and/or after treatment with a therapeutic compound. In this case, a change in the degree of colorectal cancer in response to a therapeutic compound refers to an increase or decrease in the expression of the marker genes including one or more colorectal cancer associated markers, or alternatively, in the amount of the marker gene polypeptide including one or more colorectal cancer associated markers presented in a clinical sample by at least 10% in response to the presence of a therapeutic compound relative to the expression level in the absence of the therapeutic compound. In addition, a change in the degree of colorectal cancer in response to a therapeutic compound also refers to a change in methylation of colorectal cancer associated markers.

II Identification of the Down-Regulated Nucleic Acid Marker Sequences in Disease Cells

[0052] In one aspect, the present invention pertains to identification of down-regulated (under-expressed) nucleic acid marker sequences in a biological sample from a patient having or suspected of a disease or disorder, such as cancer or a pre-malignant condition. In general, the method of identifying the nucleic acid marker sequences includes (1) providing a pool of target nucleic acids preferably derived from both disease and normal cells and/or tissues and preferably comprising RNA transcripts of the target nucleic acid marker sequences or nucleic acids derived from the RNA transcripts; (2) hybridizing the nucleic acid samples to one or more probes; and (3) detecting the hybridized nucleic acids and determining the expression levels derived from the diseased cells/tissues relative to the expression levels of the same nucleic acids from normal cells and/or tissues. Various conventional methods known in the art may be employed to identify the nucleic acid marker sequences that are down-regulated in a disease, especially cancer. In one embodiment, microarrays such as DNA arrays are employed in the method.

[0053] The nucleic acids can be isolated/extracted from any source. Preferably, the sample may be obtained from cell lines, blood, sputum, stool, urine, serum, cerebro-spinal fluid, tissue embedded in paraffin, for example, tissue from eyes, intestine, kidneys, brain, heart, prostate, lungs, breast or liver, histological slides, and all possible combinations thereof.

[0054] A variety of methods have been employed to achieve this end. They include differential screening of cDNA libraries with selective probes, subtractive hybridization utilizing DNA/DNA hybrids or DNA/RNA hybrids, RNA fingerprinting and differential display (Mather, et al. (1981) Cell 23:369-378; Hedrick et al. (1984) Nature 308:149-153; Davis et al. (1992) Cell 51:987-1000; Welsh et al. (1992) Nucleic Acids Res. 20:4965-4970; and Liang and Pardee (1992) Science 257:967-971). Recently, PCR-coupled subtractive processes have also been reported (Straus and Ausubel (1990) Proc. Natl. Sci. USA 87:1889-1893; Sive and John (1988) Nucleic Acids Res. 16:10937; Wieland et al. (1990) Proc. Natl. Acad. Sci. USA 87:2720-2724; Wang and Brown (1991) Proc. Natl. Acad. Sci. USA 88:11505-11509; Lisitsyn et al. (1993) Science 259:946-951; Zeng et al. (1994) Nucleic Acids Res. 22:4381-4385; Hubank and Schatz (1994) Nucleic Acids Res. 22:5640-5648). Also recently, a microarray technology (DNA chips) developed by Affymetrix (Santa Clara, Calif.) has been used as a powerful tool to simultaneously identify a large number of differentially expressed nucleic acid marker sequences in a biological sample. Each of these methods can be employed in the present invention and is hereby incorporated by reference in their entirety.

[0055] By using the Affymetrix chips (GeneChip Human Genome U133 Set), the inventors of the present invention identified the down-regulated nucleic acid marker sequences that have shown at least about two-fold decrease in expression levels in biological samples from disease cells and/or tissue, including colon cancer-derived cells and/or tissue, relative to the expression level in samples from normal cells and/or tissue, e.g., normal colon tissue and/or normal non-colon tissue. Table 1 describes the identified nucleic acid marker sequences that are down-regulated in tumor cells and/or tissue, e.g., colon cancer-derived cells and/or tissue. The sequences dictated by SEQ ID NO's are genomic sequences of the corresponding genes.

TABLE 1
Sequences with expression down-regulated in CRC as compared to normal tissues

| | | | Cancer | | Normal | | |
|---|---|---|---|---|---|---|---|
| Gene name | GenBank ID | Unigene ID | Mean | Median | Mean | Median | SEQ ID NO |
| CLDN8 | AL049977.1 | Hs.162209 | 0.5 | 0.4 | 24.7 | 16.0 | 1 |
| CLCA4 | NM_012128.2 | Hs.227059 | 0.1 | 0.1 | 12.8 | 13.8 | 2 |
| AQP8 | NM_001169.1 | Hs.176658 | 0.3 | 0.3 | 18.2 | 12.8 | 3 |
| MS4A12 | NM_017716.1 | Hs.272789 | 0.1 | 0.0 | 13.5 | 12.7 | 4 |
| LOC339479 | BF589529 | Hs.106642 | 0.7 | 0.5 | 13.4 | 12.1 | 5 |
| GUCA2B | NM_007102.1 | Hs.32966 | 0.0 | 0.0 | 10.3 | 10.9 | 6 |
| GCG | NM_002054.1 | Hs.1460 | 0.1 | 0.1 | 17.0 | 9.6 | 7 |
| CA1 | NM_001738.1 | Hs.23118 | 0.1 | 0.1 | 8.4 | 9.5 | 8 |
| PYY | NM_004160.1 | Hs.169249 | 0.2 | 0.1 | 12.4 | 9.2 | 9 |
| UGT2B15 | NM_001076.1 | Hs.150207 | 0.4 | 0.3 | 9.2 | 8.5 | 10 |
| GUCA1B | NM_002098.1 | Hs.284258 | 0.1 | 0.1 | 7.4 | 7.7 | 11 |
| | AW519168 | Hs.293441 | 0.6 | 0.6 | 8.8 | 7.6 | 12 |
| UGT2B17 | NM_001077.1 | Hs.183596 | 0.3 | 0.1 | 7.2 | 6.9 | 13 |
| CEACAM7 | L31792.1 | Hs.74466 | 0.3 | 0.1 | 6.6 | 6.5 | 14 |
| CEACAM7 | AF006623.1 | Hs.74466 | 0.3 | 0.2 | 6.5 | 6.4 | 14 |
| TU3A | AL050264.1 | Hs.8022 | 0.5 | 0.3 | 5.9 | 5.4 | 15 |
| SPINK5 | NM_006846.1 | Hs.331555 | 0.3 | 0.2 | 6.8 | 5.3 | 16 |
| NR1H4 | NM_005123.1 | Hs.171683 | 0.7 | 0.7 | 5.0 | 5.3 | 17 |
| TNFRSF17 | NM_001192.1 | Hs.2556 | 0.5 | 0.1 | 5.1 | 5.0 | 18 |
| CLCA1 | AF127036.1 | Hs.194659 | 0.3 | 0.1 | 4.8 | 4.5 | 19 |
| PYY | D13902.1 | Hs.169249 | 0.3 | 0.2 | 5.1 | 4.3 | 9 |
| | AV733266 | Hs.76325 | 0.5 | 0.3 | 3.9 | 4.3 | 20 |
| ANPEP | NM_001150.1 | Hs.1239 | 0.4 | 0.4 | 7.2 | 4.1 | 21 |
| SLC26A2 | AI025519 | Hs.29981 | 0.4 | 0.1 | 4.0 | 4.1 | 22 |
| MT1K | R06655 | Hs.188518 | 0.4 | 0.1 | 5.0 | 4.0 | 23 |
| MMP28 | NM_024302.1 | Hs.231958 | 0.4 | 0.3 | 4.1 | 3.7 | 24 |
| ADAMDEC1 | NM_014479.1 | Hs.145296 | 0.6 | 0.4 | 3.5 | 3.7 | 25 |
| RNAHP | AF078844.1 | Hs.8765 | 0.7 | 0.6 | 3.7 | 3.6 | 26 |
| FLJ21511 | NM_025087.1 | Hs.288462 | 0.2 | 0.2 | 3.7 | 3.6 | 27 |
| ATOH1 | NM_005172.1 | Hs.247685 | 0.5 | 0.2 | 3.7 | 3.6 | 28 |
| | AI732905 | Hs.184507 | 0.0 | 0.0 | 3.6 | 3.6 | 29 |
| | S55735.1 | Hs.293441 | 0.3 | 0.2 | 3.4 | 3.6 | 30 |
| ADH1C | NM_000669.2 | Hs.2523 | 0.1 | 0.1 | 4.0 | 3.5 | 31 |
| | M21692.1 | | 0.6 | 0.4 | 3.2 | 3.5 | 32 |
| PDE9A | NM_002606.1 | Hs.18953 | 0.2 | 0.1 | 4.0 | 3.4 | 33 |
| SLC4A4 | AF011390.1 | Hs.5462 | 0.3 | 0.3 | 3.8 | 3.4 | 34 |
| RNAHP | BF246115 | Hs.8765 | 0.6 | 0.4 | 3.4 | 3.4 | 26 |
| TNA | NM_003278.1 | Hs.65424 | 0.7 | 0.6 | 3.7 | 3.3 | 35 |
| CA4 | NM_000717.2 | Hs.89485 | 0.2 | 0.1 | 3.6 | 3.3 | 36 |
| PRV1 | NM_020406.1 | Hs.232165 | 0.3 | 0.3 | 4.2 | 3.2 | 37 |
| FLJ20132 | NM_017682.1 | Hs.190222 | 0.5 | 0.5 | 3.7 | 3.1 | 38 |
| FLJ21458 | NM_024850.1 | Hs.189109 | 0.6 | 0.4 | 3.6 | 3.1 | 39 |
| LGALS2 | NM_006498.1 | Hs.113987 | 0.3 | 0.2 | 3.1 | 3.1 | 40 |
| EDN3 | NM_000114.1 | Hs.1408 | 0.5 | 0.5 | 3.0 | 3.1 | 41 |
| HSD3B2 | NM_000198.1 | Hs.825 | 0.6 | 0.3 | 7.3 | 3.0 | 42 |
| CA4 | NM_000717.2 | Hs.89485 | 0.1 | 0.0 | 3.8 | 3.0 | 36 |
| | AK025044.1 | | 0.3 | 0.1 | 3.5 | 3.0 | 43 |
| FLJ21511 | NM_025087.1 | Hs.288462 | 0.1 | 0.0 | 2.9 | 3.0 | 27 |
| SGK | NM_005627.1 | Hs.296323 | 0.6 | 0.5 | 3.0 | 2.8 | 44 |
| HPGD | U63296.1 | Hs.77348 | 0.7 | 0.6 | 2.9 | 2.8 | 45 |
| KIAA0523 | BF115148 | Hs.16032 | 0.4 | 0.3 | 2.9 | 2.8 | 46 |
| BCAS1 | NM_003657.1 | Hs.129057 | 0.5 | 0.4 | 3.0 | 2.7 | 47 |
| UGT1A8 | NM_019076.1 | Hs.278741 | 0.4 | 0.3 | 2.7 | 2.7 | 48 |
| MT1F | M10943 | | 0.5 | 0.3 | 2.6 | 2.7 | 49 |
| FMO5 | AK022172.1 | Hs.14286 | 0.6 | 0.5 | 2.5 | 2.7 | 50 |
| SCGB2A1 | NM_002407.1 | Hs.97644 | 0.3 | 0.1 | 4.0 | 2.6 | 51 |
| ABCA8 | NM_007168.1 | Hs.38095 | 0.5 | 0.4 | 3.6 | 2.6 | 52 |
| FLJ32987 | NM_016459.1 | Hs.122492 | 0.4 | 0.2 | 3.6 | 2.6 | 53 |
| RDHL | NM_005771.1 | Hs.179608 | 0.2 | 0.1 | 3.2 | 2.6 | 54 |
| FLJ22595 | NM_025047.1 | Hs.287702 | 0.3 | 0.3 | 3.1 | 2.6 | 55 |
| CHGA | NM_001275.2 | Hs.172216 | 0.2 | 0.1 | 3.5 | 2.5 | 56 |
| LOC63928 | NM_022097.1 | Hs.178589 | 0.2 | 0.0 | 2.8 | 2.5 | 57 |
| SCNN1B | NM_000336.1 | Hs.37129 | 0.3 | 0.3 | 2.7 | 2.5 | 58 |
| ADH1B | M24317.1 | Hs.4 | 0.7 | 0.5 | 2.7 | 2.5 | 59 |
| MT1H | NM_005951.1 | Hs.2667 | 0.6 | 0.4 | 2.4 | 2.5 | 60 |
| SST | NM_001048.1 | Hs.12409 | 0.6 | 0.5 | 4.9 | 2.4 | 61 |
| FLJ12768 | NM_025163.1 | Hs.289077 | 0.6 | 0.5 | 2.7 | 2.4 | 62 |
| MT1G | NM_005950.1 | Hs.334409 | 0.6 | 0.5 | 2.5 | 2.4 | 63 |
| GPR2 | NM_016602.1 | Hs.278446 | 0.7 | 0.7 | 2.4 | 2.4 | 64 |
| GLUC | NM_020973.1 | Hs.146182 | 0.4 | 0.4 | 3.5 | 2.3 | 65 |
| ABCG2 | AF098951.2 | Hs.194720 | 0.5 | 0.4 | 2.8 | 2.3 | 66 |
| HPGD | NM_000860.1 | Hs.77348 | 0.6 | 0.4 | 2.6 | 2.3 | 45 |
| GPT | NM_005309.1 | Hs.103502 | 0.4 | 0.2 | 2.5 | 2.3 | 67 |
| CEACAM1 | X16354.1 | Hs.50964 | 0.6 | 0.6 | 2.5 | 2.3 | 68 |
| CEACAM1 | NM_001712.1 | Hs.50964 | 0.6 | 0.5 | 3.0 | 2.2 | 68 |
| VIP | NM_003381.1 | Hs.53973 | 0.7 | 0.5 | 3.0 | 2.2 | 69 |
| NEDD4L | AB007899.1 | Hs.12017 | 0.6 | 0.5 | 2.7 | 2.2 | 70 |
| NPY1R | NM_000909.1 | Hs.169266 | 0.6 | 0.4 | 2.6 | 2.2 | 71 |
| CEACAM1 | D12502.1 | Hs.50964 | 0.6 | 0.5 | 2.6 | 2.2 | 68 |
| MGC12335 | AL022724 | | 0.6 | 0.5 | 2.5 | 2.2 | 72 |
| IGLJ3 | D01059.1 | Hs.181125 | 0.7 | 0.6 | 2.3 | 2.2 | 73 |
| MUC2 | NM_002457.1 | Hs.315 | 0.4 | 0.1 | 2.2 | 2.2 | 74 |
| TNXB | M25813.1 | Hs.169886 | 0.5 | 0.4 | 2.6 | 2.1 | 75 |
| DKFZp547M236 | NM_018713.1 | Hs.20981 | 0.4 | 0.3 | 2.6 | 2.1 | 76 |
| HPGD | J05594.1 | Hs.77348 | 0.5 | 0.4 | 2.5 | 2.1 | 45 |
| FLJ10718 | NM_018192.1 | Hs.42824 | 0.5 | 0.3 | 2.5 | 2.1 | 77 |
| HSD17B2 | NM_002153.1 | Hs.155109 | 0.6 | 0.3 | 2.3 | 2.1 | 78 |
| CACNB2 | AI040163 | Hs.30941 | 0.6 | 0.4 | 2.3 | 2.1 | 79 |
| | NM_007116.1 | | 0.6 | 0.5 | 2.8 | 2.0 | 80 |
| MUCDHL | NM_021924.1 | Hs.165619 | 0.4 | 0.3 | 2.5 | 2.0 | 81 |
| HRASLS2 | NM_017878.1 | Hs.272805 | 0.8 | 0.8 | 2.3 | 2.0 | 82 |
| IL1R2 | NM_004633.1 | Hs.25333 | 0.3 | 0.3 | 2.2 | 2.0 | 83 |
| CYP2C18 | NM_000772.1 | Hs.702 | 0.8 | 0.6 | 2.5 | 1.9 | 84 |
| TNXB | BE044614 | Hs.169886 | 0.5 | 0.4 | 2.5 | 1.9 | 75 |
| ENTPD5 | NM_001249.1 | Hs.80975 | 0.5 | 0.5 | 2.3 | 1.9 | 85 |
| FLJ10970 | NM_018286.1 | Hs.173233 | 0.5 | 0.5 | 2.3 | 1.9 | 86 |
| CLDN5 | NM_003277.1 | Hs.110903 | 0.7 | 0.7 | 2.1 | 1.9 | 87 |
| GPR105 | NM_014879.1 | Hs.2465 | 0.7 | 0.6 | 2.0 | 1.9 | 88 |
| | AB002438.1 | | 0.7 | 0.7 | 3.1 | 1.8 | 89 |
| SPINK4 | NM_014471.1 | Hs.129778 | 0.5 | 0.2 | 2.7 | 1.8 | 90 |
| FHL1 | AF098518.1 | Hs.239069 | 0.9 | 0.7 | 2.5 | 1.8 | 91 |
| FHL1 | AF220153.1 | Hs.239069 | 0.7 | 0.6 | 2.1 | 1.8 | 91 |
| SI | NM_001041.1 | Hs.2996 | 0.4 | 0.1 | 1.9 | 1.8 | 92 |
| DEFB1 | U73945.1 | Hs.32949 | 0.7 | 0.4 | 2.3 | 1.7 | 93 |
| KLRB1 | NM_002258.1 | Hs.169824 | 0.7 | 0.6 | 2.2 | 1.7 | 94 |
| POU2AF1 | NM_006235.1 | Hs.2407 | 0.5 | 0.3 | 2.0 | 1.7 | 95 |
| MEP1B | NM_005925.1 | Hs.194777 | 0.7 | 0.6 | 2.8 | 1.6 | 96 |
| FHL1 | U29538.1 | Hs.239069 | 0.9 | 0.8 | 2.2 | 1.6 | 91 |
| TRG | M16768.1 | Hs.112259 | 0.7 | 0.6 | 2.1 | 1.6 | 97 |
| EMP1 | NM_001423.1 | Hs.79368 | 0.8 | 0.7 | 2.0 | 1.6 | 98 |
| DNASE1L3 | NM_004944.1 | Hs.88646 | 0.6 | 0.5 | 2.0 | 1.6 | 99 |
| PDK4 | NM_002612.1 | Hs.299221 | 0.7 | 0.6 | 2.4 | 1.5 | 100 |
| EMP1 | NM_001423.1 | Hs.79368 | 0.7 | 0.6 | 2.2 | 1.5 | 98 |
| SLC20A1 | NM_005415.2 | Hs.78452 | 0.8 | 0.7 | 2.0 | 1.5 | 101 |
| MMP15 | NM_002428.1 | Hs.80343 | 0.6 | 0.4 | 2.0 | 1.5 | 102 |
| BCHE | NM_000055.1 | Hs.1327 | 0.7 | 0.8 | 1.9 | 1.5 | 103 |
| | AK023795.1 | | 0.7 | 0.7 | 1.9 | 1.5 | 104 |
| | AL137750.1 | | 0.8 | 0.7 | 3.5 | 1.4 | 105 |
| C7 | NM_000587.1 | Hs.78065 | 0.7 | 0.4 | 1.9 | 1.3 | 106 |
| MYH11 | NM_022870.1 | Hs.78344 | 0.8 | 0.8 | 1.7 | 1.3 | 107 |
| FLJ20225 | NM_019062.1 | Hs.124835 | 0.6 | 0.6 | 1.5 | 1.3 | 108 |
| CA2 | M36532.1 | Hs.155097 | 0.1 | 0.0 | 3.0 | 3.1 | 109 |
| SLC4A4 | NM_003759.1 | Hs.5462 | 0.1 | 0.1 | 3.0 | 2.9 | 34 |
| FCGBP | NM_003890.1 | Hs.111732 | 0.1 | 0.0 | 2.4 | 2.2 | 110 |
| CEACAM7 | NM_006890.1 | Hs.74466 | 0.2 | 0.1 | 3.0 | 3.0 | 14 |
| HMGCS2 | NM_005518.1 | Hs.59889 | 0.3 | 0.2 | 2.5 | 2.2 | 111 |
| PLAC8 | NM_016619.1 | Hs.107139 | 0.3 | 0.1 | 1.9 | 1.8 | 112 |
| FLJ22543 | NM_024308.1 | Hs.8949 | 0.4 | 0.3 | 2.5 | 2.3 | 113 |
| | NM_017678.1 | Hs.179100 | 0.3 | 0.0 | 2.1 | 1.8 | 114 |
| PCK1 | NM_002591.1 | Hs.1872 | 0.4 | 0.4 | 2.6 | 2.9 | 115 |
| KRT20 | AI732381 | Hs.84905 | 0.4 | 0.4 | 2.3 | 2.2 | 116 |
| PIGR | NM_002644.1 | Hs.205126 | 0.4 | 0.1 | 1.7 | 1.7 | 117 |
| EKI1 | NM_018638.2 | Hs.120439 | 0.8 | 0.8 | 3.6 | 1.5 | 118 |
| HIG1 | BE739519 | Hs.7917 | 0.4 | 0.4 | 1.7 | 1.6 | 119 |
| | AF333388.1 | | 0.6 | 0.3 | 2.1 | 2.3 | 120 |
| | AL031602 | | 0.5 | 0.4 | 2.0 | 2.1 | 121 |
| CKBB | NM_001823.1 | Hs.173724 | 0.6 | 0.5 | 2.1 | 2.0 | 122 |
| CES2 | BF033242 | Hs.282975 | 0.5 | 0.4 | 1.8 | 1.9 | 123 |
| | NM_022129.1 | Hs.16341 | 0.6 | 0.4 | 1.9 | 1.9 | 124 |
| MT1X | NM_005952.1 | Hs.374950 | 0.6 | 0.5 | 1.9 | 2.0 | 125 |
| MT2A | NM_005953.1 | Hs.118786 | 0.7 | 0.5 | 1.8 | 1.6 | 126 |
| FHL1 | NM_001449.1 | Hs.239069 | 0.6 | 0.6 | 1.9 | 1.8 | 91 |
| STK39 | NM_002450.1 | Hs.199263 | 0.7 | 0.6 | 1.8 | 1.9 | 127 |
| SFN | X57348 | Hs.184510 | 0.7 | 0.6 | 1.5 | 1.2 | 128 |
| GPX3 | NM_002084.2 | Hs.386793 | 0.8 | 0.7 | 1.4 | 1.3 | 129 |

[0056] Accordingly, the present invention further provides nucleic acid marker sequences in Table 1 that are under-expressed (down-regulated) by at least about 2 fold, at least about 5 fold, at least about 10 fold, at least about 20 fold, or at least about 50 fold. In one embodiment, the present invention encompasses nucleic acid marker sequences that are under-expressed (down-regulated) in disease cells and/or tissue, especially in colon cancer cells and/or tissue and/or colon cancer-derived cell lines. In a preferred embodiment, the nucleic acid marker sequences are under-expressed (down-regulated) by at least about 2 fold, at least about 5 fold, at least about 10 fold, at least about 20 fold, or at least about 50 fold.

[0057] The present invention also encompasses nucleic acid sequences which differ from the nucleic acid marker sequences identified in Tables 1 and 2, but which produce the same phenotypic effect, for example, an allelic or splice variant.

[0058] The present invention further encompasses polynucleotides which are at least 85%, or at least 90%, or more preferably equal to or greater than 95% identical to the sequences of the RNA transcripts or cDNAs of the nucleic acid marker sequences. Sequence identity as used herein refers to the proportion of base matches between two nucleic acid sequences or the proportion amino acid matches between two amino acid sequences. When sequence homology is expressed as a percentage, e.g., 50%, the percentage denotes the proportion of matches over the length of sequence from one sequence that is compared to some other sequence.

III Identification of CpG Islands

[0059] In another aspect, the present invention pertains to the identification of CpG islands on the down-regulated marker sequences including but not limited to, the marker sequences described in Table 1. In selecting a CpG island, the identification preferably uses the Gardiner-Garden and Frommer definition for CpG islands. See Gardiner-Garden and Frommer, “CpG islands in vertebrate genomes,” J. Mol. Biol. 196(2): 261-282 (1987). That is, a CpG island must have sequences greater than 200 bp in length, with a GC content greater than 0.5 and an observed to expected ratio based on GC content greater than 0.6. Moreover, the sequences that span from about 1000 bp upstream of the start of the first exon to about 1000 bp downstream of the first exon are searched for the presence of any CpG island. The search for CpG islands can be made manually or with programs. For example Takai and Jones has developed a web program for searching CpG islands, which is incorporated by reference in its entirety herein. See Takai and Jones, “The CpG Island Searcher: A New WWW Resource,” In Silico Biol. Feb. 4, 2003. See also the web program entitled “CpG Island Searcher” designed by Takai, Daiya, or Takai, D and Jones, P., “Comphrensive analysi of CpG islands in human chromosomes 21 and 22,” PNSA USA, 99(6): 3740-3745. See also a web program entitled “CpGPlot/CpGReport/Isochore,” made by EMBL-EBI European Bioinformatics Institute, or Rice, P et al., “EMBOSS: the European Molecular Biology Open Software Suite,” Trends Genet, 16(6):276-7 (2000), or Gardiner-Garden, M and Frommer, M, “CpG islands in vertebrate genomes,” J. Mol. Biol., 196(2):261-82 (1987), or Bernardi, G, “Isochores and the evolutionary genomics of vertebrates,” Gene, 241(1): 3-17 (2000), or Pesole, G. et al., “Isochore specificity of AUG initiator context of human genes,” FEBS Lett., 464(1-2): 60-62 (1999), or Larsen, F. et al., “CpG islands as gene markers in the human genome,” Genomics, 13(4): 1095-1107 (1992). Based on a CpG-island-extraction algorithm, the web program determines the location of CpG islands using parameters (lower limit of % GC, observed CpG/expected CpG ratio, and length) set by the user, to display the value of parameters on each CpG island, and provide a graphical map of CpG dinucleotide distribution and borders of CpG islands. A command-line version of the web program can also be used to search larger sequences.

[0060] For some genes, the genomic sequences are available and the promoter regions have been identified, thereby, it is relatively easy for one to identify a potential CpG island within the promoter-first exon regions. For other genes, the promoter regions of genomic sequences are not yet identified. Therefore, in one embodiment, the present invention provides a method of identifying CpG islands when the promoter regions of genomic sequences are not yet identified. Such method includes, for example, first identifying the transcription start site, then analyzing the CpG islands in the promoter regions. For example, Suzuki et al. describe an “oligo-capping” method to identify and characterize the promoter regions and CpG islands across the promoter regions of human genes. See Suzuki, Y. et al., “Identification and Characterization of the Potential Promoter Regions of 1031 Kinds of Human Genes,” Genome Research, 677-684 (2001), which is incorporated by reference herein. In this method, the promoters of genes are first identified by the oligo-capped method. See Suzuki, et al., “Statical analysis of the 5′ untranslated region of human mRNA using oligo-capped cDNA libraries,” Genomics, 64: 286-297 (2000). The mRNA start sites are then mapped onto the genomic sequences with the help of BLASTN program and CLUSTASLW program. For each gene, the genomic sequences between 1000 bp upstream and 1000 bp downstream are retrieved as regions for identification of CpG islands. The promoter regions are defined as the sequences extending from about 1000 bp, preferably about 500 bp upstream to about 1000 bp, preferably 500 bp downstream of the identified mRNA start sites. For analysis of CpG islands, the moving average for % (G+C) and the CpG ratio are calculated for each sequence, using a selected size, preferably 100 bp window moving along the sequence at 1 bp intervals. The CpG ratio is calculated according to the Gardiner-Garden and Frommer criteria: (number of CG×N)/(number of C×number of G), where N is the total number of nucleotides in the sequence being analyzed.

[0061] By applying the Gardiner-Garden and Frommer criteria and using one of the methods described above, the representative numbers of the CpG islands were identified and listed in Table 2. The sequences dictated by SEQ ID NO's are the same as the sequences designated in the column “Search parameter.”

TABLE 2
Subset of sequences containing at least one CpG island in the promoter-first exon region.

| | | | # CpG | | SEQ ID |
|---|---|---|---|---|---|
| Gene name | GenBank ID | Unigene ID | islands | Search parameter | NO |
| PYY | NM_004160.1 | Hs.169249 | 2 | 1000-exon1 + 1000 | 130 |
| ANPEP | NM_001150.1 | Hs.1239 | 1 | 1000-exon1 + 1000 | 131 |
| SLC26A2.a | AI025519 | Hs.29981 | 3 | 1000-exon1 + 1000 | 132 |
| MT1K | R06655 | Hs.188518 | 1 | 1000-exon1 + 500 | 133 |
| MMP28 | NM_024302.1 | Hs.231958 | 2 | 1000-exon1 + 500 | 134 |
| FLJ21511 | NM_025087.1 | Hs.288462 | 1 | 1000-exon1 + 500 | 135 |
| ATOH1 | NM_005172.1 | Hs.247685 | 3 | 1000-exon1 + 500 | 136 |
| PDE9A | NM_002606.1 | Hs.18953 | 3 | 1000-exon1 + 500 | 137 |
| CA4 | NM_000717.2 | Hs.89485 | 1 | 1000-exon1 + 500 | 138 |
| EDN3 | NM_000114.1 | Hs.1408 | 1 | 1000-exon1 + 500 | 139 |
| SGK | NM_005627.1 | Hs.296323 | 8 | 1000-exon 1-4 + 500 | 140 |
| HPGD | U63296.1 | Hs.77348 | 1 | 1000-exon1 + 500 | 141 |
| KIAA0523 | BF115148 | Hs.16032 | 1 | 1000-exon1 + 500 | 142 |
| MT1F | M10943 | | 1 | 1000-exon1 + 500 | 143 |
| CHGA | NM_001275.2 | Hs.172216 | 1 | 1000-exon1 + 500 | 144 |
| LOC63928 | NM_022097.1 | Hs.178589 | 1 | 1000-exon1 + 500 | 145 |
| SCNN1B | NM_000336.1 | Hs.37129 | 1 | 1000-exon1 + 500 | 146 |
| SST | NM_001048.1 | Hs.12409 | 1 | 1000-exon1 + 500 | 147 |
| FLJ12768 | NM_025163.1 | Hs.289077 | 1 | 1000-exon1 + 500 | 148 |
| MT1G | NM_005950.1 | Hs.334409 | 1 | 1000-exon1 + 500 | 149 |
| GPR2 | NM_016602.1 | Hs.278446 | 1 | 1000-exon1 + 500 | 150 |
| SLC4A4 | AF011390.1 | Hs.5462 | 2 | 1000-exon1 + 500 | 151 |
| ABCG2 | AF098951.2 | Hs.194720 | 1 | 1000-exon1 + 500 | 152 |
| | NM_015277 | | 1 | 1000-exon1 + 500 | 153 |
| NPY1R | NM_000909.1 | Hs.169266 | 1 | 1000-exon1 + 1000 | 154 |
| FLJ10718 | NM_018192.1 | Hs.42824 | 1 | 1000-exon1 + 500 | 155 |
| CACNB2 | AI040163 | Hs.30941 | 1 | 1000-exon1 + 500 | 156 |
| | BC020966 | | 1 | 1000-exon1 + 500 | 157 |
| CLDN5 | NM_003277.1 | Hs.110903 | 2 | 1000-exon1 + 500 | 158 |
| | NM_001449 | | 1 | 1000-exon1 + 500 | 159 |
| PDK4 | NM_002612.1 | Hs.299221 | 1 | 1000-exon1 + 500 | 160 |
| SLC20A1 | NM_005415.2 | Hs.78452 | 1 | 1000-exon1 + 1000 | 161 |
| MMP15 | NM_002428.1 | Hs.80343 | 1 | 1000-exon1 + 500 | 162 |
| | AK023795.1 | | 2 | 1000-exon1 + 500 | 163 |
| | AL137750.1 | | 1 | 1000-exon1 + 500 | 164 |
| CA2 | M36532.1 | Hs.155097 | 1 | 1000-exon1 + 500 | 165 |
| FCGBP | NM_003890.1 | Hs.111732 | 6 | entire genomic seq | 166 |
| PLAC8 | NM_016619.1 | Hs.107139 | 1 | 1000-exon1 + 500 | 167 |
| FLJ22543 | NM_024308.1 | Hs.8949 | 1 | 1000-exon1 + 500 | 168 |
| EKI1 | NM_018638.2 | Hs.120439 | 1 | 1000-exon1 + 500 | 169 |
| HIG1 | BE739519 | Hs.7917 | 1 | 1000-exon1 + 500 | 170 |
| | AL031602 | | 2 | 1000-exon1 + 500 | 171 |
| CES2 | BF033242 | Hs.282975 | 1 | 1000-exon1 + 500 | 172 |
| MT1X | NM_005952.1 | Hs.374950 | 1 | 1000-exon1 + 500 | 173 |
| MT2A | NM_005953.1 | Hs.118786 | 1 | 1000-exon1 + 500 | 174 |
| FHL1 | NM_001449.1 | Hs.239069 | 1 | 1000-exon1 + 500 | 175 |
| STK39 | NM_002450.1 | Hs.199263 | 1 | 1000-exon1 + 500 | 176 |
| SFN | X57348 | Hs.184510 | 1 | 1000-exon1 + 500 | 177 |
| GPX3 | NM_002084.2 | Hs.386793 | 1 | 1000-exon1 + 500 | 178 |

[0062] Accordingly, the present invention further provides CpG islands within the promoter-first exon region of genes that are down-regulated in disease including cancer cells. Once the CpG islands are identified, they can be used for a number of different techniques. In one technique, they are tested to identify sequences which are differentially methylated between maternal and paternal chromosomes. In another technique, they are tested to identify sequences which are differentially methylated between hydatidiform moles and teratomas. In another technique, they are tested to identify sequences which are differentially methylated between disease cells or tissues and normal healthy cells or tissues. In another technique, they are mapped to a genomic region. The CpG islands can be used to identify an imprinted gene adjacent to the methylated CpG island, as methylated CpG islands are markers for such genes. If a CpG island is found to map to the same region as a disease which is preferentially transmitted by one parent, an imprinted gene in the region can be identified as a candidate gene involved in transmitting the disease. The CpG islands can be used to screen populations of individuals for methylation. A sequence which is differentially methylated between individuals is a methylation polymorphism which can be used to identify individuals.

IV Verification of Methylation

[0063] In another aspect, the present invention pertains to determining whether the candidate CpG sites within the CpG islands of the down-regulated marker sequences are methylated in diseased cells or tissues. This can be performed by using methylation assays capable of determining differential methylation levels within CpG sites between diseased cells or tissues and normal cells or tissues.

[0064] Various methods may be used for determining the methylation status of specific CpG dinucleotides. Such methods include but not limited to, restriction landmark genomic scanning, see Kawai et al., “Comparison of DNA methylation patterns among mouse cell lines by restriction landmark genomic scanning,” Mol. Cell Biol. 14(11): 7421-7427 (1994); methylated CpG island amplification, see Toyota et al., “Identification of differentially methylated sequences in colorectal cancer by methylated CpG island amplification,” Cancer Res., 59: 2307-2312 (1999), see also WO00/26401A1; differential methylation hybridization, see Huang et al., “Methylation profiling of CpG islands in human breast cancer cells,” Hum. Mol. Genet., 8: 459-470 (1999); methylation-specific PCR (MSP), see Herman et al., “Methylation-specific PCR: a novel PCR assay for methylation status of CpG islands,” PNAS USA 93: 9821-9826 (1992), see also U.S. Pat. No. 5,786,146; methylation-sensitive single nucleotide primer extension (Ms-SNuPE), see U.S. Pat. No. 6,251,594; combined bisulfite restriction analysis (COBRA), see Xiong and Laird, “COBRA: a sensitive and quantitative DNA methylation assay,” Nucleic Acids Research, 25(12): 2532-2534 (1997); bisulfite genomic sequencing, see Frommer et al., “A genomic sequencing protocol that yields a positive display of 5-methylcytosine residues in individual DNA strands,” PNAS USA, 89: 1827-1831 (1992); and methylation-specific primer extension (MSPE), etc. All these methods for determining methylation status of CpG islands are incorporated by reference herein.

[0065] These methods may be roughly characterized as belonging to one of the two general categories: namely, restriction enzyme based technologies, or unmethylated cytosine conversion based technologies. The restriction enzyme based technologies use the methylation sensitive restriction endonucleases for the differentiation between methylated and unmethylated cytosines. In particular, the methylation sensitive restriction enzymes either cleave, or fail to cleave DNA according to the cytosine methylation state present in the recognition motif (e.g., the CpG sequences thereof). The digested DNA fragments are typically separated on the basis of size, and the methylation status of the sequence is thereby deduced, based on the presence or absence of particular fragments. Preferably, a post-digest PCR amplification step is added wherein a set of two oligonucleotide primers, one on each side of the methylation sensitive restriction site, is used to amplify the digested DNA. PCR products are not detectable where digestion of the subtended methylation sensitive restriction enzyme site occurs.

[0066] Cytosine conversion based technologies comprises methylation status-dependent chemical modification of CpG sequences within isolated nucleic acids, or within fragments thereof, and followed by nucleic acid analysis. Chemical reagents that are able to distinguish between methylated and non-methylated CpG dinucleotide sequences include hydrazine, which cleaves the nucleic acid, and the more preferred bisulfite treatment. Bisulfite treatment followed by alkaline hydrolysis specifically converts non-methylated cytosine to uracil, leaving 5-methylcytosine unmodified. See Olek A. et al., “A modified and improved method for bisulfite based cytosine methylation analysis,” Nucleic Acids Res., 24:5064-5066 (1996). The bisulfite-treated DNA may then be analyzed by conventional molecular biology techniques, such as PCR amplification, sequencing, and detection comprising oligonucleotide hybridization.

[0067] In one preferred embodiment, the MSP method is employed in the present invention. In this method, the DNA of interest is treated such that methylated and non-methylated cytosines are differentially modified (e.g., by bisulfite treatment) in a manner discernable by their hybridization behavior. PCR primers specific to each of the methylated and non-methylated states of the DNA are used in PCR amplification. Products of the amplification reaction are then detected, allowing for the deduction of the methylation status of the CpG position within the genomic DNA.

[0068] In another preferred embodiment, the bisulfite genomic sequencing method is employed. In this method, nucleic acids, preferably genomic DNAs are treated with bisulfite, followed by PCR amplification of the bisulfite treated nucleic acids and sequencing of the amplified nucleic acids.

[0069] In yet another preferred embodiment, the MSPE method is employed. This method includes chemically modifying the CpG sites, converting the non-methylated cytosines into uracil, leaving the 5′-methylated cytosine unmodified. The chemically treated nucleic acids such as DNA may then be amplified by conventional molecular biology techniques including PCR amplification. The methylation state or status in the amplified DNA products may then be analyzed by primer extension reaction by using both tagged reverse primers, dNTPs or ddNTPs. Preferably, the dNTPs, ddNTPs or reverse primers that are incorporated into the extension products can be labeled with a detectable label. The detectable label can comprise a radiolabel, a fluorescent label, a luminescent label, an antibody linked to a nucleotide that can be subsequently detected, a hapten linked to a nucleotide that can be subsequently detected, or any other nucleotide or modified nucleotide that can be detected either directly or indirectly.

[0070] In a further preferred embodiment, the present invention also provides determining the differential methylation levels of the candidate CpG sites in disease cells by means of high throughput (on microarrays). Microarray based analysis of the relative methylation levels enables working with hundreds of thousands of CpG sites simultaneously rather than one or a few CpG sites at a time. A DNA microarray is composed of an ordered set of DNA molecules of known sequences usually arranged in rectangular configuration in a small space such as 1 cm² in a standard microscope slide format. For example, an array of 200×200 would contain 40,000 spots with each spot corresponding to a probe of known sequence. Such a microarray can be potentially used to simultaneously monitor the expression of 40,000 nucleic acids in a given cell type under various conditions. The probes usually take the form of cDNA, ESTs or oligonucleotides. Most preferred are ESTs and oligonucleotides in the range of 30-200 bases long as they provide an ideal substrate for hybridization. There are two approaches to building these microarrays, also known as chips, one involving covalent attachment of pre-synthesized probes; the other involving building or synthesizing probes directly on the chip. The sample or test material usually consists of nucleic acids that have been amplified by PCR. PCR serves the dual purposes of amplifying the starting material as well as allowing introduction of fluorescent tags. For a detailed discussion of microarray technology, see e.g., Graves, Trends Biotechnol. 17: 127-134 (1999).

[0071] Methylation can also be detected by means of high-density microarrays. High-density microarrays are built by depositing an extremely minute quantity of DNA solutions at precise location on an array using high precision machines, a number of which are available commercially. An alternative approach pioneered by Packard Instruments, enables deposition of DNA in much the same way that ink jet printer deposits spots on paper. High-density DNA microarrays are commercially available from a number of sources such as Affymetrix, Incyte, Mergen, Genemed Molecular Biochemicals, Sequenom, Genomic Solutions, Clontech, Research Genetics, Operon and Stratagene. Currently, labeling for DNA microarray analysis involves fluorescence, which allows multiple independent signals to be read at the same time. This allows simultaneous hybridization of the same chip with two samples labeled with different fluorescent dyes. The calculation of the ratio of fluorescence at each spot allows determination of the relative change in the expression of each gene, or the relative methylation level herein, under two different conditions. For example, comparison between a normal tissue and a corresponding tumor tissue using the approach helps in identifying genes whose expression is significantly altered. Thus, the method offers a particularly powerful tool when the gene expression profile of the same cell is to be compared under two or more conditions. High-resolution scanners with capability to monitor fluorescence at various wavelengths are commercially available.

[0072] For purposes of detecting large numbers of CpG sites, mixtures of products from different CpG sites using various methylation detection methods as discussed herein, are applied to a microarray, with each CpG site corresponding to a particular location on the microarray. The signal intensity of the products at a particular location can be then determined with methods well known in the art, and the relative methylation levels at those CpG sites can be calculated by comparing the signal intensity at two locations on the microarray corresponding to the methylation and unmethylation states of one particular CpG site.

[0073] Table 3 discloses a representative number of down-regulated marker genes whose CpG sites are shown to be differentially methylated in disease.

TABLE 3
Sequences selected for verification of
methylation status in colorectal cancer

| | | SEQ ID |
|---|---|---|
| Gene | Product | NO |
| MMP28 | matrix metallo-proteinase 28 | 134 |
| SLC4A4 | solute carrier family 4, sodium bicarbonate | 151 |
| | cotransporter, member 4 | |
| PYY | peptide YY | 130 |
| SST | somatostatin | 147 |
| PDE9A | phosphodiesterase 9A | 137 |
| CHGA | chromogranin A (parathyroid secretory protein | 144 |
| LOC63928 | hepatocellular carcinoma antigen gene 520 | 145 |
| SCNN1B | sodium channel, nonvoltage-gated 1, beta (Liddle | 146 |
| | syndrome) | |
| CA4 | carbonic anhydrase IV | 138 |
| CA2 | carbonic | 164 |
| | anhydrase II | |
| FCGBP | Fc fragment of IgG binding protein | 165 |
| CKBB | creatine kinase, brain | 171 |
| CES2 | carboxylesterase 2 (intestine, liver) | 172 |
| MT1X | metallothionein 1X | 173 |
| MT2A | metallothionein 2A | 174 |
| FHL1 | four and a half LIM domains 1 | 175 |
| STK39 | serine threonine kinase 39 | 176 |
| SFN | stratifin | 177 |
| GPX3 | glutathione peroxidase 3 | 178 |

V Selection of CpG Sites

[0074] In another aspect, the present invention pertains to selection of CpG sites within the CpG islands of the down-regulated marker sequences that can be used in diagnostic, prognostic, and therapeutic assays for detecting a disease, preferably cancer. Generally, the selection comprises the steps of (1) determining the functional recovery of the down-regulated marker sequences containing the methylated CpG sites after demethylation treatment, and (2) validating the CpG sites on the nucleic acid marker sequences in clinical samples. Recently, the abnormal methylation of CpG sites has emerged as a significant mechanism of gene inactivation, particularly tumor suppressor gene inactivation, in cancer. Therefore, the CpG sites whose hypermethylation strongly correlates with disease conditions have significant clinical applications.

[0075] In the first step, identifying the CpG sites on the down-regulated marker sequences with great potential for diagnostic utility includes determining whether the methylated CpG sites would show functional recovery of the nucleic acid sequences containing the CpG sites after demethylation treatment. The term “functional recovery” by its ordinary meaning, is meant that the sequences containing the CpG sites go back to at least partially normal function. The term “functional recovery” also means that the expression levels of the nucleic acid sequences containing the CpG sites go back to normal levels, with the levels being manifested at both nucleic acid and protein levels. For example, in one embodiment, functional recovery would mean a significant increase in the nucleic acid expression levels of the nucleic acid sequences containing the CpG sites selected in step one after demethylation treatment. The term “significant increase in the nucleic acid expression levels” as used herein, refers to an increase in nucleic acid expression levels by at least about 10%, preferably at least about 15%, about 25%, about 30%, about 40%, about 50%, about 65%, about 75%, about 85%, about 90%, about 95% or greater. Preferably, the nucleic acid expression levels are determined by measuring the RNA levels of the nucleic acid sequences containing the CpG sites. In another embodiment, functional recovery after demethylation treatment would also result in a significant increase in the levels of the proteins encoded by the down-regulated marker sequences containing the CpG sites after demethylation treatment. The term “significant increase in the levels of the proteins” as used herein, refers to an increase in protein levels by at least about 15%, preferably at least about 25%, 35%, 50%, or greater.

[0076] In yet another embodiment, functional recovery would also mean a significant restoration of functional phenotypes involving the functionality of the proteins encoded by the sequences containing the CpG sites selected in step one. The CpG sites that show functional recovery after the demethylation treatment are preferably selected for.

[0077] In association with the first step of identifying the CpG sites with great potential for diagnostic utility, a demethylation agent is used to treat the cells or tissues. In a preferred embodiment, the demethylation agent is 5-aza-deoxycytidine. In another preferred embodiment, the concentration of 5-aza-deoxycytidine is in the range of about 1 μM to about 10 μM. The degree of demethylation is determined by any of the methylation assays as described in the previous sections. Preferably, about 30%, more preferably about 40%, or about 50%, or about 60%, or about 75%, or greater reduction in methylation after the demethylation treatment is selected for further assaying the functional recovery.

[0078] Furthermore, in association with the first step of identifying the CpG sites with great diagnostic utility, the functional recovery of the nucleic acid sequences containing the CpG sites is analyzed at the nucleic acid level. That is, the nucleic acid expression levels prior to and after the demethylation treatment are determined and compared with each other either qualitatively or quantitatively. In determining the nucleic acid expression levels, various methods may be employed. These methods generally include the steps of contacting the sample derived from the demethylation treated cells or tissues, with probe, hybridizing, and detecting hybridized probe, but using more quantitative methods and/or comparisons to standards. The amount of hybridization between the probe and target can be determined by any suitable methods, e.g., PCR, RT-PCR, RACE PCR, Northern blot, polynucleotide microarrays, Rapid-Scan, etc., and includes both quantitative and qualitative measurements.

[0079] In one embodiment, reverse transcription PCR (RT-PCR) is performed using primers designed to specifically hybridize to a predetermined portion of mRNA sequences. Generation of a PCR product by such a reaction is thus indicative of the presence of the nucleic acid sequences in the sample. The technique of designing primers for PCR amplification is well known in the art. Oligonucleotide primers and probes are about 5 to about 100 nucleotides in length, ideally from 17 to 40 nucleotides, although primers and probes of different length are of use. Primers for amplification are preferably about 17-25 nucleotides. Primers useful according to the invention are also designed to have a particular melting temperature (Tm) by the method of melting temperature estimation. Commercial programs, including Oligo™ (MBI, Cascade, Colo.), Primer Design and programs available on the Internet, including Primer3 and Oligo Calculator can be used to calculate a Tm of a nucleic acid sequence useful according to the invention. Preferably, the Tm of an amplification primer useful according to the invention, as calculated for example by Oligo Calculator, is preferably between about 45 and 75° C. and more preferably between about 50 and 65° C. Preferably, the Tm of a probe useful according to the invention is 3-5° C. higher than the Tm of the corresponding amplification primers. It is preferred that, following generation of cDNA by RT-PCR, the cDNA fragment is cloned into an appropriate sequencing vector, such as a PCRII vector (TA cloning kit; Invitrogen). The identity of each cloned fragment is then confirmed by sequencing in both directions. It is expected that the sequence obtained from sequencing would be the same as the known sequences of the marker sequences as described herein.

[0080] Alternatively, the nucleic acid expression levels may be detected by Northern analysis. Also alternatively, the nucleic acid expression levels may be determined using the TaqMan™ (Perkin-Elmer, Foster City, Calif.) technique, which is performed with a transcript-specific antisense probe (i.e., a probe capable of specifically hybridizing to the sequences containing the CpG sites). This probe is prepared with a quencher and fluorescent reporter probe complexed to the 5′ end of the oligonucleotide. Different fluorescent markers can be attached to different reporters, allowing for measurement of two products in one reaction (e.g., measurement of the marker sequence). When Taq DNA polymerase is activated, it cleaves off the fluorescent reporters by its 5′-to-3′ nucleolytic activity. The reporters, now free of the quenchers, fluoresce. The color change is proportional to the amount of each specific product and is measured by fluorometer; therefore, the amount of each color can be measured and the RT-PCR product can be quantified. The PCR reactions can be performed in 96 well plates so that samples derived from many individuals can be processed and measured simultaneously. The TaqMan™ system has the additional advantage of not requiring gel electrophoresis and allows for quantification when used with a standard curve.

[0081] In one embodiment, the nucleic acid expression levels can be determined by using methods of microarrays such as a DNA chip in an organized array. Oligonucleotides can be bound to a solid support by a variety of processes, including lithography. These nucleic acid probes comprise a nucleotide sequence at least about 8 nucleotides in length, preferably at least about 12 preferably at least about 15 nucleotides, more preferably at least about 25 nucleotides, and most preferably at least about 40 nucleotides, and up to all or nearly all of a sequence which is complementary to at least a portion of the coding sequence of the genes containing the CpG sites to be analyzed. In some embodiments, the microarrays comprise at least 3, 4, 5, 6, 7, 8, 9, 10, 11, 12, 13, 14, or 15, or more nucleic acids that are complimentary to at least a portion of the coding sequences of the genes containing the CpG sites to be analyzed. The present invention provides significant advantages over the available tests for various diseases including cancers, such as colon cancer, because it increases the reliability of the test by providing an array of nucleic acid markers on a single chip.

[0082] In particular, the method includes obtaining a biopsy, which is optionally fractionated by cryostat sectioning to enrich tumor cells to about 80% of the total cell population. The DNA or RNA is then extracted, amplified, and analyzed with a DNA chip to determine the presence of absence of the marker nucleic acid sequences.

[0083] In one embodiment, the nucleic acid probes are spotted onto a substrate in a two-dimensional matrix or array. Samples of nucleic acids can be labeled and then hybridized to the probes. Double-stranded nucleic acids, comprising the labeled sample nucleic acids bound to probe nucleic acids, can be detected once the unbound portion of the sample is washed away.

[0084] The nucleic acid probe can be spotted on substrates including glass, nitrocellulose, etc. The probes can be bound to the substrate by either covalent bonds or by non-specific interactions, such as hydrophobic interactions. The sample nucleic acids can be labeled using radioactive labels, fluorophores, chromophores, etc.

[0085] In a preferred embodiment, Affymetrix microarrays are employed to determine the nucleic acid expression levels for the purpose of selecting the CpG sites showing great potential for diagnostic utility.

[0086] Furthermore, in association with the first step of identifying the CpG sites with great diagnostic utility, the functional recovery of the genes containing the CpG sites is analyzed at the protein level. That is, the protein levels prior to and after the demethylation treatment are determined and compared with each other either qualitatively or quantitatively. In determining the protein level, the method includes but not limited to, competitive and non-competitive assay systems using techniques such as western blots, radioimmunoassays, ELISA (enzyme linked immunosorbent assay), “sandwich” immunoassays, immunoprecipitation assays, precipitation reactions, gel diffusion precipitin reactions, immunodiffusion assays, agglutination assays, complement-fixation assays, immunoradiometric assays, fluorescent immunoassays, protein A immunoassays, to name but a few. Such assays are routine and well known in the art (see, e.g., Ausubel et al, eds, 1994, Current Protocols in Molecular Biology, Vol. 1, John Wiley & Sons, Inc., New York, which is incorporated by reference herein in its entirety). The protein levels determined by the above methods may be used to correlate with the methylation levels of the selected CpG sites, and in turn with the disease conditions, or progression of the disease conditions.

[0087] In the second step, the validation of the CpG sites selected by the methods of the first step comprises determining correlation of the methylation of the CpG sites with a disease in clinical samples. Preferably, the correlation is determined by detecting the methylation of the CpG sites in clinical samples obtained from a subject having or suspected of having a disease to be detected compared to that in a normal sample. In the case of determining correlation between a specific CpG site and a disease, a good correlation between the methylation at this specific CpG site and a disease could mean that the CpG site shows a significant increase in methylation in disease samples as compared to that in normal, disease-free samples. The CpG sites that show a significant increase in methylation in diseased samples as compared to that in normal, disease-free samples are preferably selected. In one preferred embodiment, the increase in methylation of the CpG sites in disease cells or tissue are preferably at least about 1.5 fold, more preferably 2 fold, over that in normal cells or tissues.

[0088] In addition, a good correlation between the methylation at a specific CpG site on a nucleic acid marker sequences and a disease could also mean that the degree of methylation at the CpG site shows distinct differences at different stages of a disease. For example, the methylation at the specific CpG site could change as the disease progresses to higher stages.

[0089] A good correlation could also encompass the relationship between multiple CpG sites on a single nucleic acid marker sequence and a disease. In this regard, the methylation of multiple CpG sites on one nucleic acid marker sequence could be determined to establish the correlation between said multiple CpG sites and the disease. For example, for one specific disease to be assayed, the methylation at one or more CpG sites on a single nucleic acid marker sequence could either increase or decrease as the disease progresses to advanced stages. Alternatively, either increased number of or decreased number of CpG sites on a single nucleic acid marker sequence could be methylated as the disease progresses to advanced stages.

[0090] Furthermore, based on the good correlation between methylation at the one or more specific CpG sites and a disease, one of skill in the art could establish methylation pattern or fingerprints at said CpG sites corresponding to the disease or the stages of the disease. Such methylation pattern or fingerprints provides for an accurate clinical assessment of the disease in a subject by determining the methylation state of said CpG sites in a sample obtained from the subject.

[0091] The methylation levels of the CpG sites in clinical samples may be determined by methods known in the art, or the methods described above in section V. In one preferred embodiment, the MSP method is employed for this purpose. In another preferred embodiment, the bisulfite genomic sequencing method is employed. In yet another preferred embodiment, the MSPE method is employed. In a further preferred embodiment, the high throughput or microarray methods are employed. The CpG sites that show signification methylation in the disease such as cancer or tumor as compared to the normal adjacent tissue are selected. See Examples 4 and 5 for representative CpG sites showing great diagnostic utility. Table 4 lists non-limiting examples of cell lines used for verification of methylation.

TABLE 4
Cell lines used for verification of methylation

| Name | Source | Tumorigenic | Culture Media | Conditions |
|---|---|---|---|---|
| SW480 | primary adenocarcinoma | yes | Leibovitz's L-15 | 5 μM 5-aza-2′- |
| | | | medium with 2 mM | deoxycytidine for 3 |
| | | | L-glutamine, 90% | days |
| | | | fetal calf serum | |
| SW620 | recurrence of adenocarcinoma | yes | Leibovitz's L-15 | 5 μM 5-aza-2′- |
| | (same patient as for SW480) | | medium with 2 mM | deoxycytidine for 5 |
| | | | L-glutamine, 90% | days |
| | | | fetal calf serum | |
| LS123 | primary adenocarcinoma | no | Eagle's MEM | 1 μM 5-aza-2′- |
| | | | medium with 15% | deoxycytidine for 3 |
| | | | fetal calf serum | days |
| LS174T | primary adenocarcinoma | yes | Eagle's MEM | 3 μM 5-aza-2′- |
| | | | medium with 10% | deoxycytidine for 5 |
| | | | fetal calf serum | days |
| HT-29 | primary adenocarcinoma | yes | McCoy's 5a | 5 μM 5-aza-2′- |
| | | | medium with 1.5 mM | deoxycytidine for 5 |
| | | | L-glutamine | days |
| | | | and 10% fetal calf | |
| | | | serum | |

VI Use of the CpG Sites for Diagnosis, Prognosis, Staging, and Monitoring of Therapy

[0092] In all the methods described in the present invention, the identification of sequences that are abnormally methylated is used for identifying a disease, disease state, or premalignant conditions. Such disease or disease state or premalignant conditions include cancer, multiple sclerosis, Alzheimer's disease, Parkinson's disease, depression and other imbalances of mental stability, atherosclerosis, cystic fibrosis, diabetes, obesity, Crohn's disease, and altered circadian rhythmicity, arthritis, inflammatory reactions or disorders, psoriasis and other skin diseases, autoimmune diseases, allergies, hypertension, anxiety disorders, schizophrenia and other psychoses, osteoporosis, muscular dystrophy, amyotrophic lateral sclerosis and circadian rhythm-related conditions. Preferably, the diseases that have been shown to be strongly associated with aberrant methylation include cancer. Examples of cancer include but not limited to, adenocarcinoma, lymphoma, blastoma, melanoma, sarcoma, and leukemia. More particularly, examples of cancer also include squamous cell cancer, small-cell lung cancer, non-small cell lung cancer, gastrointestinal cancer, Hodgkin's and non-Hodgkin's lymphoma, pancreatic cancer, glioblastoma, cervical cancer, ovarian cancer, liver cancer such as hepatic carcinoma and hepatoma, bladder cancer, breast cancer, colon cancer, colorectal cancer, endometrial carcinoma, salivary gland carcinoma, kidney cancer such as renal cell carcinoma and Wilms' tumors, basal cell carcinoma, melanoma, prostate cancer, vulval cancer, thyroid cancer, testicular cancer, esophageal cancer, and various types of head and neck cancer. Preferably, the cancers include breast, colon, and lung cancer.

[0093] The determination of the methylation level of one or more selected CpG sites within one or more marker sequences in a patient as compared to a normal individual, provides a means of diagnosing or monitoring the patient's disease status, and/or patient response or benefit to therapy. In one aspect, the present invention provides methods for detecting disease such as cancer, or alternatively, determining whether a subject is at risk for developing disease such as cancer by detecting the methylation level of one or more selected CpG sites, wherein the methylation level of the CpG sites correspond to a particular disease or condition. In a preferred embodiment, the cancer is colon cancer, and the CpG sites are the ones as selected by the method discussed in the previous sections.

[0094] In clinical applications, human tissue samples can be screened for the hypermethylation of one or more CpG sites selected by the methods of the present invention. Such samples may comprise tissue samples, whole cells, cell lysates, or isolated nucleic acids, including, for example, needle biopsy cores, surgical resection samples, lymph node tissue, or serum. For example, these methods include obtaining a biopsy, which is optionally fractionated by cryostat sectioning to enrich tumor cells to about 80% of the total cell population. In certain embodiments, nucleic acids extracted from these samples may be amplified using techniques well known in the art. The methylation levels of the selected CpG sites in these samples would be compared with statistically valid groups of metastatic, non-metastatic malignant, benign, or normal colon tissue samples.

[0095] In one embodiment, the diagnostic method comprises determining whether a subject has increased methylation levels of the selected CpG sites. The method comprises determining the methylation levels of the selected CpG sites by using the methylation methods discussed herein. Specifically, the method comprises:
[0096] (a) determining the degree of methylation of one or more CpG sites on nucleic acid sequences in a biological sample obtained from the subject;
[0097] (b) determining the presence of, predisposition to, or stage of the disease in the subject based on the degree of methylation.

[0098] In another embodiment, the present invention provides methods for determining disease prognosis and stage based on examining the methylation levels of the selected CpG sites within one or more marker sequences using the methods described in the present invention. If disease is detected in a subject using a technique other than by determining the methylation levels of the selected CpG sites, then the differential methylation levels of the selected CpG sites within the marker sequences can be used to determine the prognosis and stage for the subject. In general, methods used for prognosis or stage of a disease involve comparison of the methylation levels or extents of selected CpG sites in a sample of interest with that of a control to detect relative differences in the methylation levels, wherein the difference can be measured qualitatively and/or quantitatively. For example, the methylation levels of the selected CpG sites can be compared with the methylation levels of the same CpG sites in disease free or normal samples. Alternatively, the methylation levels of the selected CpG sites can also be compared with the methylation levels of the same CpG sites observed in various stages of disease. Alternatively, the methylation levels of the selected CpG sites can also be compared with the methylation levels of the same CpG sites determined from a sample at an earlier point in time from the same patient. Preferably, the disease is cancer. More preferably, the cancer is colon cancer, and the marker sequences are the ones identified in Tables 6, 7, and 8.

[0099] In one embodiment, the methods comprise:
[0100] (a) detecting in a biological sample of the subject at a first point in time, the degree of methylation of one or more CpG sites on nucleic acid sequences, wherein the CpG sites are differentially methylated at different stages of the disease;
[0101] (b) repeating step (a) at a subsequent point in time; and
[0102] (c) comparing the degree of methylation of the CpG sites in step (a) and (b), wherein a change in the degree of methylation is indicative of disease progression in the subject.

[0103] In another embodiment, the present invention also provides methods that permit the assessment and/or monitoring of patients who will be likely to benefit from both traditional and non-traditional treatments and therapies for disease such as cancer, particularly colon cancer. The present invention thus embraces testing, screening and monitoring of patients undergoing anti-disease treatments and therapies, used alone, in combination with each other, and/or in combination with anti-disease drugs, anti-neoplastic agents, chemotherapeutics and/or radiation and/or surgery, to treat patients.

[0104] Particularly, the method including determining the efficacy of a test compound for inhibiting a disease in a subject, wherein the method comprises:
[0105] (a) detecting in a first biological sample of the subject, the degree of methylation of one or more CpG sites, wherein the sample has not been exposed to the test compound, and wherein the CpG sites are methylated in the disease;
[0106] (b) detecting in a second biological sample of the subject, the degree of methylation of the same CpG sites, wherein the sample has been exposed to the test compound; and
[0107] (c) comparing the degree of methylation of the CpG sites in step (a) and (b), wherein a decrease in methylation after the sample has been exposed to the test compound, is indicative of the efficacy of the test compound.

[0108] An advantage of the present invention is the ability to monitor, or screen over time, those patients who can benefit from one, or several, of the available therapies, and preferably, to monitor patients receiving a particular type of therapy, or a combination therapy, over time to determine how the patient is faring from the treatment(s), if a change, alteration, or cessation of treatment is warranted; if the patient's disease has been reduced, ameliorated, or lessened; or if the patient's disease state or stage has progressed, or become metastatic or invasive. The treatments for cancer embraced herein also include surgeries to remove or reduce in size a tumor, or tumor burden, in a patient. Accordingly, the methods of the invention are useful to monitor patient progress and disease status post-surgery.

[0109] The identification of the correct patients for a therapy according to this invention can provide an increase in the efficacy of the treatment and can avoid subjecting a patient to unwanted and life-threatening side effects of the therapy. By the same token, the ability to monitor a patient undergoing a course of therapy using the methods of the present invention can determine whether a patient is adequately responding to therapy over time, to determine if dosage or amount or mode of delivery should be altered or adjusted, and to ascertain if a patient is improving during therapy, or is regressing or is entering a more severe or advanced stage of disease, including invasion or metastasis, as discussed further herein.

[0110] A method of monitoring according to this invention reflects the serial, or sequential, testing or analysis of a patient by testing or analyzing the patient's body fluid sample over a period of time, such as during the course of treatment or therapy, or during the course of the patient's disease. For instance, in serial testing, the same patient provides a body fluid sample, e.g., serum or plasma, or has sample taken, for the purpose of observing, checking, or examining the methylation levels of one or more of the CpG sites of the invention in the patient during the course of treatment, and/or during the course of the disease, according to the methods of the invention.

[0111] Similarly, a patient can be screened over time to assess the differential methylation levels of one or more selected CpG sites within the marker sequences in a body fluid sample for the purposes of determining the status of his or her disease and/or the efficacy, reaction, and response to disease including cancer or neoplastic disease treatments or therapies that he or she is undergoing. It will be appreciated that one or more pretreatment sample(s) is/are optimally taken from a patient prior to a course of treatment or therapy, or at the start of the treatment or therapy, to assist in the analysis and evaluation of patient progress and/or response at one or more later points in time during the period that the patient is receiving treatment and undergoing clinical and medical evaluation.

[0112] In monitoring a patient's methylation levels of the selected CpG sites of the invention over a period of time, which may be days, weeks, months, and in some cases, years, or various intervals thereof, the patient's body fluid sample, e.g., a serum or plasma sample, is collected at intervals, as determined by the practitioner, such as a physician or clinician, to determine the levels of one or more of the markers in the patient compared to the respective levels of one or more of these analytes in normal individuals over the course or treatment or disease. For example, patient samples can be taken and monitored every month, every two months, or combinations of one, two, or three month intervals according to the invention. Quarterly, or more frequent monitoring of patient samples, is advisable.

[0113] The differential methylation levels of the one or more CpG sites within the marker sequences found in the patient are compared with the respective methylation levels of the same CpG sites in normal individuals, and with the patient's own methylation levels, for example, obtained from prior testing periods, to determine treatment or disease progress or outcome. Accordingly, use of the patient's own methylation levels monitored over time can provide, for comparison purposes, the patient's own values as an internal personal control for long-term monitoring of methylation levels, and thus disease presence and/or progression. As described herein, following a course of treatment or disease, the determination of an increase or decrease in methylation levels of the selected CpG sites in a patient over time compared to the respective methylation levels of the same CpG sites in normal individuals reflects the ability to determine the severity or stage of a patient's disease, or the progress, or lack thereof, in the course or outcome of a patient's therapy or treatment.

[0114] In monitoring a patient over time, a reduction in the methylation levels of the selected CpG sites from increased levels compared to normal range values at or near to the levels of the analytes found in normal individuals is indicative of treatment progress or efficacy, and/or disease improvement, remission, tumor reduction or elimination, and the like.

[0115] As will be understood by the skilled practitioner in the art, the monitoring method according to this invention is preferably, performed in a serial or sequential fashion, using samples taken from a patient during the course of disease, or a disease treatment regimen, (e.g., after a number of days, weeks, months, or occasionally, years, or various multiples of these intervals) to allow a determination of disease progression or outcome, and/or treatment efficacy or outcome. If the sample is amenable to freezing or cold storage, the samples may be taken from a patient (or normal individual) and stored for a period of time prior to analysis.

[0116] The present invention also includes a method of assessing the efficacy of a test composition for inhibiting diseases such as cancers, or colon cancer. As described above, differential methylation levels of the selected CpG sites within the marker sequences of the invention correlate with the disease state of disease cells, particularly cancer cells, more particularly colon cancer cells. It is recognized that changes in the methylation levels of the selected CpG sites within the marker sequences of the present invention result from the disease state of cells. Thus, compositions which inhibit disease in a patient will cause the methylation levels of the selected CpG sites within the marker sequences to change to a level near the normal level for the marker sequences. The method thus comprises comparing methylation levels of the selected CpG sites within one or more marker sequences in a first biological sample maintained in the presence of a test composition with those of the same CpG sites in a second biological sample maintained in the absence of the test composition. A significant difference in the methylation levels of the selected CpG sites within one or more marker sequences is an indication that the test composition inhibits the disease. In a preferred embodiment, the cancer is colon cancer. In another embodiment, the cell samples may be aliquots of a single sample obtained from either a healthy subject or a patient with disease conditions.

VII Kits

[0117] The present invention also provides kits for practicing the use of the selected CpG sites in the diagnosis, prognosis, or staging of a disease, or monitoring of therapy. The kits may comprise a bisulfite-containing reagent that modifies the unmethylated cytosine, as well as oligonucleotides for determining the methylation state of one or more specific CpG sites on a specific nucleic acid marker sequence. Determining the methylation state may comprise one or more of the following techniques: methylation-specific PCR, bisulfite genomic sequencing methods, methylation-specific primer extension methods, and all other methods known in the art for determining CpG methylation. The oligonucleotides could encompass the primers used for amplifying the bisulfite-treated nucleic acids, wherein the amplification can employ any method known in the art. Additionally, oligonucleotides could also encompass the primers or probes used in measuring and/or quantifying the methylation of the CpG sites. Preferably, the oligonucleotides comprise at least about 7, 15, 20, 25, 30, 50, 75, 100, 125, 150, 175, 200, 250, 300, 350, or more consecutive nucleotides in length. More preferably, the oligonucleotides comprise about 8 to 60 consecutive nucleotides in length. More preferably, the oligonucleotides could be modified with non-nucleotide moieties. For example, the oligonucleotides could have altered sugar moieties, altered bases, both altered sugars and bases or altered inter-sugar linkages. Probes may be complementary to a position on the sequence of the nucleic acid marker sequences identified using the claimed method. Preferably, the probes that are complementary to a region on the nucleic acid marker sequences are used for detecting and/or quantifying either methylated or unmethylated nucleic acid marker sequences. For example, the probes may be designed to hybridize under stringent or moderately stringent conditions, to either methylated or unmethylated nucleic acid marker sequences listed in Tables 1, or 3, or 5. Also preferably, the probes may be conjugated with a detectable label.

[0118] The kits may also comprise a set of control/reference values indicating normal and various clinical progression stages of a disease. In one embodiment, the set of control/reference values is indicative of various clinical progression stages of cancer. In a preferred embodiment, the set of control/reference values is indicative of various clinical progression stages of colon cancer. Moreover, a kit may also comprise positive controls, and/or negative controls for comparison with the test sample. A negative control may comprise a sample that does not have any nucleic acid marker sequences. A positive control may comprise various degrees of methylation at one or more specific CpG sites. A kit may further comprise instructions for carrying out and evaluating the results.

### Examples

### Example 1

### Gene Expressing Profiling

[0119] Twenty well characterized, microdissected samples of colorectal cancer tissue were obtained from consenting patients. A second set of twenty, microdissected samples of normal adjacent colon tissue were also obtained. Total RNA was extracted from these samples using RNeasy kits (QIAGEN, Valencia, Calif.) according to the manufacturer's instructions. Expression profiling was performed using the GeneChip expression arrays from Affymetrix (Santa Clara, Calif.). Reverse transcription, second-strand synthesis, and probe generation was accomplished by standard Affymetrix protocols. The Human Genome U133A GeneChip, which contains more than 15,000 substantiated human genes, was hybridized, washed, and scanned according to Affymetrix protocols. Changes in cellular mRNA levels in the cancerous tissues were compared with mRNA levels in the normal colon tissues. GeneSpring v4.2 (Silicon Genetics, Redwood City, Calif.) was used to normalize and scale results and compare gene expression levels in the cancer tissue relative to that in the normal tissue.

[0120] Applying a set of filters to the normalized data identified the down-regulated genes in the cancer samples. First, a non-parametric test defined the genes that were statistically associated with either the cancer or the normal samples. From this set, the genes with normalized signals of 5 or greater in any one of the normal samples were selected. To further reduce the set, the genes with normalized signals greater than 5 in any of the cancer samples were identified and removed. Finally, using the Affymetrix absent/present calls, those genes that were not present in at least five of the twenty normal samples were removed. Table 1 shows the candidate genes identified using this process.

### Example 2

### Identification of CpG Sites

[0121] From this list of genes in Table 1, the subset of genes (Table 2) containing at least one CpG island in the published sequence of the promoter-first exon region (1000 bp upstream and 500 bp down stream from exon 1) was identified. The standard definition of a CpG island (having regions of DNA greater than 200 bp, with a guanine/cytosine content above 0.5 and an observed or an expected presence of CpG above 0.6) was used. Genes were initially examined in the UCSC Genome Browser for the presence of CpG island(s) in the 5′ region. Sequences were then analyzed in the Cpgplot program to verify the presence of island(s) in the defined region (1000 bp upstream and 500 bp down stream from exon 1).

### Example 3

### Verification of Methylation by Bisulfite Sequencing

[0122] Samples: Paired tumor and adjacent normal tissues from twelve colorectal cancer patients were collected under institutional review board (IRB) approval with patient consent. Tissues were flash frozen in LN₂ and stored at −80° C. prior to DNA extraction. All tissues were blinded.

[0123] Cell lines: A panel of five colorectal cancer cell lines was used. Cells were grown to ˜50% confluence in the appropriate culture medium prior to treatment with 5-aza-2′-deoxycytidine. Optimal concentrations and incubation times (Table 4) were determined by assaying for reduction of p 16 promoter methylation using MSP. Cells were harvested, pelleted by centrifugation, and washed twice in Hanks buffered saline solution. Cell pellets were stored at −80° C. Control cells were maintained simultaneously without 5-aza-2′-deoxycytidine treatment.

[0124] DNA extraction: DNA was purified from tissues and cell lines using the QIAGEN DNeasy® Tissue Kit. Approximately 25-35 mg of each tissue was pulverized under liquid nitrogen before extraction. Elution volume for tissues was 200 μL. A final volume of 200 μL of cell line DNA was extracted from 15 to 25 μL of each packed cell pellet (between 10⁶-10⁷ cells). Purified DNA was stored at −20° C.

[0125] Bisulfite modification: Modification was performed according to the Frommer method (See Frommer M, et al., PNAS, 89: 1827-1831 (1992).) One μg genomic DNA was diluted into 50 μl with distilled H₂O, 5.5 μl of 2M NaOH was added, and the mixture incubated at 37° C. for 10 minutes (to create single stranded DNA). Thirty μl of freshly prepared 10 mM hydroquinone (Sigma) was added to each tube. Five hundred twenty μl of freshly prepared 3M sodium bisulfite (Sigma S-8890), pH 5.0 was then added. Reagents were thoroughly mixed and then covered with mineral oil and incubated at 50° C. for 16 hours. After removing the oil, 1 ml of Wizard DNA Cleanup Resin (Promega A7280) was added to each tube prior to applying the mixture to miniprep column in the DNA Wizard Cleanup kit. The column was washed with 2 ml of 80% isopropanol, and eluted with 50 μl of heated water (60-70° C.). 5.5 μl of 3 M NaOH to was added to each tube, and incubated at room temperature for 5 minutes. Then 1 μl glycogen was added as carrier, 33 μl of 10 M NH₄Ac, and 3 volumes of ethanol for DNA precipitation. The pellet was spun down and washed with 70% ethanol, dried and resuspended in 20 μl water. In some instances, the EZ DNA Methylation Kit (Zymo Research) which uses a simplified version of the Frommer method was used. In these cases, 1 μg of genomic DNA was denatured in 0.3M NaOH for 15 minutes at 37° C. followed by incubation at 50° C. for 16 hours in 0.5 mM hydroquinone and a saturated solution of sodium bisulfite at pH 5. Modified DNA was bound to the Zymo column membrane, then desulfonated with 0.3M NaOH for 15 minutes at room temperature. DNA was washed and resuspended with 50 μL 10 mM Tris-HCl-0.1 mM EDTA, pH 7.5 and stored at −20° C. The bisulfite reaction results in conversion of an umethylated cytosine to uracil. Methylated cytosine remains unchanged after the bisulfite reaction. The resulting bisulfite modified DNA is single stranded.

[0126] PCR amplification for sequencing: Primers were designed to amplify both methylated and unmethylated fragments of DNA (Table 5). Five μL of modified DNA (1/10 of modification reaction) was amplified first in a 25 μL reaction volume containing 10 mM Tris-HCl pH8.3, 50 mM KCl, 1.5 mM to 2 mM MgCl2, (Applied Biosystems), 0.25 mM each dNTP, 0.5 unit AmpliTaq (Applied Biosystems), and sequencing primers (each at 200 nM). Cycling conditions were 10 minutes at 95° C., 40 cycles of 30 seconds at 95° C., 30 seconds at 54-62° C., 30 seconds at 72° C., subsequently followed by extension for 5 minutes at 72° C.

[0127] Reaction products were purified either by the shrimp-alkaline phosphatase-Exol standard method or on the Qiagen Qiaquick PCR clean-up column and eluted in 30 μL 10 mM Tris-HCl, pH8.5. The amount of DNA was determined by absorbance at OD₂₆₀ and stored at −20° C. before sequencing. Purified amplicons were sequenced by the chain-termination sequencing method. Reverse sequencing primers at 3.2 μM concentration and 200 ng of each purified amplicon diluted in 10 μL dH2O were sent to a commercial sequencing service (SeqWright).

[0128] Vector NTI ContigExpress (Informax, Inc.) was used to align sequences. Methylated CpG sites were determined by comparing the peak height of C and T traces at each CpG. A C-trace peak height to T-trace peak height ratio of >0.5 indicates a methylated site.

$$\frac{C - trace peak height}{T - trace peak height} > 0.5 = Methylated$$

TABLE 5
Primers for sequencing reactions

| | | | | | | Sequence |
|---|---|---|---|---|---|---|
| | Primer | Forward/ | Primer Sequences | | Amplicon | ID |
| Gene name | no. | reverse | 5′-3′ | Tₘ° C. | length | number |

| | | | | | | |
|---|---|---|---|---|---|---|
| SLC4A4 | 63 | F | GGTAGTGGTAGTGGTYGTTGTAGT TT | 75.8 | 222 | 179 |
| | 64 | R | CCRCAATTAACCTCTCTCTCC | 73.4 | | 180 |
| PYY | 77 | F | GGGGAGGTAGGTAGGGTTTATGT | 77.3 | 290 | 181 |
| | 78 | R | CAACRCCCCTAAACAAACRAACAA | 72.2 | | 182 |
| LOC63928a | 51 | F | YGTTTTGGGGTTGGGAGYGTT | 73.4 | 341 | 183 |
| | 52 | R | RCRTTCTCTCCTCCCRCCRAAA | 73.6 | | 184 |
| LOC63928b | 53 | F | GGGGTTATTGGGGYGGTTAYGT | 75.4 | 227 | 185 |
| | 54 | R | TCCCTAACCCCAAACRCCTAAA | 73.6 | | 186 |
| SCNN1B | 49 | F | TTGTAGGGGTGTGGATGTGAT | 73.4 | 358 | 187 |
| | 50 | R | AACTTACTAAACRCTACCRACCTAAC | 72.6 | | 188 |
| CA4-1 | 55 | F | TTTTGYGTATAGGGTAAGAGGTGGTT | 74.2 | 272 | 189 |
| | 56 | R | AACAACATCCRCATCTTACRAAACAA | 71.1 | | 190 |
| CA4-2 | 57 | F | AAATTTAGGTYGGTAGGATYGTTGTAT | 71.3 | 425 | 191 |
| | 58 | R | AAACTCCCAACTCRTCTCRCCRAA | 73.9 | | 192 |
| EDN3 | 155 | F | GGTTTAAAGGTTYGGYGAGGTA | 71.7 | 319 | 193 |
| | 156 | R | AACCCCRACTCCATAAACCTAAATC | 74.1 | | 194 |
| GPX3 | 144 | F | GGAGGTGGGGAGTTGAGGGTA | 79.2 | 221 | 195 |
| | 88 | R | CCTACAACAACCRAACCATAACRAAA | 72.6 | | 196 |
| P16 | 17 | F | GAAGAAAGAGGAGGGGTTGG | 75.2 | 273 | 197 |
| | 18 | R | CTACAAACCCTCTACCCACC | 75.2 | | 198 |
| MMP28 | 65 | F | YGTAGAGTAGTTTTATTTTYGGGGTT | 71.1 | 208 | 199 |
| | 66 | R | RCCTCCTTACRCAACTCCTAA | 71.4 | | 200 |
| CES2a | 211 | F | TTGTTYGGATTYGGGAATATGAT | 70.5 | 338 | 201 |
| | 212 | R | CATTTCACRAACCCCTACCRAT | 65.3 | | 202 |
| CES2b | 213 | F | TTTAAGGTTGGGTAAGGTATTGAT | 68.2 | 279 | 203 |
| | 214 | R | CTCCCAAACRCCTACCCTC | 67.6 | | 204 |
| CA9 | 241 | F | (AGCACCCGGATGGCGTAGA) GGGGA | 77.3 | 316 | 205 |
| | (162) | | GAGGGTATAGGGTTAGATAA | | | |
| | 242 | R | (GAT TGG CGG CAC TGG CTA TC) AAAT | 72.2 | | 206 |
| | (163) | | CCTCCTACATCCRAAACAAC | | | |
| CBFA2T3a | 138 | F | GGGGYGGAGTTGAGYGTTA | 72.9 | 261 | 207 |
| | 139 | R | CCTAAACCATACCRAAAACTCRACT | 72.4 | | 208 |
| CBFA2T3b | 140 | F | TGTGAGTTTTTGTGGAGGGATAGA TG | 75.8 | 222 | 209 |
| | 141 | R | CRACCTCAACCCACAAAATAAATA AA | 71.1 | | 210 |
| CHGA | 94 | F | GGGTTCGTTATGCGTTTCGTC | 75.3 | 234 | 211 |
| (M only) | | | | | | |
| | 95 | R | CCCAAACGAAAACCACACTACAA | 73.8 | | 212 |
| CHGA | 96 | F | GTTTGGTGTTTGGGTTTGTTATGT | 72.2 | 244 | 213 |
| (U only) | | | | | | |
| | 97 | R | CCAAACAAAAACCACACTACAAAATC | 72.6 | | 214 |
| CHGA | 71 | F | GYGAGGGYGTTGTTGTTGTTATYGT | 74.1 | 292 | 215 |
| | 93 | R | ACTCCCCRCRCTCRCTCACCTTA | 77.3 | | 216 |
| ERCC1a | 89 | F | AGAGAGGTYGGAAGTGTTGYGAGTT | 75.7 | 239 | 217 |
| | 90 | R | CCCTCCCCACRCCTAACCTTA | 77.3 | | 218 |
| ERCC1b | 91 | F | GTGGAGATTGGYGTYGYGGAAGTT | 75.6 | 340 | 219 |
| | 92 | R | CRTCTACRTTCTCATCCCRCAACAA | 74.1 | | 220 |
| FANCA | 227 | F | TYGTYGGGAGGAATAGYGGTTGT | 73.0 | 326 | 221 |
| | 228 | R | CCAAACRCRCACACCCRTTAACTAA | 70.9 | | 222 |
| FLJ21511 | 151 | F | AAGGAGGTAAAGGYGGGGATTA | 73.6 | 267 | 223 |
| | 152 | R | AATCRAACCCRCTACCCTAACC | 73.6 | | 224 |
| hMLH1 | 67 | F | GGAGTGAAGGAGGTTAYGGG | 75.2 | 225 | 225 |
| | 68 | R | CCRACCCRAATAAACCCAAC | 71.1 | | 226 |
| HPGDa | 231 | F | TTAGAAYGTTTAGGGGGTAGGTGA | 71.1 | 297 | 227 |
| | 232 | R | CRCCRAACTTACCTTAACRCCCTTA | 66.8 | | 228 |
| HPGDb | 233 | F | YGGYGYGGTTTAGGGTATAGGTAGA | 71.0 | 242 | 229 |
| | 234 | R | TTAAATTCCCTCCCAACCACT | 70.9 | | 230 |
| MGMT | 69 | F | GTTTYGGATATGTTGGGATAG | 69.5 | 251 | 231 |
| | 70 | R | AACACTTAAAACRCACCTAAAA | 66.1 | | 232 |
| MT1G | 134 | F | GYGGGTGTAGTAGGTAATTTTAG | 72.0 | 298 | 233 |
| | 135 | R | AAAACRAAATAAAACCCAACAAC | 66.6 | | 234 |
| MT1X | 239 | F | GGAGAGGGAGAGGTAGGTAATGTT | 71.3 | 263 | 235 |
| | 240 | R | TAATAAAACCCAAAAACCRACRAC T | 65.1 | | 236 |
| PDE9Aa | 61 | F | AGGGGAYGAAATTGTTGAATTTAGT | 70.8 | 378 | 237 |
| | 62 | R | TCCCRATACCCCCTAAACAACTATA | 74.1 | | 238 |
| PDE9Ab | 73 | F | AGTYGATYGGGGGTTGGAGTT | 73.4 | 383 | 239 |
| | 74 | R | TCCCATCCTACRCCCRACRACTA | 75.5 | | 240 |
| PDE9Ac | 75 | F | GGYGTAGGATGGGATTYGGTTT | 73.6 | 542 | 241 |
| | 76 | R | RACCCRAATCCCCCTCTACAA | 73.4 | | 242 |
| PDE9Ad | 73 | F | AGTYGATYGGGGGTTGGAGTT | 73.4 | 272 | 239 |
| | 98 | R | CCRCRACRCTCAACCAACCACAA | 75.5 | | 243 |
| PDE9Ae | 99 | F | GAGYGYGAGTYGAGYGGAGGAGATT | 77.3 | 211 | 244 |
| | 74 | R | TCCCATCCTACRCCCRACRACTA | 75.5 | | 240 |
| SFNa | 243 | F | (AGC ACC CGG ATG GCG TAG A) TG | 74.6 | 337 | 245 |
| | (162) | | GAGAGAGTTAGTTTGATTTAGAAGGTT | | | |
| | 244 | R | (GAT TGG CGG CAC TGG CTA TC) TCCC | 72.4 | | 246 |
| | (163) | | CRACCTCCTTAATAAAATAAC | | | |
| SFNb | 217 | F | TGGAGGGTGTTGTTTAGTATTGAGTA | 71.2 | 234 | 247 |
| | 218 | R | RATAACCACCTCRACCAAATAACRATA | 65.1 | | 248 |
| SLC26A2a | 166 | F | (AGCACCCGGATGGCGTAGA) TTTYGG | 70.2 | 253 | 249 |
| | (162) | | TTTGGGTYGAGTTATTG | | | |
| | 167 | R | (GATTGGCGGCACTGGCTATC) CRTCTT | 72.6 | | 250 |
| | (163) | | CCACCRTAACCTAACTAAAA | | | |
| SLC26A2b | 153 | F | TTTYGGTTTGGGTYGAGTTATTG | 70.2 | 253 | 251 |
| | 154 | R | CRTCTTCCACCRTAACCTAACTAAAA | 72.6 | | 252 |
| SLC26A4a | 219 | F | GGTTGGGAAAGATYGTAGTTTGT | 69.6 | 337 | 253 |
| | 220 | R | AAATCTCTCCCCTCRTCCTATT | 67.7 | | 254 |
| SLC26A4b | 221 | F | YGTTGYGGGAGAGTTTGGTTAAG | 71.6 | 248 | 255 |
| | 222 | R | TAAATTCATTTCRAACCCRAAACTAAT | 65.6 | | 256 |
| SLC5A8a | 223 | F | AGTATTTAGGGTAGYGGGTYGATT | 67.4 | 286 | 257 |
| | 224 | R | CRATACCCCRTAACRTATCCATAA | 64.0 | | 258 |
| SLC5A8b | 225 | F | GYGTAGGGTTTAGGYGATYGTG | 67.4 | 250 | 259 |
| | 226 | R | AAATACCCAAAACAATAACRACTAAC | 64.6 | | 260 |
| SST | 47 | F | GTAAAAGGGTTGGTGAGATTTGG | 73.8 | 343 | 261 |
| | 48 | R | CRAAAAAATCTCCTTACCTACTTCC | 72.4 | | 262 |
| TFEBa | 81 | F | YGTGTTTAGYGGGATTGTAGYGAGAAT | 74.3 | 280 | 263 |
| | 82 | R | CCRCCACCTACTCCCRACCTA | 77.3 | | 264 |
| TFEBb | 83 | F | TTGGTGGTAYGGGGTYGGAGT | 75.3 | 222 | 265 |
| | 84 | R | CCTATCTCCRAAACCCACRAAATAA | 72.4 | | 266 |
| TFEBc | 85 | F | GAGGGTTYGGGATTTTYGATTT | 69.9 | 395 | 267 |
| | 86 | R | CRACCCCAACCRTATCCRATAA | 71.1 | | 268 |

### Example 4

### Functional Selection of the Relevant CpG Sites

[0129] Identification of sites within the CpG islands with the greatest potential for diagnostic utility was done by comparing sequencing data for (a) CRC tumor to adjacent normal tissue and (b) cell lines (treated vs. untreated) for 3 genes: SCNN1B, CA4, and GPX3 (Tables 6, 7, and 8). Nucleotides in each amplicon were numbered from the start of the forward primer. The numbers given for CpG sites in Tables 6, 7, and 8 are derived from this ordering. Relevant sites would have greater methylation in the tumor pools and the untreated cell lines than in the adjacent normal tissue pools and treated cell lines. Examples of preferred sites are #192 and #267 SCNN1B; #52 CA4; and #75 and #84 GPX3. Cell line data may vary from tissue data in that cell lines tend to be more highly methylated. As cell lines differ in their susceptibility to demethylation by 5-aza-2′-deoxycytidine, evidence of demethylation in at least one of the cell lines treated was enough to support selection of a relevant site. Relevant sites are included in regions to be detected using methylation-specific PCR, MSPE or other assays that rely on a limited number of sites.

[0130] Further support for the clinical importance of these sites comes from the changes seen in gene expression of the genes after treatment of cell lines with 5-aza-2′-deoxyctyidine. These values were obtained from Affymetrix expression profiling of treated and untreated cell lines using the procedure described above. Genes that had at least one cell line that showed a restoration of gene expression of 2-fold or greater after treatment with the demethylating agent were selected. Examples of expression restoration was seen for SCNN1B (cell line LS123 at 4.1-fold), CA4 (cell line at LS174T 2.8), and GPX3 (cell line LS174T at 8.5-fold).

TABLE 6
Sequencing results for SCNN1B on cell lines and CRC tumor/adjacent normal
tissue pools at specific CpG dinucleotides

| | CpG sites | | | | | | | | | | |
|---|---|---|---|---|---|---|---|---|---|---|---|
| Sample Type | #179 | #192 | #203 | #223 | #228 | #230 | #234 | #238 | #245 | #267 | #295 |
| HT29 | 56 | 92 | 36 | 83 | 86 | 79 | 80 | 90 | 77 | 76 | 36 |
| HT29 treated | 70 | 90 | 36 | 79 | 74 | 67 | 69 | 75 | 65 | 55 | 26 |
| SW480 | 93 | 40 | 27 | 95 | 97 | 97 | 97 | 97 | 98 | 95 | 87 |
| SW480 treated | 80 | 44 | 21 | 89 | 83 | 80 | 80 | 87 | 51 | 57 | 69 |
| SW620 | 73 | 94 | 54 | 96 | 97 | 91 | 95 | 99 | 61 | 87 | 3 |
| SW620 treated | 59 | 88 | 30 | 93 | 95 | 94 | 91 | 86 | 26 | 67 | 23 |
| LS174T | 5 | 58 | 32 | 93 | 96 | 96 | 88 | 83 | 84 | 94 | 5 |
| LS174T treated | 7 | 56 | 40 | 75 | 81 | 72 | 70 | 55 | 40 | 47 | 7 |
| LS123 | 49 | 54 | 50 | 95 | 96 | 93 | 93 | 80 | 91 | 56 | 33 |
| LS123 treated | 56 | 63 | 42 | 90 | 87 | 82 | 80 | 77 | 81 | 59 | 23 |
| Early stage normal | 51 | 21 | 30 | 31 | 32 | 24 | 12 | 19 | 19 | 27 | 12 |
| Early stage tumor | 30 | 61 | 16 | 69 | 38 | 34 | 63 | 61 | 57 | 46 | 39 |
| Late stage normal | 38 | 12 | 8 | 37 | 44 | 42 | 43 | 64 | 37 | 38 | 12 |
| Late stage tumor | 15 | 55 | 33 | 46 | 56 | 48 | 17 | 65 | 57 | 20 | 11 |

[0131] TABLE 7
Sequencing results for CA4 on cell lines and CRC tumor/adjacent normal tissue
pools at specific CpG dinucleotides

| | CpG sites | | | | | | | | | | |
|---|---|---|---|---|---|---|---|---|---|---|---|
| Sample Type | #6 | #35 | #43 | #52 | #104 | #120 | #127 | #129 | #140 | #153 | #156 |
| HT-29 | 46 | 100 | 88 | 99 | 52 | 82 | 76 | 94 | 88 | 80 | 81 |
| HT-29 treated | 47 | 96 | 77 | 92 | 50 | 67 | 74 | 87 | 84 | 83 | 72 |
| SW480 | 63 | 76 | 65 | 80 | 12 | 91 | 42 | 48 | 43 | 39 | 38 |
| SW480 treated | 70 | 61 | 57 | 73 | 13 | 52 | 44 | 18 | 14 | 17 | 53 |
| SW620 | 70 | 93 | 64 | 91 | 24 | 54 | 52 | 67 | 68 | 43 | 39 |
| SW620 treated | 64 | 89 | 81 | 77 | 33 | 74 | 67 | 80 | 78 | 60 | 69 |
| LS174T | 76 | 35 | 7 | 45 | 15 | 8 | 8 | 25 | 22 | 30 | 43 |
| LS174T treated | 93 | 35 | 39 | 40 | 18 | 22 | 19 | 62 | 28 | 23 | 32 |
| LS123 | 69 | 52 | 56 | 48 | 7 | 15 | 60 | 10 | 54 | 36 | 33 |
| LS123 treated | 75 | 39 | 62 | 69 | 16 | 27 | 70 | 46 | 62 | 43 | 40 |
| Early stage normal | | 58 | 28 | 57 | 41 | 44 | 16 | 1 | 13 | 35 | 1 |
| Early stage tumor | | 95 | 67 | 93 | 52 | 63 | 71 | 80 | 87 | 65 | 82 |
| Late stage normal | | | | 37 | 11 | 15 | 2 | 21 | 15 | 3 | 5 |
| Late stage tumor | | 67 | 55 | 64 | 11 | 17 | 51 | 49 | 69 | 22 | 17 |
| | CpG sites | | | | | | | | | | |
| Sample Type | #158 | #164 | #181 | #190 | #199 | #201 | #204 | #213 | #218 | #220 | #227 |
| HT-29 | 87 | 90 | 66 | 82 | 83 | 100 | 75 | 100 | 66 | 65 | |
| HT-29 treated | 87 | 87 | 73 | 68 | 92 | 100 | 94 | 91 | 65 | 79 | 47 |
| SW480 | 7 | 79 | 63 | 37 | 54 | 79 | 79 | 73 | 78 | 96 | 18 |
| SW480 treated | 7 | 66 | 27 | 57 | 28 | 56 | 27 | 51 | 35 | 32 | 23 |
| SW620 | 53 | 100 | 64 | 32 | 74 | 100 | 100 | 100 | 94 | 100 | 54 |
| SW620 treated | 73 | 92 | 43 | 46 | 10 | 96 | 100 | 96 | 91 | 93 | 37 |
| LS174T | 3 | 68 | 50 | 37 | 11 | 1 | 20 | 35 | 29 | 23 | 9 |
| LS174T treated | 10 | 41 | 22 | 61 | 10 | 67 | 3 | 56 | 64 | 45 | 27 |
| LS123 | 1 | 23 | 21 | 10 | 9 | 2 | 2 | 12 | 14 | 4 | 10 |
| LS123 treated | 22 | 62 | 18 | 11 | 17 | 33 | 20 | 29 | 24 | 20 | 11 |
| Early stage normal | 14 | 29 | 36 | 45 | 33 | 37 | 43 | 66 | 55 | 40 | |
| Early stage tumor | 100 | 90 | 52 | 15 | 89 | 100 | 95 | 98 | 87 | 82 | |
| Late stage normal | 20 | 12 | 15 | | | | | | | | |
| Late stage tumor | 23 | 39 | 20 | | | | | | | | |

[0132] TABLE 8
Sequencing results for GPX3 on cell line and CRC tumor/adjacent normal tissue pools at specific CpG dinucleotides

| | CpG sites | | | | | | | | | | | | | |
|---|---|---|---|---|---|---|---|---|---|---|---|---|---|---|
| Sample type | #25 | #27 | #31 | #49 | #56 | #75 | #84 | #86 | #101 | #126 | #129 | #142 | #146 | #167 |
| cell line pool | 83 | 100 | 76 | 80 | 99 | 81 | 82 | 97 | 81 | 83 | 82 | 98 | 81 | 93 |
| treated | 70 | 100 | 67 | 70 | 98 | 72 | 77 | 74 | 84 | 75 | 80 | 97 | 80 | 89 |
| Early stage normal | 37 | 64 | 60 | 51 | 46 | 37 | 45 | | 55 | 32 | 31 | 47 | 54 | 56 |
| Early stage tumor | 63 | 100 | 58 | 68 | 100 | 66 | 73 | | 62 | 75 | 74 | 75 | 74 | 77 |
| Late stage normal | 41 | 65 | 58 | | 37 | 27 | 23 | 50 | | 28 | 40 | 45 | 42 | 41 |
| Late stage tumor | 30 | 59 | 57 | | 17 | 31 | 29 | 56 | | 28 | 45 | 29 | 38 | 36 |

### Example 5

### Verification of Relevant CpG Sites by Methylation-Specific PCR

[0133] Samples. Paired tumor and adjacent normal tissue from ten lung cancer and nine colorectal cancer patients was collected under institutional review board (IRB) approval with patient consent. Tissues were flash frozen in LN₂ and stored at −80° C. prior to DNA extraction. Sera from colorectal cancer patients and patients with no evidence of disease were collected under IRB approval and stored at −80° C. prior to DNA purification. All tissues and sera were blinded.

[0134] Cell lines. A panel of four lung cancer, five colorectal cancer, one metastatic prostate cancer, and one normal lung fibroblast cell line were amplified for MSP. Five CRC cell lines were treated with the demethylating agent 5-aza-2′-deoxycytidine prior to MSP. Cells were grown to 50% confluence in the appropriate culture medium prior to treatment with 5-aza-2′-deoxycytidine. Optimal concentrations and incubation times (Table 4) were determined by assaying for reduction of p16 promoter methylation using MSP. Cells were harvested, pelleted by centrifugation, and washed twice in Hanks buffered saline solution. Cell pellets were stored at −80° C. Control cells were maintained simultaneously without 5-aza-2′-deocycytidine treatment.

[0135] DNA extraction. DNA was purified from tissues and cell lines using the QIAGEN DNeasy® Tissue Kit. Approximately 25-35 mg of each tissue was pulverized under liquid nitrogen before extraction. Elution volume for tissues was 200 μL. A final volume of 200 μL of cell line DNA was extracted from 15 to 25 μL of each packed cell pellet (between 10⁶-10⁷ cells). One mL of each serum DNA was purified with the QIAamp® UltraSens™ Virus Kit. Purified DNA was stored at −20° C.

[0136] Bisulfite modification: Modification was performed according to the Frommer method (See Frommer M, et al., PNAS, 89: 1827-1831 (1992).) One μg genomic DNA was diluted into 50 μl with distilled H₂O, 5.5 μl of 2M NaOH was added, and the mixture incubated at 37° C. for 10 minutes (to create single stranded DNA). Thirty μl of freshly prepared 10 mM hydroquinone (Sigma) was added to each tube. Five hundred twenty μl of freshly prepared 3M sodium bisulfite (Sigma S-8890), pH 5.0 was then added. Reagents were thoroughly mixed and then covered with mineral oil and incubated at 50° C. for 16 hours. After removing the oil, 1 ml of Wizard DNA Cleanup Resin (Promega A7280) was added to each tube prior to applying the mixture to miniprep column in the DNA Wizard Cleanup kit. The column was washed with 2 ml of 80% isopropanol, and eluted with 50 μl of heated water (60-70° C.). 5.5 μl of 3 M NaOH to was added to each tube, and incubated at room temperature for 5 minutes. Then 1 μl glycogen was added as carrier, 33 μl of 10 M NH₄Ac, and 3 volumes of ethanol for DNA precipitation. The pellet was spun down and washed with 70% ethanol, dried and resuspended in 20 μl water. In some instances, the EZ DNA Methylation Kit (Zymo Research) which uses a simplified version of the Frommer method was used. In these cases, 1 μg of genomic DNA was denatured in 0.3M NaOH for 15 minutes at 37° C. followed by incubation at 50° C. for 16 hours in 0.5 mM hydroquinone and a saturated solution of sodium bisulfite at pH 5. Modified DNA was bound to the Zymo column membrane, then desulfonated with 0.3M NaOH for 15 minutes at room temperature. DNA was washed and resuspended with 50 μL 10 mM Tris-HCl-0.1 mM EDTA, pH 7.5 and stored at −20° C. The bisulfite reaction results in conversion of an unmethylated cytosine to uracil. Methylated cytosine remains unchanged after the bisulfite reaction. The resulting bisulfite modified DNA is single stranded.

[0137] PCR amplification: Primer pairs that discriminate between unmethylated and methylated CpG dinucleotides were designed using Oligo 6 (Molecular Biology Insights, Inc.) (Table 9).

[0138] Four μL of modified DNA (1/12 of modification reaction) were amplified in a 16 μL reaction volume containing 10 mM Tris-HCl pH8.3, 50 mM KCl, 1.5 mM to 2 mM MgCl2, (Applied Biosystems), 0.25 mM each dNTP, 0.4 unit AmpliTaq (Applied Biosystems), and MSP primers (each at 200 nM). Cycling conditions were 10 minutes at 95° C., 40 cycles of 30 seconds at 95° C., 30 seconds at 54-62° C., 30 seconds at 72° C., subsequently followed by extension for 5 minutes at 72° C. Amplicons were separated on 3% agarose-1× TBE gels containing ethidium bromide (BioRad Ready Agarose Gels).

TABLE 9
Primers for MSP assays

| Gene | | Forward/ | Primer | Primer Sequences | | Amplicon | SEQ ID |
|---|---|---|---|---|---|---|---|
| name | M/U | reverse | number | 5′-3′ | Tₘ° C. | length | NO |

| | | | | | | | |
|---|---|---|---|---|---|---|---|
| CA4 | M | F | 197 | TCGCGGCGCGGTTATC | 77 | 135 | 269 |
| | | R | 198 | CCACCGACGCTCACCGAT | 77.3 | | 270 |
| CA4 | U | F | 199 | TGGTTTTTTTTGTGGTGTGGTTATT | 73.5 | 149 | 271 |
| | | R | 200 | CAACACCACCAACACTCACCAAT | 75.5 | | 272 |
| SCNN1B | M | F | 201 | TATTCGTGGCGTATGTGGGTATC | 74.1 | 162 | 273 |
| | | R | 202 | ACACGCACGATCCCGACT | 74.4 | | 274 |
| SCNN1B | U | F | 203 | GGATATATTTGTGGTGTATGTGGGTATT | 72.1 | 173 | 275 |
| | | R | 204 | CTAACCACACACACAATCCCAACT | 73.4 | | 276 |
| GPX3 | M | F | 35 | GGTGGGGAGTTGAGGGTAAGTC | 79.2 | 218 | 277 |
| | | R | 36 | CCTACAACAACCGAACCATAACG | 75.5 | | 278 |
| GPX3 | U | F | 39 | GGTGGGGAGTTGAGGGTAAGTT | 77.3 | 220 | 279 |
| | | R | 40 | CACCTACAACAACCAAACCATAACA | 74.1 | | 280 |
| SLC5A8a | M | F | 257 | CGTTTTTTAGGTGTCGGTTTTC | 71.7 | 130 | 281 |
| | | R | 258 | AACAACGAATCGATTTTCCG | 69.1 | | 282 |
| | U | F | 259 | GGTGTTTTTTAGGTGTTGGTTTTT | 70.5 | 134 | 283 |
| | | R | 260 | AAAACAACAAATCAATTTTCCAAA | 65.4 | | 284 |
| SLC5A8b | M | F | 261 | TCGAACGTATTTCGAGGC | 70.4 | 109 | 285 |
| | | R | 262 | ACAACGAATCGATTTTCCG | 68.6 | | 286 |
| | U | F | 263 | TTGAATGTATTTTGAGGTG | 64.3 | 101 | 287 |
| | | R | 264 | TCA ATT TTC CAA AAT CCC | 63.6 | | 288 |
| MLH1 | M | F | 5 | AACGAATTAATAGGAAGAGCGGATAGCG | 77.4 | 164 | 289 |
| | | R | 6 | CGTCCCTCCCTAAAACGACTACTACCC | 81.9 | | 290 |
| MLH1 | U | F | 7 | TAAAAATGAATTAATAGGAAGAGTGGATAGTG | 73.6 | 173 | 291 |
| | | R | 8 | AATCTCTTCATCCCTCCCTAAAACA | 74.1 | | 292 |
| P16 | M | F | 19 | GAGGGTGGGGCGGATCGC | 74.9 | 144 | 293 |
| | | R | 20 | GACCCCGAACCGCGACCG TAA | 78.0 | | 294 |
| P16 | U | F | 21 | TTATTAGAGGGTGGGGTGGATTGT | 70.4 | 150 | 295 |
| | | R | 22 | CAACCCCAAACCACAACCATAA | 73.6 | | 296 |
| MGMT | M | F | 13 | TTTCGACGTTCGTAGGTTTTCGC | 75.5 | 83 | 297 |
| | | R | 14 | GCACTCTTCCGAAAACGAAACG | 75.4 | | 298 |
| MGMT | U | F | 11 | TTTGTGTTTTGATGTTTGTAGGTTTTTGT | 71.7 | 91 | 299 |
| | | R | 12 | AACTCCACACTCTTCCAAAAACAAAACA | 74.5 | | 300 |

[0139] In MSP experiments, cell line DNA was used as positive controls for both methylated and unmethylated amplicons for SCNN1B, CA4, and GPX3 (Table 10. Samples for which there was a positive amplicon detected are indicated with at least one “+”. Where no amplicon was seen, there is a “−”. A panel of genes that included SCNN1B, CA4, and CA4 was used to assess the methylation status of 9 additional colorectal cancer and adjacent normal tissues by MSP (Table 11). Differential methylation between tumor and adjacent normal tissue for at least one gene in the panel was shown for 8 of the 9 pairs of samples. Thirty-two serum samples from patients with colorectal cancer were examined by MSP for the presence of methylated amplicon for the genes SCNN1B, CA4, and GPX3. In the serum of six of these patients methylated amplicon was detected (Table 12). All samples had detectable unmethylated sequences for the three genes, reflecting the DNA present in the serum that comes from normal cells. For a set of 10 sera from normal individuals, no methylated sequences were detected.

TABLE 10
Cell lines used as controls in MSP experiments.

| Methylated gene | Cell Line | Primer Numbers | Results |
|---|---|---|---|
| CA4 M | HT29 | 197/198 | + |
| CA4 U | | 199/200 | − |
| CA4 M | SW480 | 197/198 | + |
| CA4 U | | 199/200 | +/− |
| SCNN1B M | SW480 | 201/202 | + |
| SCNN1B U | | 203/204 | + |
| GPX3 M | SW620 | 35/36 | + |
| GPX3 U | | 39/40 | + |
| GPX3 M | HT29 | 35/36 | − |
| GPX3 U | | 39/40 | + |

[0140] TABLE 11
Colorectal cancer tissues assessed for methylation using a panel of genes.

| Patient | Dukes | | | | | | |
|---|---|---|---|---|---|---|---|
| ID | stage | SCNN1B | GPX3 | CA4 | p16 | MGMT | hMLH1 |
| 10 | B | + | ++ | + | ++ | − | +/− |
| | | − | + | − | +/− | − | +/− |
| 11 | B | + | ++ | + | + | +++ | +/− |
| | | + | ++ | − | ++ | +++ | +/− |
| 12 | B | − | ++ | +/− | +/− | +/− | + |
| | | − | − | − | − | − | +/− |
| 13 | B | + | ++ | + | − | ++ | + |
| | | − | − | + | +/− | +/− | +/− |
| 14 | B | − | + | + | − | ++ | +/− |
| | | + | + | +/− | + | ++ | +/− |
| 15 | B | − | +/− | − | + | − | + |
| | | − | + | +/− | − | + | +/− |
| 16 | B | + | ++ | − | ++ | ++ | ++ |
| | | + | ++ | − | ++ | ++ | ++ |
| 17 | C | +/− | + | + | + | +/− | +/− |
| | | + | + | − | + | + | + |
| 18 | C | + | + | +/− | + | ++ | + |
| | | − | + | +/− | + | ++ | + |

[0141] TABLE 12
Sera from colorectal concer patients with methylated sequences.

| Patient ID | SCNN1B | CA4 | GPX3 |
|---|---|---|---|
| C11 | − | + | − |
| C13 | − | − | + |
| C17 | − | + | − |
| C20 | − | − | + |
| C24 | − | + | − |
| C43 | + | − | − |

### Other Embodiments

[0142] Other embodiments will be evident to those of skill in the art. It should be understood that the foregoing detailed description is provided for clarity only and is merely exemplary. The spirit and scope of the present invention are not limited to the above examples, but are encompassed by the following claims.

The application's sequence listing, which the Patent Office published only in electronic form, follows.

SEQUENCE LISTING (300 sequences)

SEQ ID NO: 1 - DNA, 3028 bp, Homo sapiens
tactgcagacataatattaaaaggtaggaaaacatatttggttaatacctaatataatacagtttggtaaatatagttcccttgtcttgtaaatatcttattttgaaatatcagccatttgtataggcccaagggtcttgtgtcatcttcagaattctagttccttcagcccaggaattcaaagcagcaagaataacaccacaaaataagctcataagcttattttaatgctatagtgctggatacataagataatcatctggtgatttttattttggcaaaaaatgtttttataagtgaagattatcagaaaagtgtcaatgagtattttttctggcttaaagaactccaatatgttttcagtgccaaggagaaggacagccttgtgtatttaattactttagcttattttgtcctctggcatgatctgttccctgatttcaccacagtagagcttgctttgaagttgtagaaaaattaaatcaatcacttggatcacatgtgtcccaaagaatgtggcttcccaggtaaaagcaatctttcaatcccctactctcgtttcactttggcatttcaacagcgttgcagaattcttcggcagataatttattttatcccttggtcccagcagctcttattaagagtttcagaattgcctgtacaaggtgcacctttcacattacaagggatcggctcatttcttgatgcttatgcaaccacttataactatgcctacaggtaaacatactgctgtcttcttggaagaccgagaagtataaagaatgtttatgtgcaggtctagctgttccaagtacccaagtgttggtttagacacacctggattaccatccaccttttattggctgagaaagttgccacacctgatttgtaagtttacctgttgcagccaatagcagggccatctcagccagccagcactggatactatctggccagaagtagcaaagcagctcttatttgaaaaaccactgggttccgagttcattactacaggaaaaactgttctcttctgtggcacagagaaccctgcttcaaagcagaagtagcagttccggagtccagctggctaaaactcatcccagaggataatggcaacccatgccttagaaatcgctgggctgtttcttggtggtgttggaatggtgggcacagtggctgtcactgtcatgcctcagtggagagtgtcggccttcattgaaaacaacatcgtggtttttgaaaacttctgggaaggactgtggatgaattgcgtgaggcaggctaacatcaggatgcagtgcaaaatctatgattccctgctggctctttctccggacctacaggcagccagaggactgatgtgtgctgcttccgtgatgtccttcttggctttcatgatggccatccttggcatgaaatgcaccaggtgcacgggggacaatgagaaggtgaaggctcacattctgctgacggctggaatcatcttcatcatcacgggcatggtggtgctcatccctgtgagctgggttgccaatgccatcatcagagatttctataactcaatagtgaatgttgcccaaaaacgtgagcttggagaagctctctacttaggatggaccacggcactggtgctgattgttggaggagctctgttctgctgcgttttttgttgcaacgaaaagagcagtagctacagatactcgataccttcccatcgcacaacccaaaaaagttatcacaccggaaagaagtcaccgagcgtctactccagaagtcagtatgtgtagttgtgtatgtttttttaactttactataaagccatgcaaatgacaaaaatctatattactttctcaaaatggaccccaaagaaactttgatttactgttcttaactgcctaatcttaattacaggaactgtgcatcagctatttatgattctataagctatttcagcagaatgagatattaaacccaatgctttgattgttctagaaagtatagtaatttgttttctaaggtggttcaagcatctactctttttatcatttacttcaaaatgacattgctaaagactgcattattttactactgtaatttctccacgacatagcattatgtacatagatgagtgtaacatttatatctcacatagagacatgcttatatggttttatttaaaatgaaatgccagtccattacactgaataaatagaactcaactattgcttttcagggaaatcatggatagggttgaagaaggttactattaattgtttaaaaacagcttagggattaatgtcctccatttataatgaagattaaaatgaaggctttaatcagcattgtaaaggaaattgaatggctttctgatatgctgttttttagcctaggagttagaaatcctaacttctttatcctcttctcccagaggctttttttttcttgtgtattaaattaacatttttaaaaagcagatattttgtcaaggggctttgcattcaaactgcttttccagggctatactcagaagaaagataaaagtgtgatctaagaaaaagtgatggttttaggaaagtgaaaatatttttgtttttgtatttgaagaagaatgatgcattttgacaagaaatcatatatgtatggatatattttaataagtatttgagtacagactttgaggtttcatcaatataaataaaagagcagaaaaatatgtcttggttttcatttgcttaccaaaaaaacaacaacaaaaaaagttgtcctttgagaacttcacctgctcctatgtgggtacctgagtcaaaattgtcatttttgttctgtgaaaaataaatttccttcttgtaccatttctgtttagttttactaaaatctgtaaatactgtatttttctgtttattccaaatttgatgaaactgacaatccaatttgaaagtttgtgtcgacgtctgtctagcttaaatgaatgtgttctatttgctttatacatttatattaataaattgtacatttttctaattatttg

SEQ ID NO: 2 - DNA, 34670 bp, Homo sapiens
aatatacaaaaattagccgggcatggtggcacacgcctgtaatcccagctactgaggaggctgaggcagaagaattccttgaaccctggaggcggaggttgcagtgagccgatatcgcgccactgcactccagcctggacaacagagtgagagtccatctcaaaaaaaaaaagaactaaaagtggagctaccatttgatccagcaatcctagcaataccactcctgggtatctatccagaggaaaagaagtcatatatgaagaagatacttgcacacacgtttatagcagcacaatttgcaattgcaaaatatgaaactagcccaaatgctcatcaatcaaccagtggataaagaaaatgtgatatatatatatacacatatacctacatacatacacacacaccatggaatattacttagccataaaaagaaatgaaataatggcatttgcagcagccaatttcagaaatggaaaaccaaacatcatatgttctcactcatgagtgggagctaagccatgaggatgcaaaggcataagaacgacacaatggactttggggactcggggaaaaggataggagggggaggtgagggataaaagactacacattgggtacagtgtacactgctcgggtggttaggtgcaccaaaatctcagaaattataattaaagaacttattcatgtaaccaaaccccacctgttacccaaaaacctattgaaaaaaaaaaatccctgttgtcaaggagcccttagaatatcaacaatgacaacaataaagaaaacgtgttccaacaggaaaatgtgcaatgcattttataaaatgatctgatttattctgactcttagtcacttttatgtaacatataattaagcaatcaggtgaattagtcatgtattttctcatgtaatgtacctttatacagtcaacatcccataatcagccaatactggtaagttttaggaacgtatataaagagaaagaaaagaaaagcctcttgaacaaaccaacatttgagccaggaataactagagaggaacaatggggttattcagaggttttgttttcctcttagttctgtgcctgctgcaccagtcaaatacttccttcattaagctgaataataatggctttgaagatattgtcattgttatagatcctagtgtgccagaagatgaaaaaataattgaacaaatagaggtaagaacaaaatggaatatctttcattaatttttagttttttactattatttttaattgacatataattgtacatatttatggcatacaaagtagtatttctatacatgtatacaatttgtaaagatcaaatcagggtaattagcatattcagcaactcaaacatttatctttgcattgtgtcgggaacattataattattctcttctagctactttgaaatacacaacagattatcagtaactttaattttcctattgtactatcaaatactagaacttattctgtctacataactgtgcttttgtacacattgacaaacttctcttcatttcctttctctcccctatcctttgcagcctctaataagtatcattctactctctatctccataagataccctggtttagttcctgcatatgcataagaatatgtggtatttatctctctgtgcctggcttatttcatttaacataatgtcctccatgctcatccatgctgccacaaatgaagcaatttcatttttttcagtgactaagtagtattcatttgtgtttatataccacactttatccattcatctcttgatggacacttaggttgacttcacatcttggccatcatgaatagtgctacaataaacatggaagtgcagactgatgtcttttcccttggatatatacccactagtggaattgctgaatcatgtggtcattctatttttagatttttgaagaacctccatactgttttccataatggctgtatcaacttacattttcaccaatggtatataataggtctctttctccacatccttgtcagcactttttttgtctttttggtaataaccattccaactgggctgagatggtgtctcattctggttttgatttgcatttccctgatgattaatgatgttgaccactttttcatatacttgttggacatttgtttgtcttcttttgagaaatgtctattcagatcatttgcccattttaaaatattattattattattactttgtctttgaggtttttgagtttcttgtatattctggataataatccattgttggatgaatagtttgcaaatatttttcccaagaattgggatgtcagccaggcacggtggctctcatgcctgtaatctgaacactttgggaggccgaggagggcagatcatgaggtcaggatttcgagaccaggctggccaacatgttgaaactccgccttcactaaaaatacaaaaaattagctgggcatggtggcacatgcctgtaatcccagctactcaggaggctgaggcaggagaattgcttgaacccgggaggcagaggttgcagtgagctgagatcacgccattgcactccagcctgggcaacagagcaagactccctctctggaaaaaaaaaaaaaaaaaaaaaagaattgggatgtcttctgtttgaattatggagaagaaaacaaagttaatagttaataattattatggaaacttctgagtccttcaggaagttaaaagcagtgtggtgcagtgaggacaatatggtaatgggcagagggagatgaaggttttagacagggttctacactgtgtcaccacaagacagaagacaaggcacagggctccctgacactgagtttcttgatctgtaagttagcagttggactcatttgttctttaaagaattctttgttgaatgtttatgacatgctaaagagcagtaaaatttttttaaagcctctggcaccatgcagtgtatcttcttttcagagatatagttaataagtaaatggatcacaggtcagatggtggtagtaggttgctgtggagtaaaacaaatcaggaagggggatatggagtgttaggtggggctggattgggggagaatgtgggttgctatttcatgagggaagtcagggaaggcctcactgatgatgtgtcagcacagacctgagatgagcgagagaagagcccattgaaaactaggggagaaaaacagcatggaggtgagaattcgtttgatgtaaccaaggaaacagctatgaatgagcaggaggaagcatagggtgagctgaagttagagaggtggcagggcctagaccaccagaaagactttgactttgactctgtgatgaaaatccataggaggattctgagcagagaagggtgtgttctcatgcatgttcaggaatcactctgactgcaatattaaggactgtaaagaatttccacttgtcacccatcctctataaactctgtggcagcttactggtgtagaaggaccccaggtaggaaactcttgcaggtgggcagtgatggtgactaggaacagggaggttgtggtaaagattgttaaagtgatatggtggttaagatgtataggggataggtgagggtaggaaggaaatataataagagtcaaggaagaattcaagagttttgcttgaacacttggattgagaaggggaagactgtaagtggagaaaatttggcatttggaaaatcaagagttagttggttggggcttttggaatttatgttacttctgaaaacatccatgtagatggaggcaggaatctgaattcatgatgaagaatgaaaatttgggtgtagataactaggcaagtacagatggagaagagaaaggctccaggactaaaccaaggacactgatttctgtttctttcaaatataacattctatgtaatatagagtttggtggtgtagccacgtaaattatttttccctctccctgatatcaacatatactaattctttatatttaatttctccactactgtgttctgctgcttatggttggacccttctgcatgttttaattacccagcagaaggtgataggcatgaactaagttgtaatcaagtgattttgtggctgccatttgtcattcactctctataaactctgttacatcacaaagatatttgcttataggtaccttttaaatttcatgagaagataataattcattttactaaagatgtttaaagaacagttaatgcagctaattctgaatgataggtttttagtgtccagaggacagtaaatcagtatcaaacttttcttactcagacatcactatttgaaagaattacttggatgggcaaaaattttgtaaacatggtcctctataagtacaagcagaaattcaattgtttacaggcatgcccagattttacaatgtttcctgacatttctcccagcccttcacaaaatcttcgcgtttaatatcttcaagaaaccctatgaaatactataatccacattttacagaagaaaaaactaggggtccgaaaaaaaaaatgatttttctaagatcatagtaagtatcacagtcagaggtaagaatcgcttcaaccaaggaggcagaggttgcagtgagctgagatcatgccactgcattccagcctgggtgacagagcaagactctgtctcaaaaaaataaaaataaaaataaaattaaaaaaaagtgcctttcatccttatatttcctcatgagataataaggtctagggagggatcatttcttttttttttttttttgagacagaatctcgatctgtcccccaggctggagtgcagtggtgcgatcttggctcactgcaagctccgcctcccacgttcacgccattctcctgtctcagcctcccgagtggctgggattacaggcgcctgccaccacgccccgctaattttttgtatttttagtagagacggggtttcaccgtgttagccaggatggtctcaatctcctgacctcgtgatccgcccgcctcggcctcccaaagtgctgggattaccgtcgtgagccaccgcacccagcctctttttttaatgtttaagaaaatgcagtttttatccaaaatgagtttgtgtaccaaatattaatagtttagctaatcattgttatattcgttcattatgttatttttatttcaattcttgcttttaaaaaacccaaaactttaaaaatccttatgccttgtctattttctttacctttgttttgttttgttttgatggataattttttaataaagtgaggtttacatcactgatatttaagaatggctgtatccacaaaagaaaacaaacctttttggctaaggggtgaggaagttagaaaaagcatgagaaacaggaaacacaagaggggtgaggcggggcaggagaggaaggttgcaggcacctccagctcactccctgaggcagcacctatgaccctacagatcaaggggccatgaatgacagggattcggatttctttcattctagacttcagccttaaccttttgttccagcaccaatctaacagagcagcacaggcatttctaatccagtagcaatgctatttcctcagccagggcaggtgcctgggctgacgggaggccttcaggaacaccgcctgtcagaaggcaccacggagggtctctgaggtcctgaagaccaactggtgcccgtgatctccaaacagacaaatatttgacctttgccttcaatgacatttacacataaatagacataaataaaattctccataatttatgctcaagtctaggaagatgtggctcccacagtagattttctaatgacaaaaaaaatgtagtagctgtgtgcggtttttgagtttcacccaggtctcacggtagcacagaacataatggagaagtattgcacgcacatttaaagtaaaacatgatacactcacactgttgacaaggaccgtagtgatgcccactgcaaaaaaaatcccttatttaaacctgaaaaaaatgaaacacaccaactacaattgttcaggctataaaagttctaatgtcgcagcaaaggatatttatagaaaaaatatacttttaagaaaatagctgaaaaaatctaaagacataaggtataaaaagtttaaaaatatgtatcttaagacaaaatattgcccaaaacacttaaaactgaattgtaaaaaaatcacctgtctgaatgtaaaggaggttgatgcagctgtggttcgccgtcctctacagtgggggacacaaagagagacgaagggcccagggctgtaaggacgtcaggaccggtccagagaggagaagtcttccaggagaacagccatctctgcctggccctccacagcggggaaagtgagtgggacgggcctggggttgcagaccctgctgatgatggtctgttctgggatttctcagaatcagcagacagggcagcaaggctgggcagcgggcggcaggcgcaccctctacgggagccagtgctcacgtgtccacgcgtcagacacagctgcgagcgctcagggctctggttcaggtctccaccaggatctccaccatgtggtccagctcgcccagatcggacttgcagatggagctggggcacggggtgaccggagccaagccctcgagcccttcacaggggcccggcccggcacccccatcatgcctgtcagtactgtgtccaggttgtagtaggggctgtccacgcctgaaaacagctcttccatgtagcgggggattttagtctccagcgtttcatatatatctgatcgagtgatttgcgaaagcttcctctgttttcttgagggccatccatctcccagacgctcctccctctgcgggtgcctcggcgtctgtgctgaggtgactgggcaaaggttagaaactgagccctgtgcgtggccgtctcccaagccagaggcaggacgtgccccctcctgctcccacgccgcgcggcacagaatctccatgaagaccaagtggtccagcggcgcccaccctgcagcctggggtgtgcgccgtatcccatcctgcgtcatctcctcttggatctgccggaccacgtggcaatgaggattgagcggcacaggttgggctccacaagcatgtggcaaagctgcagcttcaccagggacatgtccaagagggactgccgctgcaagctgtacgaggacacggtcttcaagccggccagggctccctccacgtcttcctggtggccaacacgtttccccttcagtcctcgtgcaaacattgtgtctttgagagaacggttatctgggtcctgccgtctcgtgcatcccacacgaaggccacagaagaggcgaggcagcagagatcctctattccagcaagctgtcgaagcctttgtcacgacgatcctgtccgacccgcgagtctgcccgctgggtcctctgctcagccgacgccaccgccgctgccgcctgcttcccgccgctcagggaggagcgcccgccagcgcggggcctttacccttttaaaacaatcaactctgcttaggaaactagccatagttttacttcccataaaaagcttatgtgtcggcccgggcatggtgactcacgtctgtaatcccagcactttgggaggctgaggcgggtggatcacctgaggtcaggagttcgagaccagcctggccaacattgcgaaaccctctctctactaaaaaatacaaaaattagctgggcccagtggcaggcgcctgtaattccagctactcgagaggtcgaggcaggagaatcgcttgaacccgggaggcggaggttgcagtaagccaagattgagacattgaactccagcctgggagacagagcaagactctgtccaaaaaaaaaagtttgtgtgtcaatgtatgacccatagtgtcttcttttcttttcttttttaacttttattttgggttcaggggtacatgtgaaggtttgttgcataggtaaactcatgccatgggggtttgttgtacagattacttcatcaccaggtattaagcctagtacccaatattatctttctgttcctctccttcctcccaacctccacccccactctcaagtagaccccagtgtctcttgttctcttctttgtgttcatgagttctcatcatttacctcccattataagtgagaacatgtagtatttgggtttctattcctgtgttagtttgctaaggataatagcctacagctccacccatgttcccgcaaaagacatgatctcattcttttttatggctgtgtagtattccatggtgtatatgtaccacagtttttgtttgtttgtttgttttgagacagagtctccctctgtcaccatgcccagctaatttttgtatttttagtagagatggggtttcaccatgttgcacaggctggtctcgaactcctgacccgaagtgatctgcccaccgcggcctcccaaggtgctgggattacaggtgtgagccaccatgcccggccctgtaccacaatttttaatccaatctgttattgatgggcatttaggttgattccatgtctttgctattgtgaatagtgctgctacaaacattcaagtgcatgtgtgtctttctggtggaatgatttatattcctctgagtgtatatccagtaatgggattgctgggttgaatggtagttctgcttttagctctttgaggaatcaccatattgctttccacagtggttgaactaatttacactcccatcaacaatgtataagtgttcccttttctcctcaacctcgcaagcatctggttttttttttttttactttttaataatagccattctaactggtatgagatgatatctcatggtgggtttttttgtgtgtgtgtttctttaatgatcagtgatactgagctttttttcacttgcttgttggccacatgtctatcttcttttgaaatgcatctgttcatgtcctttgcccactttttaatgcattgtttgtttttctcttgtaaatttgtttacattccttttaaatgctggatattagaccggtgttggacgcataatttgcaaatattttcttctattctgtaggttgtctgtttactctgttgatagttccttttgctgtgcacaagctcttaagtttaattagattccacttgtcaatttttgcttttgttgcaattgttttaggcatctttgttataaaatctttgcctatgtccaggatgtattgcctaggctgtcttctagggtttttatagttttcagttttacatttaagtctttaatcttaatcttgagttgatttttatacatggtgtaaggaagggatccagcttcaatctgcatatggttagccagttatcccagcaccattgatttaatagggaatcttttccccattgcttgtttttgtcagctttgttgaagattagatggtggtggatgtgcagccttatttctgggctctctgttgtgttctgttggtctaggcctgtttttataccagtaccatgctctttgggttactgcatccctgtagtgtagtttgaaatcaggtaacatgatgcctccagttttgttctttttgcttaagattgccttggctgttcaggctcttttttattccatatgaattttaaaatagtttttttctagtggtgtgaaaaatgttgttgctagtttgataggaatagcaatgaatctataaattgctttgggcaatataaccattttagtgatattgattcttcctatcgatgagcatgggatgttttccattagtttgtgtcttctctgacacaatttctttgagcagtgttttgtaattctcattgtaggaatgtttcacctccctggttagctgtattcctaggtattttattctttttgtggcaattgtgaatggtattgcctattcgattcagctctggacttagctgtcattggtgtagaggaaggctagtgatttttgtacattgattttgtatgctgaaactttgctgaagctattcatcagctgagggagcttttgggctgagactatggggttttctagatatagaattatgtcataatcaaagagggatagtttgactccctctcttcctatttggatgccctttatttatttctcttgcctgattgctctggccaggacttccaatattaagttgaataggagtggtgagagacagcatccttgtcttgtgccagttttcaaagagaatgcttccagcttttgcccattcagtataatgttggctatgggtttgtcatagatggctctcattattttgaggtattttccttcaatacctacgttattgtggtgttgaattatattgaaaaccttttctccatctcctgagataatcatgtggtttttgtctttagtcctgtttatgtgatgaatcacttttattgatttgtgtatgttgaatcaatcttgcgtcctggagatgatgcttacttgatcatggtggatttgctttttggtgagctgctggattcggtttgccagtattttgttgagaatttttgcatcaatgttcataaaggatattggcctgaagttttctttttttgttgggtctctgtcaggttttcatatcagattgatactggcctcatagaatgagttggagaggatccctccctcctcaaatttttggaatagtttcagtaggaatggtacaagctcttctttgtacatctggtagaatttggctgtgaatccataagatcctgggctttgtttgtttgtttgttgtttgtaggctctttattactaattcagtttaggaacttgttattggtctgttcagggaatcaatttcttcctgattcagtcttgggagatgtatgggtccaggaatttatccatctcttctaggttttctagtttgtgtctttagaggtgttcatagtagtttctgatggttatttttatttctgaggggtcagcattaacattcccttcattatttccaatcctgtttatttggaccttctctcttttcttatttattagtctagctggtagctagtggcatatatagcttataaattttttcaaaaattagatcctggatttgttgatcttttgagtggttttttgtgtctcattttctcattttccttcagttcagctctgattttgattatttctggtcttctgctagctttggggttgatttgttcttgctcctctaattccttcagttgtaatgttaggttgttaatttcggatctttctaactttttgatgtgggtatttaatgctataaatttccctcttaaaactgtcttagctgtgtcccagggattctggtatgttgtatatttgttcttattagttttgaagaacatcttgatttctgctttaattttattatttaccaaaacaaaagtcattcgggagcatgttgtttaatttccatgtaattgcatggtttttagtgatgttcttactcttgaattctatttttattgtgctgtggtttgtgaatgtgtttagtatgatttcagttcttttgcatttgctgagaattgttttatgtccaattatgtggttgagtttagagtatgtgccatgtggtgatgagaagaatgtatattctgttgttatggggtggagagttctgtataggtctatcggatccatttggtccaatgttgagttcaggtcctgaatatctttgttaattttctgcctcaatgaagtttcccactattattgagtgggagtctatgtctctttttacgtctctaagaacttgctttatgaatttgggtgctcctttgttgggcatatatatatttagaatagttagagcttcttgttaaaatgaagcctttaccattacgtaatgcccttctttgtctttttttttttatctttgttggtttgaagtctgttttgtctgaaattaggattacaacccctgcttttttctgctttgcatttgcttggtaggttttctccatctttttattttgagcctatgggtgtcattatgcctttataagatgattctcttgaagataacataccattgggtcttgcttttttattcagcttgccactctgtgccttttaagtggggcatttggcccatttacattgaaagttaatatagacatgtgtggatttgatcttgtcattgttttgttggctagatattatgttgacttgtttgagtgacactggtctgtgtgtctggctttatagtgacactggtctgtgtgtctaagtctgtttttgtattagctggtaacagtctttctatatttagtgcttctttcaagatctcttgtcaggcaggtctggtggtaatgaatttcctttgacaaggaaacttagtttggctggatatgaaatacttggttgaagattattgtatttaagaatgctgaataaaggccccagtattagtccactcttatgctgttaataaagacatacctgagactggataatttataaaggaaaagatttcattaactcacagttcagcatggcagggaggcctcaggaaacttacaatcatggcagaagaggaagcaaacatgtccttcttcacatggcagcaggaaggagaagtatgagagccgagctaagggggaagccccttatgaaaccatcagatcacatgagaacttacatcatgagaacaggatggggaagaccacccccatgattcaattatctccacctggtcccttccacaacacgtggggattatgggaactacaattcaagataagatttggatggggacacagtgaaaccatatcagcttccaatctcttctggcttgtaaggtttcagctgagaggtccactgttagcctgatggggttccctttgtaggtgatctgccctttcctctctagctgcctttaacactctttttttttttttcatttcaaccttggaaaatctgatgattgtgtcttggggatgatcttcttgtgtaaagtcttgcaggagttctctgtatttcctaaatttgactgttggcctcctagcaggtttggggaagttttcatagatgatatgctgaaatatgttttccaagtagtttgctttcttctgggaggaactatttttcttatttgtccttgtatgtgagtttatagttctgaatataaggtgatattattttcatataggtggtagagcaacagttctgtaatcaaagttttgtctctactatgggttttttttcatcacacctcccacccacacagtctcccaacctagctgcttctcctaaggttgggatgagaaacctcttcaatgacccatttctatagagtgtcctcctcagtttgcatcaactaagcctgttttctacgaagatttcttataaatagtaatgatatcaaacagttttaagattgcctgtttgtagaggactttatatctgattccatctctatgccaaccatactgatagatagtaatagtccattgaaggatgaggaaactgagattcggagcattgcataaatcaaccaagatctgtcatccagaagatactaacattagtattagaatcacgtaaatgactccaaagtccatgtacatattcctattaatcaattcctcttaatgccaaatacaagcatttgccttttaaggcaggattatagaagactgaggaggctttcaacgtgcaggaataagtgatggtttggggttgacaggtggcagagttagaataatgagacagagaccctactcatcagtctgttgcttttctgtccactcttaagttgggaaatgcctgtcacaaaaccctgctaatttagttcactctaacttcaccatcctcacatattttttcctttaatgacaggatatggtgactacagcttctacgtacctgtttgaagccacagaaaaaagattttttttcaaaaatgtatctatattaattcctgagaattggaaggaaaatcctcagtacaaaaggccaaaacatgaaaaccataaacatgtaagtgtcgaaatattctcttaaaaaattatattttctgatattaaccatttttgccacaaattatttaagagtctttctaactgaatattatcttttttatttttgatgtttgacaatctttttcaacattctcaggctgatgttatagttgcaccacctacactcccaggtagagatgaaccatacaccaagcagttcacagaatgtggagagaaaggcgaatacattcacttcacccctgaccttctacttggaaaaaaacaaaatgaatatggaccaccaggtagaaattttggttaaaaaataattttgcagtgattgcagcatacaactttttatgcaggttaagtgtgcaggccatggggccaaagtccctagaatcaaatcctggctcccctacttactagctgtatgtgaccttaaacaagtgacctactgtctctgtggttattccctacaaaatggcaaagagaggagtttctaccttgtaaaatatttgttctacattaaactagagaatccagacaaatatactcagtacagtgtctacaaaaatataaacagagaaaagcaataataaatgtttttcttaaggcatgctttttaaattttaatttttccacttctccatagctggatattaacaaatcaccagtaagctacaagaaagccagatgtatagtaagctggaaagagtcatgttgccagttactggtcaagagaaaacactcctaggctatcagttgctgataatatcaatctatttcattgaaacagatgacattgtcagtaattgatcattttgacctataaaaatggcaatgtcatctagttcaatctaaatgctaaaataatttgtcaaaacaacaaaagtgcactttacagacaaaaatgcaaatcattgttaaaggagggctctacacatgtatcactattaaatgggaaccttgctgaatccgcataccccagaatcaccctcttctattcctgttcattgaacactcgttaagtctcttgtctctgccaaacattcagctagatctggtcctattcattacctggaccagttcccctctccagtcttgaaagttccatcatctcctcatgtcccaatcttacctcttccctgtaattatcctgaccacgtttgttttccttggcacctctaatcctttgtgcccttttagttatactttcttttcacctggcatgtccaccaaagtcagtcatttcaactacaagtataaatagctcaattctctcaccactcttatccttatgtttcattcaatttactaaatcttctgaattttccgtcttctttattcttggctcctgttatgttttgaagaatggtgaagaaaattataaaactaagtgacatgattataacaacacactttccaagctcagtgaagcactcaaagctactcaacaatatttttactcagctcttctcaactctctttctcaattcctatagcagctgttctaaaatgtctaccaattttctcaagatctccaggcactcttctcaatcccatcaattaatgtcctgattgataaaacagaggtctctacattcttcctctctatttccaaacttattaccacctacaccttctctacctgcacctttcttagaacagaaaggcttctccaatttgtaagcttaatgtccccatatcagttattgatttttcccgtatcccacacctcaaccctattctattactgataggtcaccccttcttcttagacagatctttcttccttttcacaaatgcataatgtgatatatgcatttgtgtaaaaaactcacattcctcaaggtcctaaaaaacagtaaggtttttggataaataacattagtaagaatcttatgcaattttgtaataatcatgataacaccaccaacaatcacaatagatcatttagatcacctaggcaagcaatgcagtatggccagaggctgccatagcacatattaaaagtacacacacacacgacacacacacacatggtgcaaggaaggggagagagaaatgttactagaaataggaacagagatagctggaaatgagacaatgatgtagacaggaatggaattctaagtcaaaagggctgcttttaaggtgggcatgggaggcagggaaacctgagaacgaatcaagtctgagtagactcttaaatttttcttaacacgcaccaaattcctactgcagtagctgatatgagggctttttccttttctactgaacgttctaattctgctcccacaaacctggttccatttgcctaggaaacctgaaaccagtgtttttaaagtgcattatgtagaagagtaacttagggaccttgttaatatgcagcttctgattctgtaagcaaagggtggcctgaagattctgcatttgtaactagctcccaggtgatgctgatggatgttgtccagaaccacagtttgaatagcaaagacttaaaaaagaaacatgacggctgggcaaggtggctgatgcctgtaatctcagcactttgggacgctgaggcgggcagatcacgaggtcaggagttcgacaccagcctggccaacgtggtgaaaccccatctctacgaaaaatacaaaaaattagccgagcatagtggcaggtgcctgtaatctcagctactcgggaggctgaggcaagagaatcacttgaacccaggatgcagaggttgcagtgagctgagatcgcgccattgcactccagcccaggcgacagtgcgagactccatcttaaaaaaaaaaaaaaaaaagaagaagaaagaaaaagaaaagaaacatgacttcttcatactgtggtgtattttcctcccattttcagattcatatgaggtcgtttgagctacagaaacacacattgtagcagaagagactttatttccaatctttccttctccatctgtttcctctgaagtttttcccaacattgctaaaatgaaagttctactttccttctttcagcatctcaagctgtggatttacttttattcctccatttattgtgaaattcttattaaaaaaattttttatttgaactccctctctcaaaactttcccaagtgaaggactaaatctcacacatctttatattttttaatacctagtattgcattgaatatatatatataattaaaaattgtttcatataattaatgcctatgtgtcttaaataccataaatgaattccttcattttaacatccccatggttataatttggagaaccataaaccattgtactaagactttttaccaccaagaaccaaaacacaaatcccagtccactcagcccatagcatatcctcccttattgtttcattgatttaacatgtcgtggaataagaagataatatattacataatatagcataatataatgtaatttaatgcaataggcttttttatacactgaaatataaatgttgatagttgttgaaaaccgaaatctaaatatattttataattgaaagagaagcttcttaaaatatgatacaaaacgtgtcacttggattatgatcatgtatttgaaatgctttcccacaggcaaactgtttgtccatgagtgggctcacctccggtggggagtgtttgatgagtacaatgaagatcagcctttctaccgtgctaagtcaaaaaaaatcgaagcaacaaggcatggctatttaaattttctaaactgacttcaggcttttatccattcttattttcctactttgatttcttccaaaatcattcttaatgcagacaatatgtcacaaaacaatgcttttatttttttttagaaagtgtatctttaagtagttgattgctatttaaaacatacataatttcaatggcaagcattcagttgacaatttaacatattttatacctctctaccatagcctccagaactcacttgcttggagttgggcatgtaaatggatatacaatatgctgggataagatcaaagttatttacattacacaagaatgcacaaacatggttaagtagtgctaaatgtggactgagtaagaaatcaagcagcttcaaggagccaagcaggaacttcttggagatttataaaggttattttataatgccgtctagcatcacagttaataataaactctccttttgattctgtgatcaaaagagcaaaatagttgggaagaatcaatttaaaattaaaattggtgctatcacctcatcaatgtagatgtcctgctggggcgtgggacttgacactaatgtgagaactgaaaggtatatgatttcaatcaaggtccttcctctgccccattgcaccaattttcaggcacatcttttagagagtattacatttattgcatttgtttatgtcatattccccttagatgtacaactgctgctgcagaatattcagcatgattttccacatagatagtttcatcatgtccacctagtttggaagcaatagaagcatcgacatatttataagactctctaaatagctgaatagaaactattcatcatttcctgaatttgaactgaaagcctattgaaaagacaaaatatgttcacatctcagcatatttgttgtaatcactgccacctgtggtcaattacattccataaaacataggtctaaaatgtctccatcattttttattctaccatgggattcttggcagcacctcatcttcgcttccaatcacatttccctttggataaaaatgctctttgagtaataagaacatttgtgtctatcccatgtactattttttgggaatatcttctttggaaggaaatctacaaagaacttcaagctaaagtggtactcagagtaaattgtctcaaaaattctcttatccaggtccctatagcatatttaccaccaaaagtccagcaggagagatgtctaagctttaatacaaggagagaactcattagaggagagaactcaaccattgtgtttatctggaggccccacttaaaatttccctctagaatttcttaaaaaatagataattattttgattggaacccttaaaccctatagccaggataggaagtacatggtaccatagaagaataaacatcttgatataaagttcatcatgaatagaaccacttaagatttctgtaagtgctaatgattcagttgcctcaaagattaactgtcatatattttcaggtgttccgcaggtatctctggtagaaatagagtttataagtgtcaaggaggcagctgtcttagtagagcatgcagaattgattctacaacaaaactgtatggaaaagattgtcaattctttcctgataaagtacaaacagaaaaagcatccataatgtttatgcaaagtattgattctgtaagtatgctgataattgcttccagaatttataatcaaatgacatattgtcatgtttttaaagtatctgttcaggtgacctgaggattatatatattgatatagagttctttgaacactggctaacacatagtatttgctgaactagtgctatctagtgttatctattattacgttaccataattcttattatggtaaatctaccttattgtaatattgatgctcagtaaatgatatttcattcaacaaacaacatatctgcagaagacttttaaatttttcaggtttgtagtttgatttttaaatgcatggtatattaaaattattttttattttattaaccttttaggttgttgaattttgtaacgaaaaaacccataatcaagaagctccaagcctacaaaacataaagtgcaattttagaagtacatgggaggtgattagcaattctgaggattttaaaaacaccatacccatggtgacaccacctcctccacctgtcttctcattgctgaagatcagtcaaagaattgtgtgcttagttcttgataagtctggaagcatgggggtaagatcactttttctggatatagggatgtaggatatttgaagatccgagaacacactgaactctgtctgcacctagattgttctaaattgcatggtggcataaagtaccatcactgcccatgatcatgacttcaagatactgcagcaaaataccatagtaaaagaaagatgccagtataattaaaaatacctaatccaagggtcacttcctccttggattcctccagaaaatggactgggcttctaggctggttaaagcccttctactgtttcccaacaatgtcctgcgcatacctctgttactgtatattatatttatgttacacatttctcttccactagcctaggagatcctctaggacttggaatcatgtcttattcatctttatccccatttcctagaataaagttaatcacataggagtaatcaataaataattgttgaaatgaatgcacagcaaacaagtgggtgcaatgtgataagaaaccagaaggatggcacatttaaggcatagtgaagcatgctgaagaacaggaataaggtcttcagcaaatgagggaggtattaaaaagggcagagaatgatagaactgaaggaattgagccacaacaatgcagatagtggagacagcatgtaaaatgaagatgtagaagtttctcattgtgatttggttcagggagttcagaaggaaatttgggcataaattggcggggagtaacacagatcagtagggtgataaggactggagaagacaaatgcatgaaaaagcttacaccttagacaatcccctccgaaagagggctgggtcctgagggttaccaaagagccaattcaattaacccattagtggaaagggggcagtgagaggttaggaacagaaggagaaagtgggaagatagggccttggcctctccaaacttaaaatgaagcttgggtaagtattaccttttgggcagtctagtttccagtggatggagtgattccagtctctggttggagtctgcaacagtctggtttgatttataggcttgggggtatggttttatctgaagacaacaagcacaggagctcccaagagtaattagacagtctctaagatgtgtctcctcaccccaatttcaatgcaatccccaccctaccttccacctcttacttggatactcagtggtcaagaatcaattgtaaataaaaacctgcactccttactatacgtgtcccataatacacaccaccatttttttaatgttatcaattaaaaatttgataattgcttcctttaacaacatcaattaccattcatagaaaatgttaccaataaattctgtccattcattttatgtgatcttctattattttccagtcaaaatcacttgtttgtttttcttgtctttttaatctagggtaaggaccgcctaaatcgaatgaatcaagcagcaaaacatttcctgctgcagactgttgaaaatggatcctgggtggggatggttcactttgatagtactgccactattgtaaataagctaatccaaataaaaagcagtgatgaaagaaacacactcatggcaggattacctacatatcctctgggaggaacttccatctgctctggaattaaatatgcatttcaggtgaaaatcgtactgcaaatatattttggtttttgtttcttttcaggacattttcatgttaagtggtactgcacatgcttgcttgctgcctaattttaacataactaatcctaagaggcacaggactaagcatatagaaaaaagttctcttgatgttttaatggatcagtgaatcaatgaacaacccatgggtgaataaatgactatcaatttaccactcacttacaagcccaaggaagtcatggactttgctgtcttgttaccacgcagtagtcagtgctcgataaatgttagttaaataagtgtgcttggatgcaaaagccattaacatttggggaaatgacacaggtgatatagtatgattctacttcaagctagttctcatttgagtttctgtaacattcagctagggcaaactatttattatacctcttaaagcagatgtagcaagactgtgagtcatatttagggtaagccatacgagttagagcatgaactttgacatcagagtactgtatgtgctacttactaaccaggtaatcttaggctaacctttcagtctctttggactcttagtgacttacctatacaatataggaaataggaatgcctacctcatagagtaattatgaggattacatgaaatgatacatttacatacttagaacaatatttactatattatatagtaaatatctacttcatatactatatatactaattatataataatttattataagtgtatatttataataattagtaaatatatgtataattattatgaacattatttttagccaaatggtcatcttgagcccacaattaatataaattatgtcattttactgtttagaaatctttactgtctcttcacagtctacaaaattgtctcaatttctcagtctgatattactaaaaagtctcccccgctcagtaaaattgtcctcacttatctttcctgccttatttactccattctcccctcttgatgctctgtcctccaaacaacttactacacacattgttctccaagtccactgtgtactaacagcctccaaacctttgcacatgcaagttcctctacttaaaatgcttccttttctcccaactctgcatgttaaaattctaccaacccttcaaaatcctttctccttcatgtagcttcccatttactcccaacccaattgcatctatctcttccatggattgcatgacattttagtttaggtttgtaacatgaagtcctgcattcacattgcgattgtcacttatcaggtttgtgaccctaaacatgattcttatcctctctagtcctcaattacctcatcagtaaaataggataattaaagctagcacatagggttgctcatgttttaatttattcaaaatatgaacatgctttaatctattcaccaagcaaagctttttcactcttatggtacatgtatataagtggggaacagataataaatagataaatacaagaattgcagattatgtagatagtgttgtgaataaacgaaacagggaaaggagaactactttgggtagagaggccaatgagccttctctaaaaagtaacatttaagctctgatttgaaggatgagaagaagccagtggttcagatagaaaagaaatgcaaaagttccttaaggaaaaaggtgagaaaaaactagattattctaagaaattatagaagctagtagcagtggagtttggcaaatgaggggatatgaaatgtggttggagaggtagacaatgactagatcttaaaaaacttcaaaaaatatgaggcttgtattttgtttcaagcacaacaaaaagctcttgaagggttgaaagtatcggagtttgataatcaatttatgttccaggaagatgattccaattgccctgaataaaataaattgtaggcagtaaaagtggtaataggaagacattttgggagcttggagatggattaaattatacaatgtataaaacacagttaatacatagcgaatgttcagtaaactgtaacactacactgttatttctcttgaactatagaatattctgtagtaaatacatattagttttgtcttccttgttcatctctagatctcctcagtctctgacacaaagctccataaacattgtaaaattgaacccaattatttattaatatatgaatgtaggaatgtagttcctactgaatccccagcacggtgactggcacattgtaaatgcttggtaaataaactcatgcaagaaaaggagaggtgaaagagagaactctgcttcatctttggatcttcattttgtacttaaatgcgtgggagaagtgtgatggagatgctacaaatgccataaatgtataaaagcattttcctctctttccgttcggtttcaaggcatgtcagagaatatttcccatatattgcaatatatatattagtcactctttgcttcaaaacatgcaaaaattgtaataagcgtggtcaatttgttccctgataccagctttcttagggatttctacattccaaaccctcttctgcaaatctacacacacaccttcactccatgccaaagaaagtcactgacaatctgtcatttttcacctcttggcctggaatcaaggtctcaaaatggtgctccaagatgccaccaccaattaaaactgtcaaagaaaatgaaatatgttgtcatcctgggctaacttctctctatactcttttacaggcacctagtttcaaaactttgagtttcaaactgtttggcatttaggaaaaggatacaagctacaaattgaacttaataagtataattttaatatattctttaagcatcaccaatatgcttacttctgtgccagttattattagaagtaaatgaaagttgcataacaaagtccctaaccacatgcttagaactttccatattttttctttataagcatactgagggtttactaatttgtaatcactgactttttcaaatgttgaagtggattcttaatgcatctagctttaaatgcaagagactttataaactgaaggcttgtctgtcagaaggtagtccagtcaaagaaaacataacactaattaatgtcacatactgtgattatacctttggtatctggttgacctgagtttcccaggttgagatgttattgtcatttagtctagacaggattttccaaagcctggtcccaccgaattcctttaaataaatactacctgcagctgggagttaaaaaaattcatgtttaactttccccaaggattgttgattgaaaattctttattttaaaatagaggttatctcttctattctgcataactttgtttattttctctgtaaattttttctcatttcccatttgtctatttgatctaggaacatctgttggtaactgtgctctgcattatgtttgcaggtgattggagagctacattcccaactcgatggatccgaagtactgctgctgactgatggggaggataacactgcaagttcttgtattgatgaagtgaaacaaagtggggccattgttcattttattgctttgggaagagctgctgatgaagcagtaatagagatgagcaagataacaggtaaaacacgatccatttattccaggccttcaatagtaatgcataaatgtaaaggctgacagttcaacaacgtctcttgagtttctgccttggaggcactgaagctggggaccagacccaatctctgttctcgtggcacttggagtccagttggctggagagacaaataaaactgttgatgaaataacataatcagatagcattcctacataacaggaggaatatagaaaaataaagttctatgtgagcagaggaagccattagttttactagagttgtatagagccagggaaaggaagcatgcaaaactagctgaattctgagctgggctttgaacaggtggtgaatttctctgggaagaaaaagggggtaagaaaagatgatcaagtcatgagcaaaaaacatcacgttggggtgacaatgcaaggcgcatggagggaatggtgaaaaccccatgagaccagagcataagttgtggggtgggtgtatgtgattaacagaagctcagactgaaaagatctaaataacaatgaagtttttatataaacattaactatggtagctgttatttcagacacacagatgtgatgaaaatggattacgtgtttccaataccttcttaaacatagtagagaatatataatttatgacatgagtataaattatgttgaattggcttctaatggtactaaatatatgcttgctttttaatgcttagttatacaaaatcacatcatttcaaagtcctttcatggccattgtaaaatttatttctattccaagtagctccttaaaagtagtacttttttggatttatctctcttgctttccaattttctatctgctcattgccagttattgtgagaatacctaaatatagcagctctttcatctttctaattttctgattttggtctatgctggctgaaatatctgaaagtcaactttgttagaactaaaataaaagattaacaatcttttaacaaaagatttcacaaatctacactggctgaaatatctgaaagtcaattttgttagaaataaaagtttctctaaaagggctgtgtaaagtttgtgagctttaatacatggaattgtaacatctttcatattctataattatcatgcattttagctagctaagattttgataatgaggtattatggtagctttcattccctagttatgacattttaaaatgagcatttcagaattaacctgtacaactatgtgcttttggtctattttaataacacatactgaaactatgattttgttttaactattagcttaataatcactaaaatatatgtacttattttctagaaagcagtctaattaatgcatttacattttaggaggaagtcatttttatgtttcagatgaagctcagaacaatggcctcattgatgcttttggggctcttacatcaggaaatactgatctctcccagaagtcccttcaggtcagagttctcattccttgggttttcatgttcacttttgccacaagaaaaaaccatttggtggttataagttttgagttccatatttttctcaaagtaaatttttaattaaaatctaaactttaatcttaaatagaaattacccttagctatagccaaattaattggtgaaataagagtaaaataaatggtgaaacagcagacatactgtttcttttcctattgccatgggtttggttaagaaatgacattacaatgttataatgtcaaatttttcaccaaaaatggaccttttccaaaataaagcacccatttttcaatgaatgcattttaaaagctcatgcttccaagctttccccatgcttaacttctatgatatagatttagaaacatgaactcaagaacctggctgggaaatggaaggagtgtatcttggaaataaattaagcaggagaaagacggggtgaataatcattgtctatctacaaacatagggcttctgtcacctcttcaaccacttttttcggtggctttttttttattcacctgtcttccgaacttaacacttttgctcatctgggtcttgatagcaccaccattttctgttacttagattcaaaaactttgagtaaactttgattcttctttcttcatgtcccatgtgaacatagccagtttctctcaaaatatattttacaaaaatatttctcttcttttcattcctacatgtctatgtcatgtcactttatgccaagatttctgtctggtgttttccagctcatcagctcactgcctatattaaaacttgccatgatccctaaacaaatctattttcctctacttctcaacaatgaaaagaacagaagttatgggatgtgagcttagagtatgtacagatttgtttggacatcttgtctgcagatataacctgcaaacaagttaaaaattagtgtgagatatagactgctagtgtttggagaataagctgaaggataataaaggtcatttctgaggttgccatcatcgttgactgagaacatgatgattatagtgagaagtaaggagagagaactgattctgaagatactattttgtgttctgtttattttaaatggatggtaggaacaccaagaaacccgctatacaatatagcaactgtagttaacaacaatgtattgtatatttgaaaatcactaagtggattttatgcattctcaccacaaaaataagtatgtgaggtaatgcctatgttaatctacttgatttagccattccacaatatgtgcatatttctttgtcactttaaaaaatgagtaactaaacaaaaatggttggctcttctggactaacagctatcaacaaaaagttgaaatactttctttaaagctcttctcaaagaaagcttctacatttcctctcttctcaggatcccaacctttatgtatcagtttgccctcttgttgaatatatttactgtccagtgctactccctctatctgtgtgaaaaaattatttcaaatttccacatcaggaaaacatccatgaatgcttgccaagacaaccgggaaaaaaacagtaaggtcatattcatgactgtaaaacccttgtttctgctctacatgtttctgctctaagtctcttacttcctcactttttaattgataactgtcatatcatcaccagcttgcagagagatcacaagtctaaggtggtctgccatttataagcttgttctcaggccagaaattaaaaaccatcttgaaaaaagaataaaattactgtcttctgcagtcattaattttgaaatctatttaaacagctcgaaagtaagggattaacactgaatagtaatgcctggatgaacgacactgtcataattgatagtacagtgggaaaggacacgttctttctcatcacatggaacagtctgcctcccagtatttctctctgggatcccagtggaacaataatggaaaatttcacagtggatgcaacttccaaaatggcctatctcagtattccaggaactgcaaaggtaagcaatcagcttttagacttcctgtcaacatttttaaaaaactgaacataaattgtttaatgtcataaatgtcagtaccaaaggctgtatcaactttaaaattaagataaaatagtatgtactttccatgcctgtgtccttaaaactatgatggtaggaaaaaagaacttatatatcaagaagaaggaagaaaacgtagtcaagactgtctgagaagaactttaagaaggaaatgtaggaagagtctatgcaaattggtgggtagagagctacagggtccttccttattcaccctaccaggattgatgaatctgtggactctaaggccaaaaccaaggcaaaccttctaaaacttattttttccaattgagatgtagcgaagtgtacacatcatgaatggtactacttggcatgccctgtctgaactgcctcagcccttacccatttatcctcaacatccttaaaacctctttattctctccccattatataatttattttagaattacataatggaaatatagaaagtagcttgactttggatacttactatatttctgttgaaacttttaggtgggcacttgggcatacaatcttcaagccaaagcgaacccagaaacattaactattacagtaacttctcgagcagcaaattcttctgtgcctccaatcacagtgaatgctaaaatgaataaggacgtaaacagtttccccagcccaatgattgtttacgcagaaattctacaaggatatgtacctgttcttggagccaatgtgactgctttcattgaatcacagaatggacatacagaagttttggaacttttggataatggtgcaggtaattcacaggtttttatgaataagccaatattttcctaattcagcatgttgtgagtccctgtggcattgtggagcagtaagacaggcaacagaattgatgcagattaaggaggaacagcaggaacagcaggaaattttatctaggtaaaacctacagagtgcttagcaaatgtcttgcatgtggtaagcactcaatcaatgtttttgggctgggcgctgtggctcacttatgtaatcctagcacttcgggaggccaaggtgggcagatcacttgaggtcaggagttcaagaccagcctggcaaacatggtgaaaccccttttctactaaaagtacaaaaaattagccaggtgtggtggcacacacttgtaatcccagccacttgggaggatgaggacagaggatcacttgaacctgggaggtggaggttgcagtgagccaagatcataacaccacattccagcctgggcaacagagaaagactccgtctcaacgacaacaaaaatacccaataaataaataaaaataaaaacgtttttggttgttgaatttttttgtttgttttttttgtttttttgagatgaggtctcactctgtcgcacaggctggatggagttcagtagcaccatttcagctcactgatgcctctgcctcccaggctcaagcagtcctcctatctcagcatcccaagtagctgggatacaggtgtgtgccaccatgctcagctaatctttaaattttttttgtagagaaaaggtcaacaaaagagaaaaggtctcactatattgccccagccggtctcaaactcctaggcttaagccaccctcccaccccagcctcccaaagtgctggaattacaggagtgagccaccatgcctggccatacatgtaattttttgtcatcattgttgtttatcatccaggcaaccaatgtctgtcaccaattagaaaggtctcattcaggaggctgaggacagcatcaagaaagcctggctagagagagggtgaagcacaagcaaactaaatgtgattaagtgatagagcttgggtctctggcaggaaaagaaagcaggagtaatcctcgacagctggaacaaagtataaatatagtcctgagaactggggcccagaggcagctagcactgccacaaaagaggaagattcatcactggggcatcagataccaggtctggctggtaggaatcaagatgcaacgttggccattatctgtctccctggtctgcacagatgggtgatgcctaaagaccctttccctagattctggattgttctaggaacggaagcttctgttaagaggttaatgagcaaggaaataactatattgataggcacccgaattaacaaaattttctatcagtatattttgcaatgtaacttattcaatcattttataatcatatcttcaactagagttgcccctgagaaaaactgagaaggtgaaattgttcttttgtgtacctcaatgccttcttcagatatatcaatatttccacaactatcccttgcctcttttttccctttctgcaaatctctactacattaaaacttatatgcaccatgtttcccttctcaacattttgctagatgaccatttaggtaattggggaaatttgctaatttggaatgcctttacctgagatggtattagtgattaacaatgacatagagcagacattctttagtctgcaaatgtctttagtctgcagacaaactttagtatgcaaaggaatcatctcgagggtttgtaagaacacagaatgctgggacctttccctaggaagtctgggaaatgtgtacctctaaaaatctccagatttagtaattttagttgactgttgtgagaattaaatcctacacaaagaaaggatttttccttagtagggacccttttgatttaaacagagagatgacatagtgtgtttagagaaagcaagctgaaagcaacccagtggtggagaaattgtaagagtactatatgtaatattctgtatatgaattaataaggacagaaaggtgaagtatttaggcatttattatgcatacataaatatcagtgtgtgtgtatgtatgttatatagaaataatagatatcgaaatagctcaagggtgtcaattctacaatatattgttttggcagaatataatggaaatattctccaaagggtcaatctaaaaatattaagcctaatctagaggatatgcttgtagaggccaattgcttgtcttagaaaatgcaaaatttctctttacaagactttattccttcatttctataacaaggcgctgattctttcaagaatgatggagtctactccaggtattttacagcatatacagaaaatggcagatatagcttaaaagttcgggctcatggaggagcaaacactgccaggctaaaattacggcctccactgaatagagccgcgtacataccaggctgggtagtgaacggtgagtaactcatgatatttataatccagtgatagtttgaacaatattagtgatttgatataattaggcttcaaacaggttgattaaaactcaaaatatagcttttcccatttatggaataaagttctcagtcatactaggatttgcctctaaattaatctaagctttggtacaatgtctggcacctagtaagcactcaagcactcaaaaaaggtcaattattcttattttttttaactttcagtttaggtttgagggtacatgtgcaggtttgttatataggtaaactcgtgtcatggcggtttgttgtacagattatttcattatgcaggtactaaacctagtacccaatagttattttttctgaccctctccctcctcccaaactccaccctcaagtaggccctagtgcctattgttaccctctttgtgtccatgaattctcatcatttagctcccacttataagtgagaacacgcagtattttggttttctgttcctgcattagtttgctgaggataatggcctccagctccatccatgttcctgcaaaagacatgatctcactcaaaaacatcagttattattatgttagtttgaacatcttatgtatatcaacaataatatgcccagctttcagctcaagatgaaggaaacagaccaatttatgaacctaagcacaagcctgtgcagaatttatctttcagattacatatgctgtagagtaaacacttatttagaattttaataagtcaaaaagaaaaacagtgtgtgcagtaaagtgatgtaagaattaagaatgcattctttgctagctttctttcatctggtcccttgtgacttttaggggctttctactagcaattggaatacaatcagaagaattattccttagcacttgcagcatggagggagggacctagcacaagtgggtggaggagaactggcaatgatttccccaggtatattcccagagtgcagataattcaagaggtaaagcaattccttttttaaaaaggcacacattgaattatataatatttctgtcacccagtgtaggcttaattctaaagcaatttgttttctgattctgtcctacaatatcctaccaaagaaagaattctctcaccagttgggcgcttatgattgtcacaaaacttagtaaaaatgtgactgtatatatttttttagaaggaaaagacaagtgaagaaggtgattcactgaattataataaataccagtagttttgcccattataaaccaggaaatgtttaatgcaggggaaattgaagcaaacccgccaagacctgaaattgatgaggatactcagaccaccttggaggatttcagccgaacagcatccggaggtgcatttgtggtatcacaagtcccaagccttcccttgcctgaccaatacccaccaagtcaaatcacagaccttgatgccacagttcatgaggataagattattcttacatggacagcaccaggagataattttgatgttggaaaaggtaaggatgaagtgtcatgtgattttgacttaagtaaaaggtgctaattgcaaaaacaggggtgtaagggtgggtggggggagaatggttttatattgacagcctagcaaagtgttaattttataatctgatattttttaatcaatcaaatgacacattttaacgtggtcctacttttcatacaaagaaggtagcaatttgcagagcttaagaccagaattcagcttttattaaaaaatgagtaaggcttttgatctatctgctttgcataactagacatttttgagaataaataaaaaggaatgaatatgctatgctgcagtctctaaactacatgtaacttttttttctcagttcaacgttatatcataagaataagtgcaagtattcttgatctaagagacagttttgatgatgctcttcaagtaaatactactgatctgtcaccaaaggaggccaactccaaggaaagctttgcatttaaaccagaaaatatctcagaagaaaatgcaacccacatatttattgccattaaaagtatagataaaagcaatttgacatcaaaagtatccaacattgcacaagtaactttgtttatccctcaagcaaatcctgatgacattgatcctacacctactcctactcctactcctactcctgataaaagtcataattctggagttaatatttctacgctggtattgtctgtgattgggtctgttgtaattgttaactttattttaagtaccaccatttgaaccttaacgaagaaaaaaatcttcaagtagacctagaagagagttttaaaaaacaaaacaatgtaagtaaaggatatttctgaatcttaaaattcatcccatgtgtgatcataaactcataaaaataattttaagatgtcggaaaaggatactttgattaaataaaaacactcatggatatgtaaaaactgtcaagattaaaatttaatagtttcatttatttgttattttatttgtaagaaatagtgatgaacaaagatcctttttcatactgatacctggttgtatattatttgatgcaacagttttctgaaatgatatttcaaattgcatcaagaaattaaaatcatctatctgagtagtcaaaatacaagtaaaggagagcaaataaacaacatttgg

SEQ ID NO: 3 - DNA, 12969 bp, Homo sapiens
cctgggttcaagtgattctcatgcctcatcctcctgagtagctgggattacaggcaaacaccaacacgccctctctttctttctccttccttccttcttttctttctttttcttttttctttctttctttctttctttctttctttctttctttctttctttctttccttccttcttttctttctttctttttctttctttttctttctttctttctttctttctttctttctttctttctttctttctttctttttctttctttctttctttctttctttctttctttctttctttctttctttctttcttttctttcctttctttctttctctgtctttctttcttctttctctttccttttttttttttttcagagccttgctctgttgcccaggctggagtgcagttgcacaatcttggctctgcgcaatcttcgtctcccaggttcaaatgattttcctgccttagccccccaagtagctgggattacaggcgtgcaccaccacgcccggctgagttttgtatttttagtagagacggggtttcaccgtgttagccaggatggtctcaatctcctgacctcgtgatccacctgcctcggcctcccaaagtgctgggattacaggcgtgagccactgcacctggctgtttgctgtttcttaacatgtgaggttccaacccagtggggcccactaacatgtgctgttctgctttggaccgtggggagctggggtgctggacccatctcccaccttctacagcctggagtgtgctcccagatgacacagccaagctggcgtgtttttccctcactggcggaaagttcagcaatccctgactccctcaccctgccctgttgagatttaaaaaaatttcctcttctgggcctcagagccgcctcctacctgaggtttattgctttctctgcaccagcattgagcctctgcagccctttaaaaggggcagagcccatagtgtgatcagcaggtcctgtccctaggagataagagtatcttgcacagcaggtgcaggtttcccagcagctcaggcaagagtccgatgtttgtgccatctgatcctgatgtctggagaggtgagccctctgtcggcatcttcctctccaggctggcagagcaaggggggctgtgaattaattcaaggttgggggtcggggccttctatatctggacttgcctcccacccgtgtcctctgtccctttttccctacggcagatagccatgtgtgagcctgaatttggcaatgacaaggccagggagccgagcgtgggtggcaggtggcgagtgtcctggtacgaacggtttgtgcagccatgtctggtcgaactgctgggctctgctctcttcatcttcatcgggtgcctgtcggtcattgagaatgggacggacactgggctgctgcagccggccctggcccacgggctggctttggggctcgtgattgccacgctggggaatatcaggtgagaccagctctgaggattcagcctgatgctgacttggggcactgggtgtggaaagcaaaggcgttgtcaaggacccctgggcgcatacgtattcgggatttcaaggagcgctctggataactatggggttgggagtcagactggggtcaactccagaccccgcagcctgtgagcttgtgactttgagcaagtcattctctttttgagtagctggatcacaggcatgcgccgcagcacccaactaatttttaaattttgttgtagagatggggtctcactatgttgcccaggctagtcttgaactcctggtctcaagcgatcctcctgccttggcttcccaaagttttgggattacaggcatgagacaccatgcctggctggcaagttactctctaaacccaaagttccccgcctataaaatgggaatagtagcttttaaatgttttttttttcaagccaacatatctatattgctaaccatgtaccaggcactagtctaattactttatagatattagttatttaatcctcacaaaagccttgtggggtaggtcctgttattagccccattgtacagctgcaaaagtgaaaggccatgtaatctgtccaagcttagagggccagaaagtggcagaggcgggagtcaagaacaagctgtctggctccagcgctcaaatccaagtgcctcatgcggaagtcatgagaattaaatgaagtagagcgcctggcacacaccaaacatacaacaggcattggttgctgtgttattgttaccactagaagggggttttagggaaagcagaaatgcatagaagacctgagccaggttttcccacctgggtatgcagagatctgcagtggtcctggcttgtcaagaggtgatcaagaaggaggggcagggaaagggacaggcttctctggcttagctctcgtctgggtagaggctcaatggggaggtctgtggacatggctgctggttcccaggagagccagccatcacgacgaagatcttgagtggggtgcctggcagggtgatctgggacatggttggtctgtattaaatctcactcaaaaaatagatctgaatgaggaaacagaaatactatttctgagaaaaccagaatggaaaagagctttaacatctctttaggccgggtgcagtggctcacgcctgtaatcccagcactttgggaggctgaggcgggtggatcacctgaggtcaggagttggagagcagcctggccaacagggtgaaaccctgtctctactaaagatacaaaaattagctgggcgtgggggcaggcacctgtggtcccagctacttcggaggctgaggcaggagaattgcttgaactgggagggagaggttgcagtgagccgagattgtgccactgcactccagcctgggcaacagagtgagactccatctccaaaaaacaaacaaacaaacaaacaaacaaaaaacaaaccacatctctttagacgtccaagggaggctgcaagtgaaacaaaaagtacatgatcttccctttggacggatctgagattgaaggcaacctttatcacttcttagcagggtgaccacagcaagttgctgaagcctctgtgtgcagtggtataaatatgagtaataataatagctgatgttttttgaatgctaactacatagatactactatgggctgtacaaatattaattcttaatatctttgcaatagctttatcaggcagagatcattgaggcacagagaggttatgtaactttgccaatgccacacagctcttcagtggcagagttgagctttgaacccaggccagctggctggaaagaccatctctttggcactgcaaatactgcctctctgtttggcttttttgacaaatatttattcagcacctattgcgtgccagacactgactttgaggttgttcactggatccaggataagctatgtatgtaagttataagcacccagcacagcccctggcacacagtaagtgtcagagaaatatatgctgagtgaacaatgaatgaatgaatgaatgtgtcttgattgttttattgctaatgagtgtaaaccaggaaatgtgtggttttcgtcacctggccctcctgatagagccatgctctgggtgacagtttctctcccctttggggctcccctgggaagccgcctcaccctgacttcatctgtgtatctcagcagagcccaggctaagctacttgaggccaagtaggcctggctgcccctcttcccaacctgtggagtctgagcactggctggtgctttcaaaccatgcatggaggtcaggcgcagtggctcacgcctgtaatcccagcactttgggaggccgaggcaggtgaatcacctgaggtcaggagttcgagaccaacctggccaacatggtgaaaccccgtctctaccaaaaatacaaaaattagccgggcgtggtggcagccccgttatcccatctacttgggaggctgaagcagaagaatcgcttgaaaccaggaggcggaggttgcagtgagccgagattgcaccattgcactccagcctgggtgacaaagggagaccctgtctcaaaaaaaaaaacaaaaaacaaaaaacaaatcaaatcaaaccgtgcatggagcttatctgagggcctgggcccagagctgagccagacaagttggggtagctggtctcgagctatcagggtgttggacaaagtccttttgggcagagctgaggtcctctgcccagtctcaactgaatgtcctatgtcctttggaggatgggtaagctcattggtgggctctttacattaggggggcactttggttctcaagtgacatggggagtcttggggtccctttctctctcattggggagtatccattcctggaaaccagatggattcaggaggccaaactgtgacaatatttcctccatcagagtgggactggttgggacactgatgtgagtgcagccaccctggctctggggcctgggctggttgaacatcttggtgaacacgaaggctctttacccatgagccagggggtggctgatcaactgcaacctgccctttgacctcaggttctgacttgtctaattcccttccacaccccaaactcccaatcccaatccctaacctggtcatgaacctccaactccaccccgtgattctcaatgccattttcagcctgaactccaaatctgcattttacacccatcacactttcagaccacaagtagggttttcactggctgagcagttcaaccaatcaggaggtcttattcagggcctagctactcataaagggagacccgggccgggcacggtagctcgtgcctgtaaccccagcactttgggaggccgacgtgggtggatcgcttgaggtcaggagtttgagaccagcctgaccaacatggtgaaacctcgtctctactaaaaatacaaaaataagccaggcgtggtggcacacacctgtagttccagctacttaggaggctgagtcagaagaattgcttgaactcaaaaggtggaagctgcagtgagccgagatcacaccattgcactgcagcccgcgcgacagagcaagactccgtctcgtaaaatcaaacaaatcataaggggaggcctggataccgctcttgggctactaacttggagccttggtatctcaatctgacctgtggccacatctctgaagggctggagggaggcttggagggagtcagggaggagttaagggatggtctccctacacgctcttcctccagggccatcctgggggctgggctttggacttagaggctgccctttatctcttaccctctgcctggcatctcagggaaaatggaagcaatttggtgcctctttgtatttgagctgggccccggactgactcttgccctgagaggccagcctggtgggttggctgggacacactgtctcaagtgccagccatgtggtcagccctgggctcatgacttcctctgctcttgtgggttacagtggtggacacttcaaccctgcggtgtccctggcagccatgctgatcggaggcctcaacctggtgatgctcctcccgtactgggtctcacagctgctcggggggatgctcggggctgccttggccaaggtgggtaaaccccaggggctgggctagtcttcctctctgatggggctgctggaggtgcatatgtgggtgtgtgtgtgggacagtggggagtggggaaatgtccaatcttttgcttgtttctgccagtggaattggtggacgtttttcttctctctttctttcttattgcattttattgtattttttatttgtttgtttttttgagatggagtcttgctctgtcacccaggctggagtgcagtggcctgatcttggctcactgcaacctctgcctcctgggctcaagcaattctcccacctcagcctcctgagtaactgggattacaggcgcatgccaccatgcccagctaatttttgtatttttagtagagacggggtttcatcatgttggccaggctggtcttgaactactgagctcaagtgatctacctgccttggtctcccaaagtgctggggttacaggcatgagccactgtgcccggcctctcttttttattttagagatagggtctcactctgttgtccaggctggagtgtggtggtgcaatcatagctcactgcaggctcgacctcctgggctcaagtgatcctcctgcctcagcctcttgagtagctgggactacaggtgtgtgtcaccacacccaactaatttcctctgcctaggaaaaccagagacctttgttcacttgtttatctgctgaccttccctccactattgtcctatgaccctgccaaatccccctctgtgagaaacacccaagaattatcaataaaaaataaataaattaaaaaaaatttttttctgtagaggtgggctctcgctgtgttgaccacattggcctccaactcctggcctcaagtgatcttcctgccttggcctcccaaagtgctgggattacagacatgagccaccgagcctggccagccacagagttttcatagctttatgcataaatccatggatagactttctcccttcatccctctttttcttttttttccctctctttctttcttttcttttgcccttaagtcttggttcagccagggatacttcaagcccttcaagatgtgggccttgcttggtgtgtgtgtggggggtggtggatgggggagctctgtcagcttggctgtgatagggtctgaagctgtaagtgctgacccaccgcagactttgttctcaagcctcactttactgtcatcccctgctgtggtctctccatgtcccaatttgagagccacagcctgttcccctgtctatggaacacgcccgggaccttccttctcggcttctgctctgaaaagcagtggccagactcgagctcaagccctgccacttaaaacctgtcaaacatggttctgacagctgcggggcagcagggttccctaagcacattcttcctgctaaatgttttacacatattctcttatttcatctcccagcaactttatgaaaaaccatagtcagttcatagagagcgcttaccttgtgccaggcacaccaacggccttgtctgtgagctgggagctgtcagtatcatccctattttatagatgagaaaacagaggtgcagagaagcaggtaacttgctcaagttcagacgtgcctgtaagcagcacagccccgactggatccagagtccagaagcttgtgcactgcactgtctttccccttcggggctgtgatagccctgaggccgatcgcccatagaaataattgagctcaggcttcagggctctcctgcacatgccccttccacggtcctgtgggggcttagcaatgagttcacctgatcatatgtgtttgtaaagtttctaagagtaaggtatttttagccacgcatggcggctggtgcctgtaatcccagcattttgggaggcagaggcgggaggatcactggagcctaggagttccagaccagcctgggcaacatagtaagaccttccatctctacaaaaaattttaaaaaaaacattaggtgggcatggttggtatgtacctgtggtcccagctacatgagaggctgaggtaggaggaacactggagcccaggaggtccaggctgcagtgagctatgatcgtgtcactgcactccagcctgggtgacagagctagactctgtgtcaaagaaaaataaaaagatagtttatgttctttttctcaaagaggatcatctaagttacataagttttaggtctgtaacctggagccatgactgggttatccccatttttctttttctttttcttttttttttttttgagacggagtcttgctctgttgttcaagctggagtgcagtggtgtgatctcagctcactgcaacctctgcttccagagttcaagtgattctggtgcctcagcctcctgagcagctgggattacaggtgcctgccacttcaccccgctaatttttgtatttgtagtggagatggggtttcaccatgttggcaaggctggtctcaaactcctgggctctagtgacccacccatctcagcctcccaaagtgctggggttgctggcgtgagccaccacgcctagccccattactatttttcagctgaacaaagtgaggctcagaaaggttcagtagttcacgcagggtcgcacagtaaaatctggcagagctgggatgtggatgcaggtatatctaactgaaattggacataacccttcactggctcttaaggtgggtagcatgcgttttttaggccctctcccctcagtttccagctgtctctctgccccactgtgaggctcagcagcttctctgtgcaggcggtgagtcctgaggagaggttctggaatgcatctggggcggcctttgtgacagtccaggagcaggggcaggtggcaggggcgttggtggcagagatcatcctgacgacgctgctggccctggctgtatgcatgggtgccatcaatgagaagacaaagggccctctggccccgttctccatcggctttgccgtcaccgtggatatcctggctgggtgagtgtcccttggcagtggggtgaccatgcccagatctgtgctgttcagctctgggggatttcaggcctgagggtcacagattcagttgctattaggggccaggaaggtgctgcaaatggggaggggggctggcatcaggcagacaacagggagtggtggggactgcagtgtcagaggtgctgcagtcagttcagctcttgtcaattattgctgggtacatgggtctgggctgatgctttcattcaaaggaagtcagaaatttaaatctgtatgtgatgttttccaatgttggtagcgtaaatacaacatttctgtgaactgtgttcattcggtcagcgggcagccgggttttagcctcaggcttacaaagagcatgtgtagctgttgtctcatttatttttagactcccagcaggctttggaagggattaagtagacaagattggggatgatgtctcccgttttatagataaggaaactgaggcttagagaggacagaagtgacttatttaaggtcagtgggcagtggcaaattaagtgatagatttgggacaagaggctgagtgaacccttttaatttttgttgtagagataggggtcacgctctgttgcccaggctggtcttgaactcctggcttcaagccatcctcctgcgttggcctctcaaaagtactggaattacaggcatgagccacagtgcccagcccagggagcccctccctaatgtctgactctttcctttcttttggacacagaaccaagtctaacctttctcctgggtcagctctccctcaactttgggaggtggagcctggggcaggctggggaatgtgtgtgtaaagctgtggccatgctttgctgccccctagtggtctttgattcacttacaagcccttttttttttttttagctccgcttcccgggttcacgccattgtcctgcctcagcctcacgagtatctgggactacaggcgtccgccaccacgcccggctaatttttttttgtatttttggtagagacggggtttcaccgtattaggcaggatggtctcgatttcctgatctcatgatccgcccgccttggcctcccaaagtgctgggattacaggctgagccaccgcgccccgcctacttacaagctttttgacttcgaagctggacacagggtggggatgaggtctacaggcccccagctggagagaatggggtaaagacagagccccagaacgagaggagtgcacctggggaagagtctccctgtaggattctgggtcttaagcttgtggtgcaacaagggcctcatctggaccagctagattagttaatgctttttgtacattaattatattcgaggtgtgggctccatttgcattttctcattcactcctgatgacaacctatgggatagtcactttcacctcacctgaacacagagaggttcatggaggttcccacacctagaactatctgggctggggtttttctttctttatatgtatatttttaaagctttgtgggtgaacctagtaggtgtatatatttctgggttacatgagatgttttggtacaggcatgcaatgcataattatcacatcaaggtgaatggggtattcatcccctcaagcatttattttttgtgtcacaaacaatccacttatactcttcgttattttattttatttttagttttagtttttgagacagagtcttgctctgtcacccaggctggagtgcagtggcatgatcatggctcactgcaacttccaacccccaggttcaagcaattctcctggcttagcctccccagtagctgggactacaggcgtgtgccactattcccagctaactttgtatttttaatacagacagggtttcaccatgttggccaggctggtctctaactcctgacctcaagtgatctgcctgccttggcctcctaaactgctgggatttcaggcatgagcctctgtgtctggctgaggttacatgagatgttttgatacaggtatgcaatgtgtaataatcacgtcaaagtaaacggggtattcatcccctcaagcatttattctttgggtcacgaacaatcctatgatacactttttgttattttataatgtgtgggctgggttttgaatctaggtcagcttgactccaaaaggattgaaactgattgactttcctttgtagactttggagcaaatgtagctccagcttctcttcctgccatcacccagtaggcatttttgctgggcattctagaggagtgtgtggggagtgctggactgcacgcccagcggggagccatgccttctgcttcctggtgctaatagcccctctgccttctttaggatctacccaggagctcatgatgtaggagtttagagagggtttctgggtggtgtgtgactaggcctagttggggacatgagtgtgaggtgaggtggggtttggctgggatcctggtgaccttggtgcctgggtgtttgcaggggccctgtgtctggaggctgcatgaatcccgcccgtgcttttggacctgcggtggtggccaaccactggaacttccactggatctactggctgggcccactcctggctggcctgcttgttggactgctcattaggtaggagtgtgacacagggtcaccggcccattggatgggcacttggcaacatctcccagagagtccgggactagagggctaggctctcacttgggtttggaagagaaaagagggagcctctttagaggcaaagaaaatggctccatctaggagctttggttgcaagtgacagagatctatttcaaaatagcttatgtcataaagaggaattcattggctcacatcatcaaaaacttcacaggtagcagtggtttcaggtggcgctcaaacaatgtctttaggacttggtctttctccttttctttttttgacagtttccctctgttgcccaggctggagtgcagtggtgtgattctggcttattgcaacctccgcccccgggttcaagagattctcctgcctcagcctgccaagcagctgggactacaggcgccgccaccacgcccagctaatttttatatttttagtagagtcgggttttcaccgtgttgaccaggctggtctcgaactcctgacctcatgtgatccacctgcctgggcctcccaaagtgctaggattataggcatgagccaccgcgcccagccagtttttgtgatttttttggtagagatggggcttcaccatgttggccaggctggtctccaactcctgacctcaagtgatctgcctcccaaagcgctgggttacaggcgtgagccactgcacccggcttcatttaattctgggctttcagagtggcagcaatgagcatcttcaggaaaagggttagaaaccaagcaggacccgggcatgtggttcacgcctgtaatcccagcagtttgggaggccaaggtgggtggatcacttgaagtcaggagttggagaccagcctggccaacatggttaaaaccctgtctctactaaaaatacaaaaatcagccaggtgtggtggtgcttgtctgtagtcccagctactcgggaggctgaagtatgagaattgcttgaacccaggaggtggaagctgcagtgagctgagatcatgctactgtactccagcctgggtgagtgagactctgtctcaattaaaaaaaaaaaaagaaaccaagcaggaaactgtctctctctctgcaaggggatctggctattaaggctggggaggctcaggaagtcatctttctggagacttctgagcctggagacatgacgaagggctgggtctcacctccggggcagagaccttactgggtcatctttcttgcaggtgcttcattggagatgggaagacccgcctcatcctgaaggctcggtgaagcagagctcgtgggattcctgctgctccaggtgtcctcagctcacctgtcccagactgaggacaggggagttcctgcatttcctgccagggcagaggcccagaggagcgaccccctgcttccactgcttgggcctgctttctcagatagactgactgctgaggaggctctaggttcttggaattcctttgtgctcatcagagaccccagcctggggaacacgctgcccgcactgcccagagagcagtgcaaacaccacaacacgagcgtgtttcttgagaggaatgtccccgagttggacaaggaggctgtttctgcacatcagctcatttcccgcaccccatttcttgcttgattgctttgttgggggcctggccacttccttgcttctcaagctgacaattctcactttgcaataaatagtccagtgtttccttc

SEQ ID NO: 4 - DNA, 15649 bp, Homo sapiens
aggtgggggggtcagcccccgcccggccagccgccccctccgggagggaggtggggggcgcctccgcccagccgccccttctgggaagtgaggagcccctctgcctggccatcaccccgtctgggaggtgtacccaacagctcattgagaacgggccatgatgacgatggcggttttgtggaatagaaaagggggaaaggtggggaaaagatagagaaatcagattgttgctgtgtctgtgtagaaagaagtagacatgggagatttcattttgttctgtactaagaaaaattcttctgccttgggatgctgttgatctatgaccttacccccaaccctgtgctctctgaaacatgtgctgtgtccactcagggttcaatggattaagggcggtgcaagatgtgctttgttaaacagatgcttgaaggcagcatgctcgttaagagtcatcaccactccctaatctcaagtacccagggacaaaaacactgcggaaggccgcagggtcctctgcctaggaaagccagagacctttgttcacttgtttatctgctgaccttcccttcactattgtcctatgaccctgccaaatccccctctgtgagaaacacccaagaatgatcaataaaaaaaaaaaagagactataaacataatttgagtgtttagaaatttaaaaataaaatcccagtaaaaaaaataaataaataaaaataaaaataaaaaaatgcagtatgatattgcaatgattgagcattagaaagctggagaaaataaatactaaagtgtttgggagggtcacaataggcttcccagtaaaaattagaggaggatgtgaaagcacagcgtattccaaactttacagttgcatttacatctcttgaggtgaaagagaaataaccataaaaggactctggaactacataaagatacaagacaaattggtttggagaacggaaataaaatctacctataaaatccaggtaaatatctgatactggcacacaggttggagcagagaaagaggaaacatagaggtgccaaaggaacaaagtaagtccattgatacgttcttgcctatctctcctccaaatcaatgggcacaaactgtggctggtctacctgtgtgggttctgttctctagattggagggatgaagacaagttcttgactctatgttgaggccagttgaaaaatgagggagaataaaaccatgaacgaaacaagaaagaaacaaaacagaagaggaatgaaaaagtaagttggttgctgtacaagagataaaacggactgcaaaaagaaaaaaaaagctaatgctcgctgggtgcggtggctcacacctgtaaacccagctctttgggaggccgaggcaggagaatcacctgaggtcaggagttcgagaccagcctgcctaacatggtgaaaccccatctccactaaaaatacaaaaattagctgggcgtagtggcaggtgcctgtaatcccagctactcggggggctgaggcaggagaatcacgtgaactcgggaggcggaggttgcagtgagccgagatcgctccattgcactccagcctgggtgacaagagtgaaactccatcttaaaaaaaaaaaaaaaaaaagctaatgctaagaaaggtgaataataggttcaactgtatgccattccatgaacatgggcccaaaaggacgaggccatgccccactgggcacttgatgattatgtggctaccacagggacaacatagaacacagaagtaatactggagcccttggctttgtaacacattttaattaaggtacttctttctgacaagaaaacaattaaaattaaaataggtagggaaagaacattcattttcaccagatcagcattttgtgaaaggtgatataagtgtatacctgtggatgtactgggtgattttgtgaaaatgattcggtttcatgttttgctttatgctataaagtactcttgaaaataataatcatcttcactctgtcaaaagtgaagttagcatgaaaatgaggtagaaagaaactataaagaagtaaatttttcccatttttatttgaaataatgtaatcacagagcaaattgctgaggttttctctaattgctttagtcttatacttttgatctcatcagagctccaatatttttatgtgttccttgttcttaaaaataattgcagttgttctaattcttatttttaaaaaaaggacaactaggggtaaatattttgtcaactgtcaagagaacaatcctactaagtcaataggtggaatctataaaaggagtctatttattagtttcccttctcatgtatcatttacagaattgtcttcatttcaattgaataattaaagaatcagaactggctggctctgtctttaattccttttataaaaccagaacttgacccagtaaaaatgtattctgagtcctaataactatagacctagccatgaataatctgggttctatgtgaaatttacagatcttagtccagaaactaaacagcagatatgaaaggagaaactgttgataaataaatgaaaagtattgagttttcctcataaaatttctcgagacaaaaaaaaagcaatgatcaacagcaaaggagaatgtaatgaaatcatatacatgcagaaacgtggacaattctttaattgtatgctttttaaaagctcaaaaaaattcttgttctggttaattactgtactctgagtacccatctcctatttctttgctcttgaaattgaccctgttcaattccttttataaacttttcctatggccacatccactgcctaaaacaagatagaataccttgggatctaataataaaataatagttcctttttaagctcttgccatgtgctaggcactgttccaacagttttgcataaattaggataatttgaactttagactagcctccttaggtaccttctgtcattttacagttgagacataggaactaacagggatttcattaagaaacttgcttaaagtcccagacttagtgaagtagcagattgaagattagaaaagagggcttgagcaatatttggccaccgaaaccagatccataggatgtataacctcacattctcaaatgctattgagagttacgtggtgttactccaagagtcacagctatggacttgtttcctttttccttgtttaaaataaacttttgtgggctcaaatgtgtttacattttttttttttttgagatggagtctcgctctgtcacccaggttggagtgcagtggcacgatctcggctcactgcaagctccacctcccgggttcacaccattctcctgcctcagcctcccatgtagctgggactacaggcgaccaccactacacccggctaattttttttttttttttgtatttttagtagagacggggtttcaccatgttagccaggatggtctcgatctcctgacctcgggatctgcccgcctcggcctcctaaagtgctggatgtgtttccattttgaaaaaaaaaattcctctgtaatcagatatttcagaaagatgttttctcccttttcattgagttttcaaccattttcagttgcatctagtatcggagggtaagggttatgagtacaggttctggattaaattctctcattgtgaaatggggattttagtagagtacctatctcatggggttctgtaaagggtacagagataatgtatctcatgcacttaacatagaaataataatagagccaaccctgtaatcggcacaattccacatactttgcagagaataactctttaatactcaaactgactctctaaggaaggtagtcttattagctctattttacagacagaaaacaaaggcaaagagaggttaacaaacttgccaaagacacaaagttggagttagatcccaagttcatgttcctaaacatgacactatacagaccctactgtgcctataataagtctttaataaatgttagctctctatacacctcacctaaagcttgctaaagagaatccttactaactcactcaatcacaaagaagttaatccggtttataaactcctctccatggcatcagaagacagaagttttgttgttgggtagttgcaggagcagagtcaataccctgtcaccaaggctggcctggaaaacaagctgcaaatgtccagagtgatgctgcatggagggggattctgaaccaacagccaagaatcccattttcaagtcctaactctgccacatgttttctgtgtaaccttgagcatgtcacttaacgactcagcttcaatttctcatctgtaaatcaaggggaatgagacaggataaatggaaagggtcttttctaccctaaaatttctggattctatgagcacagggtctgcatatgtgtccttgttagataccagtgatacattgtaccaataggttattcatagtattcatacttcataccaagaatgagacattcatcactctaactttcttgatattcataagcacaagaaaattgttgtgcttttgaagacctcaaaaaaaggaatctaaggctaaagacaaattttttaagtgtcataatttttttcaagaattaatagtcattgttgtccatattcagttgtactggcttatttccaacaaaatttcccttgcctacatggggcctgagatgctctaagctttcagaaggacagaaatgaataaaagcatttttcctaaagaacagaagaatcatcttaagtgggcatatgtgaactatctagtttcccaattactggcaaacaattttaatcttggactgccctccttgccatacaagtattgtattacttggcccctgtattagttttctatttgttgatataacaaactaccacaaatgtagtggcttaaaacaatataatttttttatctgacagttctgtaggtcagaattccaataccagctcactagactaagttcaaggtgtcagcagagtcatgttccttcctggagactctagggaagaatctgtttccttgtttcatccagcttctagaggcgacccatacaccttggttcatggacgccttcctccaacttcacagttggcagcatagcatctctctaatgagggatggtttcaggatgaaactattccacctcaggtcatcaggaattagagtctcataaggagcatgcaacctagatccccaacatgtgcagttcacagtagggttcatgctgctatgagaatccaatgccatgctggtctgataggaggcagagctcaggcagtaatgcttgcctgctgcttacctcatgtagtgcagccaggtttccaacagaccacagacaggtaccagtccttggcgtgggggttggggacttatgagaatcatgtttctatcagttgttatggcccattatctgctcacttgttctctccatttgcatagataattgacatttgacatttggtaagattttctttagtttcttttctggataaacgtatcacttttgtatgttttgtgatacttaggacataatgatgtcatccaagccaacaagccatgctgaagtaaatgaaaccatacccaacccttacccaccaagcagctttatggctcctggatttcaacagcctctgggttcaatcaacttagaaaaccaagctcagggtgctcagcgtgctcagccctacggcatcacatctccgggaatctttgctagcagtcaaccgggtcaaggaaatatacaaatgataaatccaagtgtgggaacagcagtaatgaactttaaagaagaagcaaaggcactaggggtaagtctatttactaccagaattttaatttcacatttgcaaggtcttcttataagttataggagagtatcatccaattgctaaaaagttctgaacgttattctgaaattatctcttttagacagaaatatttagtctgcctatagactttcccttgagttcatttcattttagatcaagcaaaaatataacaagacacagaggagcctccctagctggagaatttggtaatattgacgtgacagaagcactgttacatctagcttgatctcatttcttcaaaggactttttggacaatctcaatcccatctctggattagttacaagtctggtttttgcataaaggtgaatttacataacaatgaacaatgatggctgcccccagaaaaggaaactacaaatgggcagtctgggaaaggctgagtgtgaaagaattgggggacattccatctgctatgcctctttcaccaatacccttagagatgctacagtttaactgtcaccttacttctacaaaggagactctgaactgactgccttgtttctgtaggcattgtaaaaacaaaaatgccctacttgtaagaaaattccacctgcctaggtagaattgttagtcccttctccgtgctttccaaatacatcattcatcccgctagcacaattccaccaaattatattaagtctctccctgtgaatagctcaaaatgctctgctggagcattccgtaaatgaatgctcattatgtgccagaaactcttctagccatcttactatgtatttcaagttgtgatgttttagggaagtaaaaatgagcataagttctcctgcagcagcctatttactaagctgtggaggtggcccttctgatcctcctcctcccagatagaggaaattccctgctcctaataagccaatgggacaaactaacaccccatacagccagccccacacaggtgcttggaatatcattaagcacaaaggaggtgcaatctctgccctcacagaacttacgccctagagggggaaatcagactgtatacataataaggaagtaaagtacttagtgtgttagaaggtgtcgaatgatatagacaaaacaaagaagtgtaaaagggctaaaaagtactaggcagtgaggaggcagcaatttcaaggtggtcagaatgggctttccttagaacatgacatttgagcaaaaacctgaagttaggagtgagccctgcagatattagggaaagagaaaacaaccagtgtaaaagtctttagatgaaaatgtctttgaggtatttgaagaaccgggaggaggccaataaaatagaacagaatgagtgagggagggggcagttgtcaggagggcagatgagtggcagaggccacaggtggtgaggcctgcagagcagaaggctttggctttgactgggtggatgaggaaccactgaagcatgctgcccggcaccgaagaggcgtgtgataaaaatactttaaaagaatgtgaagttttgttttcaaaatctccagttggcagaagctacttcctctctctgaagatttgttatttctatgccatcagcaggccctgggcatcatgacagtgcaggggccacaggtggcaggacttggcacacctgtaccagtcaactcagaccttaaagtgcttctgtggccaaaaatgcagacaaattgtatgtccaaatttttaagtctgtcctataggcaattttgatcagtagatggtacagccagggctgtaggaggagaaatgagggccagtacaaatccagatctaactgcccctcatcaaggtgacagcaaggatgagaatgggaagtttgtgaccagacggctgaattgctgctctaaagaacagttgtaaaaaccaaatataaagtctaatacaggagttctttaagtgagataggctaaacgtggcccatcatctctctgaagctataagcaaaagtatggtatgtgtgtgtatgaatgtgcaagaataatttttcagggagaaaggttcatggtttttattgatgtctcaagaaacttttagcattgtttatgaaactgggtttttttctaattttaattcgatttacttgtgttcagtagctatttattgaagaaataaatacagcagtctttgtatttgcagtctccctggatagataagatgtaaccatggggaaaaataaattacaaatctacaatcaagttttggaccaatctagaaatgattattcctcagaaatctatctttatttacaatgaaggaaggttcaataagaggtacaaggaggtaaaagatgtataccttacttttagtaatatatgattgataagaagaatgattggtaagaaaatgattgcatacctgcaactttttaaaaaaggacaatatacactttgggaggccaaggcgggcagatcaagaggtcagaagatccagaccttcctggctaacccgtgaaaccccgtctctactaaaaatacaaaaagaaattagccaggcatggtggcgggagcctgtagtcctagctactcgggagggtgaggcaggagaatggtgtgaacccgggaggcggagcttgcagtgagccgagatcatgccactgcactccagcctgggcaatagagcaagactctgtctcaaaaaaaaaccaaaaaaaaacaaaaaaaaaaacaatataaatgaatccaaaatcaagtaataaggtgtgttttatgtcatgagatgcaactgaaattcagaaagaaagaaaaaagattaatttggtgtaatcaagaagacttcatggaaaaggtagagcagagctgagcatgggggaagacagtaccgaataattcagacaggctcagcagtcaatgtgctgcagtaaattcccagatctgcctcttaggaattgtgtgaccttggatacctgatatctttatgtctctgggactcaatccagttgtaggaggattacatgaaacaataaatgtaaagtgttcagaacatgaccaagcacataattcatgcctaataaatggttttatcttcaccaattcctttacccgtaactgggatgacccaagcagagaactgatccatctgaaaaagcagctactgacatcacagttaaagtattgtttttctaatagtcttttagaggccctcagagatgctaatgcatgattaagcagctgtactttctgaagaattcttcttgggccaccccagtaaattctccaaatacctcaaaacagggcgtttcactaagggccttgcactccagttattctagtatatgtcagaatcttcatgacccacctcctgcttcagatgtgtgcctgaatgacaacgatggatctcagcaaaattgacaataaataagcaggggcagcaatgacagtaatgtttcacacgtctgaaagtgaagaagtaattttaaatggctgttttcttttttcaggtgatccagatcatggttggattgatgcacattggttttggaattgttttgtgtttaatatccttctcttttagagaagtattaggttttgcctctactgctgttattggtggatacccattctggggtggcctttctgtgagtagattgctagaacaccagtccttcttggtttataaagtattccctcttggtttataaagtattgctatctccagccaattcacaactcatttcttgataaagccctacatctgagggctggagaatttagaaaaattaacagctctgaatgagggctggagaatttagaaaaattaacagctctgaatgagcatgaaaaaatcgggaactctttcgccattttacctaggagcttattccattctttaaaatttaatcatgtaatcagcaagccaaagttttgatatcctactacatttgagatggaaatgtatgtattgggtggagagagaaagaaaagaaaaggtgattggaaacatgattaaaaatatgcaagtaagccaggcatagtggtgtgtgattgtagtcccagctacttgggaggctgaggccagggaattgcttgagttcaagagatggaggccagcctgggcaatatagtgagactcaatctctaaaaaaattttttaattaaaaaaatgcaattgattatgagaagggatggagcagtaagcctcagaacaaggaatgcttaaacattgtgagttcttcataggccagaaattaaggaaaagaaaataaaaaagaagtcaaggacatatgactgagagttactccagaaaattcagaagtgcgagagaaaattttgagaaggaaactagatgaacataaatagaccaacctttcatataaagagaaattcccaagcacaaccagttaacccatttcacaaataaatttgtccatttccacagtttattatctctggctctctctctgtgtcagcatccaaggagctttcccgttgtctggtaagttagactgtctctactttttgaacccctttaaagattagcttaacatattggggaggaaaattgaaaagctggatttgggaaatgcaaaagggagcacctttcccaaaaaaaatctattggttgccttatggtctgagcgctggggtgagaaaatggtccacacagtttgccactaagaaatggcagagctccatatcctgactcttgaattcacaaaggtgagaagtagtaaaaatcagggttgtttaagctttaacctaaaagctccctggttcagtctggtcacactctattatgggaagtccaaaggagaatccaggagccaggaaatacatactagacacatcagttaccaagtctctactgttcatttgccacttctcagctctgtcttgtatttttatttttttatttgtgctatttcctactcttacacaggttgtgtgttttacaattctttaaattgccattaaatgagtctagcttgttctgtaagaagagtttataaaaatgatgagtaagacaggactttgagctctgtcggtcacagcaccccacctattccaatttcgtggtctactattgaaccaggaaaaagaaagtgatttatcaagaactagagtcaactagagcagaggtggtgtcaagattatatgtaatccagtacaagaaagaagaacggggaaagaggaacacagaatcatgtagctcatgctcttgcagacaaaagaagaataaaataattaaatcaaattaaaataaaataagcctaattctgattaaccactcctgttgcagtccaaaaacaaaataaagcaccctttctctgcatcttttaaggatccttccgtctaattgagattgtcgaagcatagattccacctcttagaggagacagccactgacacatacctaagacaatttttctaagagcttttagagaacttcaggaggctctaaggcacgctgcagcacaagcacattctaaagaactcgactgtgccacccctagcaagtcacctgcggacttggtttcacaattattcttctgcatgttaaaatcctattgtagaaactggggaaagttttgtagtcgcccatacacctctgcccacaaaagcctaaattttctccttctaaatttgggggttcatatttagtccccagagagacttagggttttcattaattcctaaatttttcagcaaacatgttgtgtctaaatactttcccatctataaaatcatatgctatcgtactacctcattcaaaggctgtaagagttgagataatttaaataatttaacacagtgtctgacacagaaaaatgctcattagaagtttgttttttcatttttttataaagaaaatatagttgttattgtgcatgaagcttttagtaaaatccaatagatgagtgcctgctttatatgatttacatttttctacagctttttagaagtaccctacatctaggctgcatacagaataatgtttatggtaattacccagaagggcagaaaacagaataatttcaacttgaaaaattgttttgaaagttcaaaaattaagaaccatgaaatttgattgattcttatctcacttaacttcagtgatcctgtatataattgattttttcctgccatctccattaggtgaaaggcagcctgggaatgaacattgttagttctatcttggccttcattggagtgattctgctgctggtggatatgtgcatcaatggggtagctggccaagactactgggccgtggtaagtatcccatactccaccatgtgcctgctctattttcagtcccgtaaagtgggtctatgttttatttcttaataccgtataccagctctagtggaaaatgttttttctattctagccccacccctagtcatatgatctctaggactatagaataaagtgagagggttacctctacagatagaccgaggcttaaaggacatcctttattggcccatctcactgttaatcacatgaacaatggggaagggtttggataggcctccatggcttctaaaattgtccaaaaattattttcccaacatttgaaattctatataaataaggtagtcaagctattgagtgttttttgttaaacttcagagtaaagtatgaagtgagagggaaatgacagggataagaacatctgatttttacagagaaacccaaggaatgaagcaattgcaaaatgaagcacgtatctctgaatgtgctcaaaacacaatcacacattcattagccttatatagccaagcatggactctgaccttaagaggaaatgggtggcccaagggcaggaatgcttaccatctataaggaatggagcaacatggtataaaatgaggttgggctggaagctgtcatcctacctcaatggccacattaaccattttggtcttcattctgtgagcaatggaaaaccacagaagagtggttttattggtttcattttattttatgttggggttggttttgcttttgcttttcagtttacaaaaagcagagtttattaaattactgtgggctacatatatcttaagaaagacacagaatgacttccttatctatctagaacatattaacattaagacaatatcacaatattttgaacaaataaccacaataacatttcctttatcagttcactcaatactgtgtaagtaattctatttcactggatctcggagtggcaggcttatgaagccatctgcttctcaactaaagggttctgaaatcctgactccaaccattggtataatctgaaagttgtctaggcactcccatcagatgcgtgtcccctagagtatgttctttgaagtgtcagtagtttgaattgctggcacactctttttccaccaagctctgagacaatcctttgttaaaaacataggagagttttaggccgggaatttgaatgatcacttttgtgcttggaaaggacaacactgtttgcagtgtaaggaaaagcttatataagaaggtgtattagtttgttttcacactgctgataaagaaataccaaagactgagaagaaaaaggggtttaatgagcttacagttccacatggctggggaggcctcacaatcatggcagaaggcaaggaggagcaagtcacatcttatatggatgggggcaggcaaaaaaaatagagcttgtgcagggcaactcctgttttttaaaaccatcagatctcatgagacccattcactgtcacaagaacagcatgggaaagacccaccccataattcaatcatctcccaccaggttcctcccacaacaagtgggaattatgggagctacaagatgagatttgggtggggacacagagccaaaccgtatcaggaggcaaaaatagatgagaaagcttctcggtaaataaggcagagtgaagcaagaacaaaattcaccctccaaaataccaaacaaaagaacaaaaactattcaaaaaaaaacagctttcaaactggcatccaagtagagaaacaaatcattctgatgctactcaaagctgaaaaaaagcacagcttttagacctggctcttgtttccctacaaacaaaactgaggaaagaagggaagccaaaaaaaaatactgagaagtctcactaacactctccagtctgtagctgagaaggctggggtggagagcagtcaattctgtgaaaggataaagcaaatcctgtatggtacaagaccatgagtagtacccaggacctcaggagacagaagaaagggcaacaccttcccataccctgcatggtaccctactaccagcagggaatgagcagaaatgcacaggaatgcacaggaataaacctccagccaaggagcaggcctccatactaagcatttagcaggctctcagaagacagaaaaagtgaagtccatcctcgctagcaagaactgtgctcgaagccagctaagctatctctctccctgcaacagctatatatgttcacattcagaaacatggatataaaacaaccgctagggctcaagttgtaatggaagcaaggaagacaaatgggagccaaataaacagaagtgtcaatgaaggaaaattcacctacactgtacctgatcaaatagaaagcctgtatagagttcaagtgagcttaatacttttatttaaaatagaaataacatgattccattcttatagaatgatgctcctctctcttggttattctcttttttccctctcacggcatctttccacacatccattcttctgccttttccctgtacacagagagctaggataatagtcatcaaacattaattttggttatttctaaacactggcatttggaatgatccgttggtttctgtattgcttgacttttttaatgagtagtaacatttgtattaaaaaaaacaacgaggccatcacaaaggaaaaaaactaccttctttctaatatttctaaacaaaatagcctacttaccaaaaggaaagacttctggcattttaaagaaaatccaaaataaattcacactcctctggaacaagcatttgatgatactggaagaataagcatggagcgagttgagtataagcaatagcacatttgatgagtcaataactttttgaagcccacgtgaggccctcctgattagccaaaatttcactatttatttatgatttcagctttctggaaaaggcatttcagccacgctgatgatcttctccctcttggagttcttcgtagcttgtgccacagcccattttgccaaccaagcaaacaccacaaccaatatggtgagttgggtctcttctttgtaaaataatctgaaaatgccctggagaaatacagacttgtgtctgctaaatcctactatcggcttaccagaatgctctttgtccttcactctgatggtaccaggggaaattgcataggattgtagtaaccatattgcttgtttttattcattctttccagtctgtcctggttattccaaatatgtatgaaagcaaccctgtgacaccagcgtcttcttcagctcctcccagatgcaacaactactcagctaatgcccctaaatagtaaaagaaaaaggggtatcagtctaatctcatggagaaaaactacttgcaaaaacttcttaagaagatgtcttttattgtctacaatgatttctagtctttaaaaactgtgtttgagatttgtttttaggttggtcgctaatgatggctgtatctcccttcactgtctcttcctacattaccactactacatgctggcaaaggtgaaggatcagaggactgaaaaatgattctgcaactctcttaaagttagaaatgtttctgttcatattactttttccttaataaaatgtcattagaaac

SEQ ID NO: 5 - DNA, 380963 bp, Homo sapiens
atcgatcaggcgatcgtttgttcagtattgggacacgaaaatggcaagataatgcattcggcagcaaagccatttctggcacactctctctcagttactgcaggaatcagaggggaagcgggcgcctcgaaacctaccacttgctccccagggaccgtcctcagaacctccaaagctctagcttctaatgcaaggcgttcggagctgagggttcaggtggaagtcaattgtcttgagtcacaggcagcaggaacgccaaagaagtgggacctgggagggctgctgccgccgctgctgcatctaaccacggttccccgtccccttgcctaagcctcaccggcacagcgcccccgaaagcgcctagcgactcggcctcctccgcatcttcagcccttcgatcaccgcccgcaccccccaccccccaccgcctcgtgcaaatcgctgatgatttggtcatcgtaatgtgaccggtcgtagtggtttatttggggagtgggggaattggttgtgttgggcttccttactacgcctccctcagttgctgcaagtgaaaatgttcaagggaaatactagtgaaatgcactgatggaatactattaatcctaatgataatggtcccaacgcaggtaactcttaaagaactgagagtgggaagatcagagcaggatttccgaagtggtgccctcttgaattctcattggatcctccccagcagcctaaatcattcttgctgctatatctatcaggatgactacagccttgctcactagttctctctttatctcgttgtcttcaacacatccttttacttctctttgcagatttatctgtattccacctcctgttctctggggttacacagcttctgcctttccccactgtatggggatgtgcagcctgtaaattttcactttgcttaaggatcaccacgaatcaccccccaccattccccacccccccatataaagcattttcacattctgctttcttgccttgggggttcgtggctctctgtgtaactggtttttacttggttacatgccaccaggaactgctgattattttaaagtcctactaccctgcagctcactactttaccttgatttggaagatcatggaatatctatttgaatcctggatgtatttttctcacagtcttcttgcttcctgaaatttcctctggtaagttattctctttatctgttactagaaacttaactattgctatttttaataagctctgttttgttgaagtatttcatttttcacatttttgttactttcagaactgaaagatccatatggccatatttattaattagtatgttagtggcaactgcactgctaagacataacccatgtaatgtattaccccaatatcccatgtattaccccaatatcttttaccttctttatttttaaaatatttgtcctcatttatattatgggttacacggacattaatcgcccccacccccattaacccttcttggcacacattcctgtgccatttgaaatgtcacattttataggtttatctaagagagagcttaaaagagaccttctgacaattgcaaggtctggaaagttcgctagtcggatattcagaaggttgttcaggtcagcatttgttcatgataagcaattacatgactgaaggaagactttgttgcaaagtgtatttttatgaatttagcaagaccttaagcactaaaatgccactgaatggtaggaagaggactgtgagttttgagggcaccatttttttttcttaaaatatttcaaatcacacataagcacgttattttaggcattgtattttaattcaggcatagtatttgtcagtacatttctgattttgtgaattagctggtgaacagttaattggacacagagtactcatttcagagaggagcaatcagaagaaacccctgattatcttggttctgataaattgaaattcaagaatagactttacatgaaaaatttaattgcctcactcttcatacttgtctgcccccaacccttgtgtttaataggcatgttaatatggtcagtgccttttgcttttatgaacatttctatggacttaactgacaagattatcacctcctcttccgtatagttgtgttgagaaacattttaatctttacttttacttcacaattgacacataatgaggaaagcacgatattcattaaatgccaaacctgcatgtatcggtaatttttaacacccactgagggttttctctgaacatccgccccccgccctcaaattaaggacaagttcctggtctctacaacatttccttttcttgggatacatggaggtaagaacctattgttcacgcttttcttttccttttttttttttttaatttctgggaaataactattcttgtcgtcattgatggctgacgcgacaacccaagcaatgtttttttaaattcaaaagcccttttagctcccagacataaaagtactccagctgcagcgtcgccccatccccccgtctcgggattcaagggcttttcccccttgactcccaccgagagggaacgggggttgagactgtggtccgcaccacttggcgcccctcacccgtcactaggtcactagtttctacctggtctctttcccagtccggtcgtcctgcctgacaagccagtgccatcagagtccgtgacttcatttgaagaaaggagggcttcatataattcaattcaaacattctctttggaggactgctgttgttgcgcaagggtggagggaggaaaaaaaaaagaaaaagaaaaaaaaaactttcagtacagtcagatccagtaaggaacagacagtcagtatttaggtaagtgcgttttgctgtattatacctgaagctcaagcgtgtgaaagggaaatttacatctgaggggctcccgctgccaagaacgttttaactggagggttatcaacaggcgactctgcgtggagatttctccgcagctcacggcaacgcctatgccacctgagctcagggaacggaggagagcaaggtgcctggttgaccagctggccccaggcttggtgttgatgtgggaataacccatgcgtgtaggaaaggtgtcccctactctgacctgctagctcaggctctgcactcagcccctgcagcgaacgtgtgcttggtgtgggcatttgcagccccatagagtggggtgcgccagggggtttccatccttccagaatgctccatttccaaccttcctaagccaaacttgagcaaacctcttctgtatgagagaatagacttaagatctctggagtctcttagtacctttttgcgttaatatttatttattttaatgagctatatttaacgttagtaaacgacgattcctcagaatgcctgctttataaaaccctaatcactgtccttgtctgactgcgaagtagggtttagaactgttgaatgacttcttaggctctgtgttaaagtattattgctgacggtcactccttcctttccttcaccaactcccaagaatctggagggcggtggggagagcggaagagagttagatttcaacttgaagctagagcttggaatataaggttgaagttaaaagcaaagagtgagggtttggaatctgtctagcttatattatacccactttaaagttggccttttatttttattttcctctttctggaggtgggggtgggaagtaggaagatctgggactgggagcgctctcttccagagtccaccggagagggggtggtgcttcttggccgctggttactgctggttccacagccaaacagtgacagagagtttaagtctctgatggctgttctcctagtccccaagagttgaaccggagaggcttttactttgcaccaggtcgagaacgtgatcagccctttagagaaggaacctccttgtaacaggaattctgctgggaaacgccgtgtaggcactacctccgaagataagatgcatgtttggagctgtgtaaaatgcccactggctgtttgaaagaaggaaaaggtgactagggttgcaaattaaccttagtatcacttaaaaatattctatctagtcaaatgtacgtaagcaaagaagagagcaccaggatataaaactgccacagcagcttggaagacagatgattcagattttggggactttcttttgcgtgttacatagatttgtttgtcatcatgcagttaagcaggtaaggaatgaatgtattttcttgacaatcatataacttgtgttttactatcgtgatgttttttctgtgttgcaagcaatggaatatatgcattttcagttggtcctgctatgatgcataacttcttaatattcacattcacgaaacagggtaaaacagtttagatgtttaacatgcattaatttaactgcttagtgtgcatttatttaaatgtgtagccatgttacaaaaatcagaaactggaccaaggttagaggaagaaatgggaagggtagagagttagaagaagaaatgtataatcttaataaaacatggaagatggcagttgcagaaatgcattaaaaacattgcttcttcttaaggtcccagaccttaatatataaaggacaggtgaagaactattaagggtttcttgaactatcaaattaattctgactactcgagagaactgttttgtaggtatttccattattttctccaccttaagaaaaaatacatgaggtgggggtgggttgggttgtaaaatagaaggaaaaaagaagaaagcttgcccaagggcagtgtagcgtacaaccccagtatgaaaatctttgggtttagaaaaccagttggaaaactgaaaaaaaaaaaaaaatagaaaattatgggttttcttccccaaataaatttattttacattttcagttttgtagattgagcagccaatagatttcttccactatcagatttttctcaattaaaatgacaaacacattctgaatactcaaataagctttgttattattattgatattgttttgttattttttgctaacatgttgaaggagcctggactttccacacagtgaagcaaaaaaaaaaaaaaaagagaaaaattactaaaacaccatcataaaactcttctatttgttaataacactttctcttctctaagaaattgtattatttaaattatctctggaaatagttttagtacttatatttattgatgtagatccctgatcaataatttttctgctagtatggcttactgataaaacctggaagaaataagaaagataattgtaactttgggttgtaaaattgcaaagttgtagtgcttttcttagttggatgcaaaaggtagtttttcctccactagggaaagtaatttgtcaatgaattctaattccctaatacttttgcatttaatccttagcaattttattgtagtagatatgctcattgtgtatatatgtttgtgtgtgtgtatacatatatatttgtatacatgcacacatttttggtggtgggagaaggtatttattttaaatctatgttgttttaataatgttttccaaatgaaatagacatgataccatataacgatcaatttcattttcttttaatcagataatattacgtgatttcatcctctcataggatatcttatcttaagaaattcatcatcatcatagaaatgtacattttcataaactacaatacatcttgattttctccatgcaaagttattgtacattataattaagtaaataaaacctaagtaggaagaaaccattgggactcaaagtgtgtgtgtgtgtgtgtgtgtgtgtaatttctaccattatcttgactcctagatttgaggattctttaaataaaagtgtatttatttgcagtgtagtgtatttgtgggtttctctccacaagtacaaagaatgcaactgttgggatttccaaacttttatgtttcattatcaacctatgattcagtttcttatgtttcctgtatttatttttagtttttccacattatctttaaaagaggcagttatttactagaataagagtctgaaacattttgtaatttagcaaattgcatattaatattaaaagagttcagacgcaaattggaatatgacaccaacttgtgttatctttgttttgcacacatattgtttttagaaaaaaaatattttttcttgaaaaatatcccaaagatttttggatattatgattgtgtgcttatgattagtgatgttctcttctaaggcttttaatgtttttttctttcacatcgtaataaagggttattgggaaaagtagagtgcttgtacacgtagacttccttcctgaatttcagttctagttctacctggcattaatgtactcctggtaagatttcttgaccactcttcatttatttttctcatctctcacatggaggaaacaatgcctacctcagagagttgtacataaaatgacataagagatatggatgctttaaaaggacaaatatgttatgaaaacaaaatatatttttcaagggataccatgtaagtttgaatttttaattagacatttttgataaacttgtatctccacacaataaacaatgttgactcaacttttttttaatgctagtatcaaatcttcttggtcagtggtgttatggtgtcaaatgaatttaataaatatttgatattgattaagtataacagtttcaatatgtgtaatttaaaaagcttgaaataatacacttcctgaggcatattagttgttatttatagtatatttacctttgcttttattcagtttggggtacagtcacctttacaaaatagttgcttttgattggtttctcattgttatttaatagaaaggacatctgatttcttagcagatttatattgtcaacctgatgatctctactcttaattgggaacaagattaaaatattttcatgtaatcatttaaaaatggagaaactttagacagtcaaacttctaatttccaatgctttttacaaactcatataaagtttactagaattaattaggatgacatccggcatttttggtgttttaatttagcaactacttggataaacttatttagacacttcgaagtataactctgtccactttcttcatgcactactatgtgttctgtataactttattattttagtgttaataattcataatttttaaaggaaagcaaaataacaaataatctatgtgaatattattgattgctaatggataatcttagttgctaaaaggaggaggatagtttaataatatttattctattttaggaaatattctatcctgttttttgaaaatgagcctctgagtataaaatttaataatgaacactaatgacctttctactgaagatatacttggaagtcctggccaagttcttaattttttattttttaatagcatcaaatagccaccataacgattttatactggttatgaaatatcctcacaaagaactttgaaggtttctgcccctatcttttcaaagcataaatataagctagcaagaatatttgtatccaattactcacctgcagacctatccaattacaaagtcttcataattactttataagcttactttataagcctttaatccactcctctacacttaatgtttaaaataaagtattcattcatacagttctggagcatttcccaatttcatactcaaaataactaatcaagagtaattaattgatgctctaataattgcaataactcaattatgatttactaatcaatatcttttcccaaaaattgaaagatatagcataaatatttataatgagtcgattggattacttgatgttttatcatgaaatacatgtttgtgttcaaattttgaaatgtttatattcaaccatgattgtatcaattgagatggtgaaaaatgacatgcaatctactaaactgagaaatcttatagattctcattcttctatttcattgttattttcaataatcactattcataatttgtcaatgttttattgttcaagtttagagttaaaaagtaccctcagtgcaacctatttttactatttttttataagtatttgttttaatgcctaaaccctaattaactcagatgagatgtggttgcctttaaaagcacccaaagcaaaacaaattccttttaatagctaataaagtagctaccatattatagttccagcaaattaaatctataaagtacacatttattgattaaattaataaatacatgaacattacattagaatttattatagttctctgccatgtaagaattattctctcataatggtgtgtttcatttatattccattatagatttattgtgaaagaatacttatagatagacttatttttcctgatttctgtgagtattagccaagctcatcaggattaagcttttttttattaacttttctggactgttgcatttgttaattttaaaagctatctctaaaatattgcactattaaaaaacaatctagagttgggaagaccagaattcagtaaccatgcattttagatttttcagtgtcaaatagtggccagtatataactacaatgttattttacagattcattaaattctcactgtcactaataacaaatattttctttgaaatgtttcagatgctgttcaaaaatgtaagccagtctaaaaaatgtgattaaattaaatcaaaaactaaatttagccattaaagcatgagtttattcaaatatcatattaaaaagcacatatctgcatgaaggttgagtatgattgggttctatataataccttatgcatatatttttaagacaaattttttgtaactgcttttaaatattcaatttaatgttgctcaccaaagccccttctgttatagctaaactaaatatagaacaaaaattaataaaatcaggaagttcctgggatagataataagtaaagtggttttcatgactttagtatggtaatatttctgatggtttgaaacgtcagccctgtaaatgtatatacacagaagaaatactgtttttttcagacatgaacacttcttaaataattataaatacactctaaattggtagaagaaaaattatgaaaaattgaataaattatgcagcaaagttgcacaaaatactattttaagataattaatgcttgctttcttaacatttttgcatataacgccaagcatgttaatacatagatcaagtctagcttattgaaaatattaaaattaaatgactatacttgagtttacagtaatagaatttcttattattcatccagaccagttcactaatatataaagacacagtaatagtacattttataaatgtggtaagtaatattgtcaagattataccaaacaataatgaggaagaagactatatgtttcaaaatggagtaatttagaagaaaatgaattatcaatgattagtaccaacaactagaaagtgtaattttttcctaaatatcaattttactccaaagagagttttttaaacaacttgttaattttattaaaagaaatttatgggtaaacaattatgaagaaatctgtgcttatcagatgtataagatactcatttctacttattcaaagtttcagcaggtaatttggagtaactcaaagacagcattattatttttcctaacgtgaactagagaagtgaatctagctttctctgtgaattgaaacttaaacttcatacctaagaaaaaagggtctcctgaaaaaaaaaatttaaaggacattcaaagtatattttagaaataatttttacacctttttaaaattaaattaattgttttatgcaactaactcacttttgagtggagacactttatggattcataagcctcctctactcccaccccccaaaagatatacaattttgcaatccataattccttgtttgagaacttttatatcaaagtcagattattgtcttattaagtgtgtagctatctttatattttggtcaaaaatgtaacgctaatatgtttgaatagtaacttacctatagggaaaataattcagaggattcttgtttccttttagagtgaactctggcaggtttttgtatgtatctttcatccagccatgaaatgaagaaattttaacaaatatcttgttcaatcaatttgaaagacgaaacaacaaattacaattgtaagataggccagaataaaaatgaaagatcacttttgtcattatatgacaggctttttaaacctatcattcatagctgttaattaaggaaatcaattctgatttcaagtaagaatcagcagctccaataataagtgtttgattaactgttaaaatatttctttttaataatctttagtaaggtaaataagtttattatcatgattctttaattacagaagtgatataattttgaaatgctttcctatattttagatatatatttgcatcagtcaaagctgaagacaatttgctcaagatctgaaaccagacaattattaactattaattaaaatgtatttattactaaatattggtctcagataagtccagtaacagtgattgctgtaattattgttcagaaggtaattcttgacaagttcaaacaagatgattttaaaaattaccacttagtttgtgcatgacatgctaagaatagctaatatttaatagtctctctatgtcagatatcgtaatgtctcattttaattttctttcttttcaaaatttgagtgattcttttttatgtaaagactgttatcaaaaatctctaaaaatgtttttcaaaaatgtttttaaattttaaaaatggtttacttttcttttgaaatagtacctcataaccttttgagtttgaagacagtttgggctattttagaagttaaattaatgtattgacaagtggtccttggaaatgtcaagtgttctcaaaattgtatattggggaatgataaaagtagatgcttattgtaagaaagaaagcttagttagacaccatgtaacttttggagacattataaggctaacctctgggttaaaatttgggctatccaagcctctctgtcaactgggtaagttgtgctaaggttttctaaagaggcattctttaattagaaacacccagagttctgacatgctttactagatggcagttaaggaggcaattggaaaacagcatataaagatttaagtacttggtgttagttttgtttgcttgttgtcgatcacttctgtttttgaccctttttttaaaaaatgtacattagatgtatgatgaattatgtgcactggtgtaaaccctgggaatatagcaatgaaaatatgtaatcattgctcataagatgcttacagttttttgctatttgtagtacactttttaaaattaatctactaaatcaaatttaatgcttggtcactcattttatttgcacacatgtccaattttgatactgtaaatataactctcttagagagaagagggttgtctaattcttcattatagagaaaagtcaatgaataatgcattttctatgtagggtattaaagaataactattaaagagaaatggagaaaccaggacatttctgaaaatagtcataacaattctcagagtgatgatttagtggcattttgtgtgttgttgtgttcgttgtgtttttttatctccaaaatatgttggcttctttttaatggaaacatttccaataatttttttaaattataataattaatgaaaaatcagattaacattacgagtgttttatttacaaatttattttttattcaatttattattaataaactccatttatttaggaccttctacatgccaagttctcttgttggtgccacagagatattagtgtataaaacagagacaaatctgcctcatgttgcctaaactacagtggaattgttaccatgtgaattgaatgacttctgtaaccagtaagaagacaagttaaggggtttactaataatatttgtaacacacattcctcggttaaaaatgttgaaacattttcatttccttagaaattggtaaaaaagaaactgaagattattattttgaaattctgaaagtttcttcctgtggactagataagtactacctctttttatcttagtaaaaagttttactgaaccatctttgaaagctccttaaatgtaatatttatttgtcagtgatttcagagtacatgctcttatttatgcttctctagaaaataacttctaagtaaacagctcatttcaccttgtatgcctggttaactccagggtaagcctgggagcaattacagattgagagatttccatttggttaccaaactccaagatttctttgtcccagtattgagaattgttcttagattatattagtaagccattatttagagcagtatgaatatctttgctgaaccatttttatacttttagtttttatttgagatcattgttaaagaaaaaaaaaaaaactttgtaaaactgaaattgagcacactatccaaaagtgcaggggcaatattgtccacattttctttaaattgacacttacatgacaaaattcttttaataacaaaaagcatttattatccttgcaagtggaacactttctattcttagattctgccaggaaaggcaaaatcatgttgccagtcatagcaacaattaaatcttgatatctgcacctaacatttctacttcatttctacatatcgttttaatcttttttttaaaactgtcttctgttttactgttttggtagtaaaacatattaattgtcatacattttctgaagctgttaataaaaaaattattcataatacttgttaaagacttgtgggatagaccttattcaaggtgggctactttaatggggtttggtaagtggaagacagctgtttcactcaactctgaactcaacaagaaaaagtagaatttctagccaaggagcaggatggggatcagtggatggaaaattactaagagaaaacattaggggtaagaggggattctggctaaactgatctaacaggattcttgctaaagacaggccagggtggtcagatatcaccttcaggatagtgaagaatgaggaacccaaacggatatctaggcggatcatatattaagggtgaagattcaaataaaactgacttagcaggattcttgctaaaattggacaacatagagacaaatgcagaagctcagaagtcaggggctgagaactgagttaacaggagcctgactagagttaggtccagaaaagagtctttgtcaaagcgttccctatactttatattaaaattagattttccaatctaatatactttctaaacatctttcatttggacttcattctttagtgcctgacaatttctttatgaattaaaatgaagtacaatctgaatcttacaatgatattttcttatatgatcatctacgttgaaacaccatgatattttatatttatcagaaaacctaggtgattcttgtatttggggctcttaagaataatttcccctatgtgctgggccgacttaaggaatggaacttaccttctcttcattcttctaatcagttctaccattaggtattagcatttaacttcctctttgttggtaggacaagactgtattgacaggatgaagtaggagattagtttccttagcagtacacatttctcagaggaatactaaccctcattaagttggaaaacaaagctgtaattcagggcactatattgcctgatcagctaaaataaacaagaagaataattttctggaacacaggtttagcagagttatatgactagaagaatgcatttctgaggtcggtattaacttgtataatatgattgaagacaaggaagctcagttattttgagaaagaaataaaaaagaatagaaaaataaaaaagtgcaataataatgcattgctagcacattaatataatggaaatctcctgctagtgcaagcatatataataaagcagcccaaaaatatttattctttataaagttaaaaaataaacaggagttcatttcagtacctgttccaaaaagttactatgcctaagacagtgcattacgtagtaggggctccagggattacgaaaacataataactgccagcaaatctctcgtaatctggtcatatgaacaaaggtgttaaaaagaataacaacagcatattgtaaaattttacaagattcatgaatgaaaatctatccagtctctacttactttaataatttatgacctactttgttcaaaaaatttaaggtagttattaatacaccaagacatttgtctttgaaattcaaaagggatttctatttcaaataaacatccatttctgccatttttgtagcccctcattagataaattcagtttgctttgatgcttggaattaaataccatttttctttaaggattatcactaacttttagtttacttttttttttaaaaaaaaacactttttgaaagacgtaatttttgttataattcctagaaatattcagtgataatttgtctttttaaatttcagaattattttattcccatttttacatattattgtttatttcaacagaagataaagataaagcaattatttatccatactcttgttggagtatagaaatagaatagcaaaatcctacctatttataggacgaatggcctacattgtgcaaaacaagatttcatatcttgaagaattatctgacatctttagaaaatacagtagcaaattttagtttgctggctatctaaaaattcattacctttaaataaaaaatgtaaagattaagaaagaacaatttgaagttgtctgaaatctaaaattatagattgtaatcagtatttcactaaagtgtgaagttatacatcattaccaaaaagcaatgatacaaattattgaataatgaggctctcattcttttactaatctgactacagaatatatagaatttatgaacatccaaaaatgaaaatctgtgtttttacacatgtaaaaagataatgtattaccttatttatttatgtttgaatatgttcatggaatataatacctgagtattgactgatgtcctaaaagagcaatgtctttaaaactttttttttgtacccaggatatttcttggcaaatgatgttataatttttcctttttttttagttgtagttctgaattttcacgctattatcacttaaaataatacttgttagaaatgaccctcatatccttatatccttgtcattatctattgtatgggaacatgaaaaaacagattttaattaaaattgtatgattgcattttagcaaaatattaagtgtcatctcatttctctgaaattttattatgtctcccattgttagacaccaactatgtaagtgttgaattgtcttatttttagtagtactataaagcaatttataataagattgaataatcaaagcctactggattaatcttacaatttttctgaggaacagataagtaaattaatccagtttagccatgattatacttttcaacccaataaatatcatatgtaatatgaaaaatgttttctaatttttgacttttcagtacatgttttaaaataaatcacatttagtagatttaaactatcactttaattcaaaatattaaactatacaaagcaaacactcaatgaaaacccataatatgtagttactcagaacacttgcttgcttttaatagcttgagataatagtattctttcatttgaatttttattttatgcaaaggtgacctcaaaaattctaagaaataactttcaatttgcaattggttatttttaggttacagtagagtacaacaggaaaactatagtattcagtttgacttcaagagtacaaatgagatcttaatatatactacactgtgctgctgagaactgaaataagaaaatttcgtgaaatgcttggtatatcaaaaagattaaaaaggtgttaattttgttgtgaagaaaataaaaatagcatttcattttatcatcattttctttacttttctcacaggtagtcagggagatctcaatcaaaataatcctagtatatgattttccaaatggagaggaacaggctattcaattcctgtttctttattattattctttaaattctcattgtgctcctcaattagagggggattttggtttggctgtttgttgattaggatctaggtttgactttcatatatagtttctgtctttagaaattgaattatagaacataagtgaaaaagtccttagttttccagttgtgcataatatgataatctcttattgttatgtccaaagctaataattaataataatactttctatttttgtccttaacattttttaacattaagaatatcttgctttgggccaggtatggtgtctcatgcctgtaatcccagcactttgggagactgagatgagtggattacctgaaatcaggagtttgagaccagcctgaccaacatggtgaaatcccatctctactaaaaatacaaaattagctgggaatgatggtgcatgcctataattccagttacttgggaggctgaggcaggagaatcgcctgaactgggaggaggaggttgcagcgactgagatcgagccactgcgctccagcctggcgaaactccgtctcaaaataaaataaaatcaaaattaaaattaaagaatattttgctttgatactctttgagcttgtcaatatatgtttacaatctggtcttaaaaatcattacctcataactcaatttgctccctttcttcaactgccaaagctattttcatcctgacactcagctcagatgcagattcggatacagattctctgtagattctatttccatgaagaataaattttctttttattatatggtcttgccagccatatcacaccaccagttgcagttgcaccctaatttagtacttatttcatcaacatttattcattcactctaacaatacttatttatgcaggtttatttcagaaactttggtgactattttcttgtcattaagataggagcaattatttttctcccaaaattaatctaattgaaggaaaggagatgtgcagggaaatagggcaaacatgcaagcaaatatcatgtaaatgtaccatcatagggaaagtaatgggagcataaaaaaatgaccaaccaactttgtagggtcatgaaaatccttgtgaatgaaatgataatctagtctgaggttttaaggtcaatgttaggcagatgaagagatcctagtccaaacagtcattcaggcagaggaaccgcaataaactaagatcttggagagaaaatggggtgaagatgaggtctatggtcatggctgaaaaacaaagttggtgtttggttaataactctcctggcacatatacataagaaagatatggatagagagttaagcaaggaaagataatttcataagttattttaaagagatcagatatcctgaaacaaaagtcattacataattgggggtaaaggatttgcatgttcagatttaactttttagtaagatcactctgactgtagtaaaaagaacagattggatagagccacatggctagtgggaaaactagtcatgaagctattgcagtaatacattttagaggcaaagttggtattgttgagcgtatactatgagctgatcaagtaaaatgggggtggagaaaaagtggtaaatcttatatttagggggaagaatgtacagaacttgaggacagattgtatatgtgagtgagaaggtaggtcaaagtcatgtttaggcttaaaaatttgagtagatggaagtatcatttagtgagataagaaaaccagaaaaaagtttggagaacgtttagttttccttgacagaggtatcatgttctaacagaaatggccacaggcagtatgccctgccttccacatggccttcctaaaccggtaagttcctgaggctagaagcactatctttattaagacttaaggcccacctctgtctcaaaacttatcatgatattttgcacattgcaattgatcaataagatttatttttttattctggttttctacattattacttctaccaaattggaattgaaacaattaataaactatagtggaaaaagtattgaaaatttatgttaaaatatttttacctcatctaccatttatttacttacacaattatgtatttagtattcatttatttcatagctagtatttatttaaatgaataatcaaaaaataattattatagttatatatgattatataataatgctgtagattttaaacagattctggggtactacatataaatattttattttataataaataattctaacatttataatttaatagatttaatagaataatatgtatcgtattatttgaaagaatgtgactttttaaatagttattttgaatattggatattttattttgaagattcatagttttacatttataagcttcagtattagtaagcattaatgttaagaaactattttatagagcaaagtagtatttgctcaagagaagaaatttagagaatggttgcagacattgggcaaatcagccaattttctttatacctttgtccaatacttaaaaatttatgagagggagagagacagggaaagagaaaaagagacagagagtgataatatggtagaaaaaaaagaaaacaaaactggtgactctaactgacagatatgtaagagtttaccgtatcagtctttcagttttccatgggttctacattattcaaaatgaaagtaaatatgtttgatacaatggttttctgaaatgactttgcatattcaagttcttcagcaggttttagttcctgagagaatattttggatatgtaagcagcaaaaatcagtccaaatgcaaatacaaaaaaagaaatgatacagtttgcaatgttaattgtttaacaaatagtaataattatcactggacatctaattcagttgtggataataagatactgaggtttaaaagatgcaccactatgacatgacccaccactttaaaggatattaagtttaattcagtgattccgaatattttgtttatatctttgtagtttcagttctactggaaattcacttttactgttatagtaaatatttctttcataaatttcaatatttatgaatttcaaatatatatgatatatcagtattttagataaaagtaaggtaccaccaccttggaataagactactgacagctagtaagaaagaataatcatatttagactatatattatacacatattatttatgcatttattatgtattatatgcattagtatacattagtatatatgtaacatatttttgatgtattttatttctgcacagattgtcaaggccattgaggatttgcaaataaacttgtatcatgatgtggtcttcacagttatttttttttttttttgtgagaaagaatttaagagtaggacctatactaaatatctgcttttcaaatagatatttcaatatttatgacttattttttatgaaaaaaaccataaatacttaattaaacaccatgttttaaacataaagtcatgtttttaattttgtattgtttttaatgttttgtttttttgtgttcttcattctcttttatttctctcttttatataaaatcactctcccatggtccagaaaatatggtgcattgatgttctcatctctttagttggccagttagcctcttggttatgaatattaaattctggactattttgcatttccccacactatagaaaaagtgataaattcattattagtttaataatttctatcctctttcattggaacttgtgatttctctttcttggcagtatatctaagtttagctgttcacctcacttgtcacctcaaaatatcctaacactacatcgtaacaaacaaactctatttactaaaccatctctgacacatggattaatatggttataacccaaaccaaataaagcaaccaattaaggtaattcagtaataatttataaattagtactcatgaaaatatgaattaaatgtacaatgatctacttttgtgacaaaccaggtaatgaagctcttctgatggtgaatattgagtttaattaccacttgtcctaaagatggctagaagcttacatgcttgccttaggcattctattatgacttttctccctgtcatgtaacttgtgaaaaaagttcttaaacactatttcagtataactttattgggatatctcaatttgttcattacaaaatatctttataaagttcttacaaatacaatgattttaggatatcaccaaaattaacttaatttggggtaagattgacattcctatgtgttaacaaactttcagaaaaaaattatttctgtacagaagtggggaacatgttcccaaagtcagaagtagaaaaaacagaaataattaaacccccgaattatgtgataattacctcataattacctggtaatattgttaggtagttctctgcacaaaattaaagaaaacctttctatcttcccatatgttaaaatgcataacaatgtgaaatgatggatatgttaaattgttccactactgtaaccatattacatcatgctatacgccttaaatatacacaatatagttttttttttttttaatgaggggatatgaagactatgaaacaagctcaacacatttgataaagaaagtgataagaaagtggttctgggtaattcacctattgaaaaattacagaattgtagaacaggacctcaaatgccatctaggtcaactgtatcctacttttaaaacactttgtgtattacaaaaatcacatgtgtgagtacaaaacatttgtttaattttaaggtgtataatggcatggcttcataccagtataaaatataacttaaaactttaccacatgtccttaccatatggtaggcactattctagggattttacaaatattaactcactctatttttataatagactgatgaggtgacctctataatagtttaggaatctgacgcacaaaagaagttaagtaacttgcctaaagtcaaacatctatagcgttagtagaagggctgggtgtttttgttttgtttttgtttttgtgtttttttgagacagagcctccctctgttacccaggctggagtgcagtggagtcatctaagctcaccgcaacccctgtctcccaggttcgagaaattctcgtgcttcagcatctagaatagccaggattacagatgtgtgccaccctgcctggctaatttttgtatatttttagtagagaaagggtttcaccatgttgtccaggctggtcttgaactcccaacctcaggtgatccgccctcctcggcctcccaaagtgctgggattataggcgtgagctaccgtgcctggccagggctagaattttaacatcagcggtttggctctagagtccatttttttaaccactatgaatattgtctcttgacgttatatatcctaatttgctatattggttgttgggtttggagaaaatctgatttcattttcaaagaactgttttccaagttatttattaggatgaaataagtactgtttgaattttttcaataatattcttgttcacatctacatttgttaataagagaacttcatttagatggtgtgactgaagttttattcaattaagaaacacatcctttcagatgatatatgtaatatggacttgagtagtggtttgaataatttattctgtctttatgaaatgaaaaattactcatttaaattaagaaattatatattctaaaaataatgattaaattttgcccgtttaaatgtatatgataagcaaaataaaaatagtgtgtttaacaaagacgagtaatattttttagtcacaggattattatactataccactacacataagaataattgtgtttataaatgaaagtaagctatattttaaaataaattgtatagttctcataagaaaaaatatataaaatattttttcagcaaatttgaaagttaggagttgaatcatttgacaatggtacatttatatagataatagaaaaaagcctagaatctccaagctcctattccaaaattcttctattataatattccttcttatagaaaatcatttttaaaatgtcttcacttgtaaggcttcccatgttgtttacaaaagacggtacgctttaatcccctcagtgagcaactcatatgattgaggcaactcatacagtatgtgaggaatgtccttttatggatatcgtgatattaagagttcactcattgtatcactgctttgagctacttcagagccccaaaattatttctctatatctctcagatagaaatagtttaggattaaatacaaataatggggttatagctaggaaagtacattaaaaccaccagtgttcttattcaaataccagagaaatatggtagctactattactgatatatcttaatactgtaaatcttaatctttttttctaaagatgttttgctgagtaagaactcatgcaagtaaacctttctcattagtcagaatctttgcactctgtagtgctatgtgctatgaataatacagtttgaaaagctgatgaggatagaaagaaaaattgaattcaaatatttttagaattttctggtgtagcatatagacattgcatcagcagctttgcataaagtgtcttacactgtaccatactgggattatacgtcttattacttttttttgaatgattatactacaatgtatgcagtttcaaagtctatgaatagtctgcattagcttaatttatgtgcatataattttggaggtatgactttcttatgaataagacagatgcacatttaaatctttaaagaccctagaaataatgtaattatgattttgtttaaataatcagatatgcagttttttcctaacagaataatgaaaaaaaatctgggaaaagacattactcctcacatccactctcacacacacacatctgttcatgtatcagtctgtctttctatcatctctctgtctcactctgtgtctgtctctatatctatatatatctataataggtatacacacatatacacacatatacatacatatatttatgtattcttaaatccacagttttactccgtgtttatgtagattatggaaataactacatgaatatctttgcttcatttaaagcatttatttaagataaatatacaataaaattaaatctagtattaaaatttgtaacacaatttatgaaatatatgaaatacttgaacttattaattatttatttgcatcagtccaactttataaaacattcaacttctgatttttgctcaataggctttaatgatccactgaataaaattgttatgacaaagtctgttatgactcaatgtcttattttccattaatataaaaaaggaacaaagtataaaagatatacagctctaaaaaaataattttggtttgtattttattatctgctgataatactaatttaaaacaatgatattagattaaaatttaaaattagccacctcaacaccttaactgagagaaaggaatcttctaggagttaactaattgcctgtgtattttgtctaggtgttgagggaaagctgagagaatgaaggctctaaatccccagtggaagcatgatatggcgaagcagagctggtgctgaattgttctctctgatggctctatgggagtggatagcactgagtcttcattgctgggttttagcggttgctgctgtttcggatcagcatgccacaagccccttcgactggctcctctctgataagggacccttccatcgctcacaggaatacacagattttgtggacagaagccggcagggatttagcacaagatacaagatatacaggtatgaagcaaagggaaagcaattacagaaatatcatccttgaaggttgtgtatacataagtttctctaagggaaagtttcagacgggaaaaaggtattatcagaagggttgttatttaccatgcaccatagtaatgttttcttgctattcaaagtatttcttatagatgtaatatattatgataaaaacagataatggtgaccacttgtctatcactcccaaatttaagcatgctacactgccttaaagtaaatggcaatgtatttggaagccgagtttcttattttaaatagccaaaattttaaagtgaaatttaaaaaattgcttttcctttctaccttatacaatgctatgttacctttttcagcctaaatggaaatggtatcttctactagtcactgagaagttgagtcacctcatccttttttacctgaaaggtaattgtacgttcagaagctaaaggaaacagcaatggaataaaaacaagtagcagataaataggacatgatagcaaagatcaaagaaatggatgggataaagatatatgatctttaacatctatcaatgttctatgtttaaaatctaaataagttacacaaaaagagtaatatattaaattcaacaaaggttgcctgttcacctgatgtcccgtgaatacattaagtagaagagtgtacaagtggttgcctgatggattagattatattgatctatgccatgaagaacattttatgtgaagctatcacttcaatttgtttattggtgatagacttttacaattcctagttaatggtttaacatttataaagaagcacatttgttgtgtatttttgtgtggctgtatctatgtagatactcctatataaatattttattttatgttttatgtgcaccagagggcactgtgcttcatgtttgtctgtagtcatttatacagcattatgagaaatttataaatcctatcagcaatgtatatttacagaagacactgaatgtcctgagcaagttccatgaagcaccacacaattattgctttgccttctcaaaaataagaaatcccttattccatgcagtcataacactgtcataagcctaatgaaaagatttactctattttttaaataaatgaaatgacgaggctgggcgtggtggctcatgcctgtaatcctagcactttgggaggcagagacgggcggatcacgaggtcaagagatgcagaccatcttccaacatggtgaaaccccgtctctactaaaaatacaaaaattagccgggcgtggtggctagcgcctgtagtcccagctactggggaggctgaggcaggagaaaggcttgaactcgggaggtggagcttgcagtgagccgagatcgcgccactacactccagcctgggcgacagagcgagcctccgtctcaaaaaaaaaaaaaaaaaaaaaaaaaaaaaaaaaaatactaaagtttttctttctgaaaagtagcagaaattgtcaacattttatgattctgggttcatttatttttatgtgtgtttattgatttagccagtttttcctcacagattgagtgaagctacctgattttaggattctaagaatgtgttagattttagcactctgcaagaggatttttaacactctatcacacaaactgatgccagagcatgtctccgtgatttatcggcatctctatctggaggtctaaggtgctgtcttatgtgtgattgttgtggtttagcttatcagtcaatcagctgtgagtagcaaacatggcttgacatgtttttgtttatgtttttttgggacggagtctcgttctgccaccaaggctggagtgcagtggcacggtcttgacacactgcaacctccgcctcctgggtttaagcgattctcctgcctcaggctcccaagtagcttagattaataggcgcccgccaccgcgcccagctaatttttgtattgttggtagagacgggatttcatgttggtgaggctggttttgaacttctgacttcaagtgatccgcctgccgtggcctcctaaagtgctgggattacaggcgtgagccaccgtgcgcggccagcttgacatgtttttagaggtgctgggttgaatgaaagaggcattatttggatcacagatgttaaaggtaatgaacaaaagtgctctgaggtttgtttgcaaggcgcatatattctgtttggtttttatgcaactcacttcctgaagaccttcattagccctgtgctacttatccttactatgtctttacctttgtggcttgaataaacatgtaaagatattaaatccatttataaacaatggagctaggttacaacttcttataaaaccatttaaacattgcaaatgatgccacggttattgatagttgctataaaatgaacagtataatttattcattagggtacctttagttttagtaaagcaagttttgtctttaatatttgtcttcaaaaatattttagaaagttcacttttcattaatgtttgccataaaaatatagaatttgtgagtacttaaaacacatagatggaaaattaatgttttccatatttaaatatttgatttgtcattttaaagattgtaatttcctaaagtgatcagcccagttctactagtgcttattattactatcatcaacacattctaggggaatattgcattgacattgtttctgaaaggcattagttagaaatgtaaaacatatcaaacctgttaatataattaggtcaaatctattttcacttgtctttcttcatttcatcctcttctccagcaacatatttttattttcactccaaatatagaacggcaaggacacaacaatcaaaaattgctaaaatcatagctagggctaagattttttaaaattgtcatcatgtttgaaaaagtgtgtttttgtcaactaatagaacttacatttatgtttttaaacttgtgtatatttaaagttatttacagaatttgtatttgaaactacattaagacttaaaagattattaatttgtggattgatcactgagttggaagatttgttgcctcatttaaaaaaaaaaaggcatttctaaaagtgtttttagtttcagaaagtgagctattcctggagaaattttgtctactctgccgcatagaacagggggacacttggcgccttagtaagctggagccttgtgtttgcagttgtattctagaaacactatcctcaggctgtaagcctgtcaggatatgtataatcttctctaggctgtggaaatctttattcttttaatacattagaggatctctagacaagggactcatttttagtggctcaaacttagatgcagttatcttgaactactgatatgagttctaaggtcagaggctggcaactttcattatcataaaataaacatttcacataggtaaatcttcagatatgatgactcaaaacaaaaattttttttttctttccctaacttctaccattctttggttaaccacatgtgtaagtgaattattgggaaaatgatgttgattttcttataatttttcaaaatattatacagacatgtcatattatcacaacttgatgtgcttcttcagagcactcaaataatgctccaatttgagaataggagacaattgaggtgaatgttatgacttactggtcttttcagtcatgttccttgaaaaaaaattatatttaaaaaatgactaaggaaagacaagatggtctaaaaagagttaaaccactatatggtcacttcatatgtgacaggattataatgaaatcatgtgtgggaaagagtgaacttttgaataagtgtttctttatatgggtatccatatgagaaaagcagaaatttaatcctttcttcataacatatatataagcctattttatatggaataatgatctcaataggaaaggcaaaaatactaaatttctagaagaaaacagaggaaaaaaacttcataatattgggatacataagaatccatttaagtacaagttattaagaattaaaatacaagtatttttcatcaggaataagaattggacaagtatttactgataaagagttgtttttaagaatgtacaattttctataataaaaactatgaggattctggtttaaaatgtctttaaagtagcaatccagatagaaatcacttcaaacttcctattaaaatactgtataaattatcaggagggaaaatgaaaactcataacaacacagaaaattatggttaatatgtaaccttctgccagaatatgagaggcattgaagtagttataagcttcttaaaagttataagactagcaaaacatattttaatacttcagatgagcaagcccaaatgcctcaacaaaggtggcacttaccctaaatacagaagggagctgtgtcattaccatcagctaactactcagaagcccagagttggatcctaatagcaacttcgcagctccctctctacgacaggatcctaccttgagatgtagccacagaaaaatgatctctctctctcaccatgtttggaattggcacatggcaagaatgatgtggtaggaagatatcaaataaggatgccccatgtaatatttgagacacaattaaaccaaaaaataaagaagcagaaaatatttttctctatttaaattttaatttatttgtttgccatgtatttttatttgctacatttggcaactctggaagggaatatacgagtactaatattaatgattacatatctatgacaaggaacaaggactttcagaattaaattaccaacagggagaggaatagactttagtgtaattaatgttgtttcccctggactttcttgttcagattgtcagagaaatgaatgtcagagtaaattccgcctcagctatacactgataattaagcccaaaccactacatatcagtgcagtctcctgcaaaccaaagaaggatttggaggcactgatcaacacatcctgtttcagcaaaatctacatattgatagagccctctctattccacataacaaataaaataatacagtaatatattatacatattatgtacatatatatatatacatgctataatacaacagtagctttggacttgcattacatgacagtatgaggttaatagtagggagaccatgcttttactgaagggagaaggtaacacatttttcaaaatagctaaacgaaagaaataaatatcttaaagattcagtaggagagattacctcttcatgatccctttccctgatatacacatacacaaacaagcacacatgaatgcctggtctcttcaatagattgtaggaaattgtggtatctctagaaacagaagaccatacggcaagaaaaaaatagggtgaaaataaaaaggagtttggagggtgtgataatagtgcaaataaaataaaatgtagccacacaaatgtcattcacactaaaaattatcacacagagtttagtgaaaaatagtaaatattgttttaaaatttcaaggaaatgttaaaatataattcttggaagagacagtatttaacaataaagagaactattaagtttaagtgacccaggtttataaactccgatgatataaataaatacttagagatctgaatttgagtaaaaccttagaaaaattaagcagagagtggaaattcaaatttattaatatttccattttcaaccagaaaaattaagtttaaaatattattgccaaccttaacaacttgtgaatgtaaaaagcttcatgtgtattttgaaaatttcctgctacatataaagacaaacatataaaaagtttaaaaataaatgaaaatgatagaattatcaaacttgaaacaaggtgaccagaaaaaacaaaaatatagcaaatgtaataagtgtaaatatttccagctctaaaaataattatcataatcagacttaaaaatttctttgaatgtgctacttttagcaaagttaactaagacaaaattagacccaacataaaaagtaaaaagataatcgattttctttaatgccatatatcactatacaatgaatagtaaattatacatagatcttccaggagaaattaaaaaaacataactgtcacaagaaactttaatctgctattttgatttttatggatgaaatagatcacacacacacacacacacacacacacacaaaccccaagtgtaggggtgttaagaaaaaagattatttaaatatagaatttagtgcaattgtactgatatatggaattttgtgcactaaatatgtaacatacatcttaaatacggtcatgcaatgtatactcaatttgactttattctaacccacaaagaaaaattttaacataataaattaaatatatccttattttaaaaattctcaaaaatcttaagaatgcaaatttaaaactagatattaagaatacaaatttaaagaaatcaattaaactgtttgctcagaaaactgagaattcagttttaatagtactacatattgttttattttctaaggatattcaatacaataggaaattctttcatattccttcaaatttaagtaaaacaaaacacataaaaatttaaaaacataaaatagtgctctaattattttaggatggtcttacttttttaatatatacaaatgtatactaaaaagcctacaagtattccacctaaacgtttgaggtatctcttgtgtaaaggtttataggttttccctctcacttttttgtgatgagtatgtgtaaattttatgatcaggcaaaatattagctgttattaaaaacattaggatgagctataatttatttgaaaagtcacttaaattatgatataccagggttatttaagcaaaagttaaaaatagagttaaaataatgaaacatactttctcctttgagccttaacactaatttttaaaataattataattaaacatcttcgtatgtgaaagacagactataacatacgtcagaagtgttttggaatcaaatctatatgtagtatatatatatagagagagagagagagagagctatagggagaaagagagactgcaaaacgtgtgtgtgtacgtacatttatatatatatattttatatatatatagtgcaaaagtggtgtttgtacatatatatcaaacaatatttaacttcaatctctttcccttttccacactagaaaagggaaagagattggaattatttcttatttaagaaattaaaaagaaattaatacatcttatttctagtgtataataagctattcacaaatatatatatatatataagatgttcaaaaatgttggttaaaaaaattatactatatatatatatatactattttacactatatatatagggtaatagtctggtctatatctatctatcaatccatactagaaaaggaaaagagattgaaattaaatattatattttcattatgtaattagtgctttcatgttatcttacttactcctataaacagctgtaataatttccattttacatattcacaaataaaaacaagaacatgctgaacttttgtttgcccctcatgtccctgaatttctctttcatgtatattgcactaaaatcaccttctaacttaaattatgaatacatggaagacagaactttttcatctttctgttttatttaattttatacactttttctttttatttctatctttctatctgtctttaatttcctagagcaagccagttgttcacccatcaaaggcactggctttgcatttggatatgctggatttaaagatcaagtgcatcccaattaaaatatttcctcttgactataagcaaggaggcatgtattcttttctgtctttgacaaaaaccaactgtattcactcagttttgtaacttaatttctcagacctcagtctcctcatttgtaaaattaaggctgaactagatgtctgtagatcctttgagctataaagttcaattttttggatatcaaaagcaaaatggaaacatcagaacaaataggttaaaagcattaaaacaaaaatgtactgtggttaattcttatatcggcatttatctgcaaaaatcacttacaattacttcttcataaataatatctaagaatcgcttatacttttatttgtgtatattggaacataaattgtgtaattacttatctttcccccaccaatctaattttttcctatttcttgtatgttatattgaagaagctatagtaagaaggaagctttttaccctagttggttggtttactataaatcactacactaactgttaacacacttggtgcaatgataaattaagaggagtattctaggtagtgattttaaataatcatcaaaacacattaataaccaaaataatttgaatatatgtgttcaacaacaatattgctatatctctaattttgagattaaaccatataatacgttttaatttttgttatttaattataattcacaaatgaaatatacagttgccattgggaaaatttcagccagaaataatatagaaatataaatagtttagaaactataatccactgtcagaagagccagttcttaatgagaattgtgtataatcgttactataaattaaaaatatggcttttgtaataattaaaacaatttataagtaataatttttagtttaatagtgtattcatgtttgttactattataatgacaaaataaacaagattgctagttaacacaattatttacagaatagtaaacaacaattatgatgttttggcatttaaacaaatactttatttgattatttttctctatctaatcccattttgccaagcactctaattcttcattttcattatctctgcggtcttcttccaagtgaaattgccagaattatcaggcttgttctcttttgttttcactctgctggagcttttgaattgctaatatgtatttttttaatgggcaccatcccaaaaatgtgaaattgaaaattagaggaaaaaaactgggttttagcactttgaagggttccctgacatttttcttgagggtgtgtgtgtgtgtgtgtgtgtgagtatgtgttatgcacgtgcgtgtgtgtatgcgtgtgtatacttaaatcaaatttaatgagaaaaaagtgatttgcattatgatgtttctcactaagttacaaaagattctaaaattacattcattatgtcctttctgcttttatataaaaataaaatagcaatgctgacaatattttttaatcgagtttaaataaattagtcctaatattaagttataatattatctctttcattttaataagcacttgtgaatgaaagtaaaagattagaccctcattttcaaattgtattttaaagttaaagctgaaatgtgtactatttatggtttataatagattttaatttatccaatatccataattagaccaatctttatagaagtagcaagttttttggttttttgaaattatgctgcctatttttttaatttccccaaagtaaattttttaacttccccataattttcaataggaattataattccataatctgccttaggatataataattttccaataaaattcagcctctaaaagagtcttacaccaattaattggtaatatttgttcatgaacttgcttctcttactgacgtgatatgtgataatataaagatgttaaaacatgttggttgaaaaaaattacacaaaggacgtacgtatcttattaaatattccattcatttatttctccaaatttcccagtaaacaaaggcaatataaaaagcctactatttttggccaggcgcggtggctcacgcctgtaatcccagcaccttgggggggccaaggcagacagatcaccaggtcaggaattcgagaccagtctggcaaatatggtgaaaccccgtctctgctacaaatagataaatcagctgagcatactggtgcgcgcctgtaaatcccaggtactcaggaggctgaggcgggagaatcgcttgaacctgggagacagaggtttcagcgagctgagttcgagccactgaactccaggctggcgacagagcaagactctgtctcaaaaaataaataaataaaaaaataaataaaaataaataaataaaaagcatactatttttatataaacaaacctaggaaatatattagtaagccattttattttaaatgtaaaagctaataactgattattggtatgaagaaaagttctctgaaatttgaggaaagagactttataccagtgaatggtttgtaaacttgggaaacagcctttgtacacaaaagaagaaaattggatttaaataaaacacaccccattaaaattcattccagagaacaaagggattttttttttttttttttttttttttttttttgagacggagttttgctcttgttgccccggcaggagtgcaatggcacaatgtcgtccggtcactgcaacctcctccacctcctgggttcaaactattctcctgcctcagcctcccgagtacctgggattacaggcatgggccaccaccccccagctaattttgtacttttagtagagacaggttttctcaattttggtcaggctggtctcgaactcccaaccttaggtaatctgccaccctcagcctaccaaagtgctgggattatagacgggagccaccttgcctggctgactgttcatgttttatagcaaagttcctgtccacgttcccaatcaggtctgtttatagaaagaatgaagcttgcttaattcagattagtcattgcagctgagttctgattgtttgatacaagttgggccttgattggccagggtaggtaagttctgattggttggtttccaagccccaaactagaagtcgctgtcagatgtttccaactgctggtggtgggggataaacctctcagtttatcttggcaaggataacagacattggtttggcaagccaaatgcggaaagggaggtcctgtgatacttttacaacatctttctgggaatgcagagtctgtgacccactgctccctcatgcaggtatggctgcctggttctgtttcaactttgaataccccagtttgccagagtgtccattttgtttgccagtagcagagatactttaaactagggaaagagaatgttttatactcttcagttccttttaaagattctcagagttctttgaatattttcttttcttttcttttcttttttttttttttgagacggagtcttgctctgtcgcccaggctagagtgcccaggcacgatctcggctcactgcaagctccgcctccctggttcacgccattctcctgcctcagcctcccgagtaactgggattacaggcgcccgccacaatgcccggctaattttttatatttttagtagagactgaatattttcttttagtcaagatacagaaggctggacaggcgcagtggctcacgcccataatcccagcactttgggaggccgagtgaggtcaggagtttgatatcattctggcctatatagtgaaaccccatctctactaaaaatacaaaatgtagacgggtgcagtggcgcacgcccatagtcccagctacttgggaggccgaggcaggagaatcacttgaacccgggaggcagagtttgcagcgagccgagattgtgccattgcactccagccttgggcaacaaaagcgaaactccgtcgccaaaaaaaaaaaaaaaaaaaaagatacagagacttccacaatatttgaaagtatttcactattttattgttaaggcacctatacctcaaacccaaaattacacacacacacacacacacacacacacgcacaggcatgaagaaaatacacacaaagtaaccacacacatttgaagaaaatacacacacacacgcacaggcatgaagaaaatacacacaaagtaaccacacacatttgaagaaaatacacacacacacgtaatcacacacacacacgtaagtaccttacttgttttatttaaatccaattttcttaatttgtctcgaaagtatgttacgtatttacgtgtgtgtgattactttttgagtattctcccttcatttacacataggtggaatctacctattcttttctcttttgaaatagttgaaaagagtcaaagagaatggcctgggctttgcatatccttattgtgatggacagttccctggctgctcatttaaacagatattagtagctaactaattaaactacctctcttgtcagccagaaattaacaaaggcttaaaaaattagcaaaatctctgttttgctgtggccttatttgctgacggtcttatcttaaagacacacacaactatttcccaaaacagaatagaaaattagatttaaataaacatacctcattaaaattcataaagtattttctcacgaaatgtaatctttcaaaacttaaccattatatgaaagcaaatttttaaaatacaacagtaagtttaacactcattggaatacatctccatgtttatcaatttaaaaagtaacagactataatccttttttgcagtgatcgtttcaggatttagggttttgttttttttcccaaataaaacaaaagattctaaagattgaaaatgacattaaaatgtatctactcaaagtaatgatctttaactcatgctttctaattcccatttatagcataactgtcaagtgatcatctaaccattctttaaatgtttcaaattactgggagcaaaccacattccagggtgtaccttctaatcctatcccaattctatctcttcaatgtttaatccaatgataacactcagacttcacattactattctcttttattgaagtactattagggagaactagattctcctactcttgagagcattgcatgtgtccatatctcattaaaaataataataaaaacatatttgacctatttgagaaatctgtcaataattttcttttcttgaaaattatactcaaacatactggtttattccaaatatgcacattttaaaggaatagctcctatgtattcatttgcatcactgacaaatatcttagcagaataataataaaaaatatatcctcaattaaataatgagaaacctccaataattagacaaatttcaactttttgtacaggttcaaagccctttatggaaattgctaaattccaaagctttgaaactgaaccattttcttttagcacattttgctttgaaacctgtcctgacttggacagatgtgagatatagtttttatttttgtgttgaatgcagatattcacgttttattgcaaggatgctgatgtacttgattatatgttactgccttacattccattgaaaatattacataacatacactgtgtgttcctcatttccctctaaaatatggaaaactgaactctgaagcacatttgacttcaggggcttcagatacagcactgtggatctgtattaatttctaggttttttttttctagcttctctattaggagattatatttgaccaagtcaaatgttgccataacattcaagtattttacagaatactgactgatcttgttgctctattagtttagcagtcccatctaaggagaaaataagtgaatttcactatttgttttttcttttaatctaacttttaaagcctataaaaatacaatctaggaccctccttttcttttttgtatattagaattgtattctaaaagatttcagttttttattagaattgttttctcatcagtactttgcaaatgtttacttaggttgtgactttgttgtcctcatacttcattgataagtttttcaatcttttattttccaattgacttttaagttaaatcatttatttttgtattatgtcagtttaatccagctcatttggactggagaggcgaagacaacacatagttggatagagtgataagttgacgttatagaactgaggtttcatgcttttatcgaccatttactctttgtacaaatgtataaaattttatcagccttctgtctttgagtcctcatctagtaaatgaagatgacagggaattctctaagtttatttctcactatgacattccattataattaagttttactggtcacctttctgacataatctatttgataatgttgatatgtaggataacatcactgtatatagaaattaaaagtttctaaatatgccgtagaacggactgcaggttttatttctttaaggtcaatacttaaattgttttgagtatagtttggtgatttacataattatattgaatgaacactgtggcttaacataaagatatcaaatttttctaatttctaaaattcgtgtgtaatttttttcaagataagtcctatttgcttgtaaaaagagaaacgatttaaataatgcaagagacatgaataaaacatatcagatggtaaagaaatttccattgttggatttccttagattatatttttagcaaatcatatgaatggattttcttttattttacaaaaattacaaatagctgtttcctataatcgaactttatacaatcaatgaatacattttatactacattgtacctttctaaaaatctgatttttgataactactggaagaaatacagtctgttatgttagcatatcttatattaaagtggttattcaaagtattgttctgtgaaaactaatgcactatgactagttcttccctttcagtcaaatcaaaagaatcaaaatgagaattaaaaaaacttgcccacgacatgtgaacttatagcttgagtcctgtttttgccattgtatatgaatgctttattataggaaataaaatttattattgacattataagaggttaatataatattacttaaaaactcaaattttctacttctatttctggcatctgttaagaattaggctcacattgcattctcttccttggcactgttcacggtttcagctttactgtttaggctttaggttatctgtcttctacttctggccccagtcatgccccttaattagatcaccacacagctcaacatctttctaccattaattcattcaaacacccatacacatacacacacacacgtactcttacagaccttcttacaaaaatttggaattagatgctatttcttctgccttggagtaaaattttgatctggtttttaaagacatgacttatttggttaaatataaaatagtcttatgccacgcttttgttatttaacacttcaaaattaaaactggagattcaaaccaaagtaaggtactgaggttatataaaaaaacattatattaattaattaatatacccagtttcagttgaaatactcttcattttccctttattctactattcatatgaacattatgcctacttatgagcaacacttttttctctcctaggaagagtggaagataagagtgcagggtaagttacatttatttttatgtctgttgacctgcattgtatcagagtcaaaagggaagaaacgtactcacctacgcctctcgccttttgggtcatctcccacatagacacacaactctgaaaatgacatcattagacacaatagatagaaagaataaacttaaatcagaaaagagctctttaatttctactctgtcataggcaactggggacaaaaatgaaaacagagaggcctgaaaatactagtggaatatctttctggggtctgagattgaatcctgtgaaagagaacaagtaacttccacaatagaggtgatattaacctatcctttactcttcctgtcacaatctacattgataactggtagtgtgtcactattatggcatcttgagagggaacatttactcttccttggttagtgcctttctccttattgtcaagggtaactctctgttcacctttgcatttttgcttgacacagcacatatctcaaactaacatgccattcactaatcaccatggaattaaatttagtgtatatcaaaattttctaaagggggaacctttgtgaaaattatccagtggctttaatattaaggtgcttatgtatttcatataaaacatcctcaaagtcagcataagctacaagtcaagcttcatgatggctttttatagctacagtataagtttccccaaagtcagagtcaggaagttaatttttttgaaaatgcaattttgaaaattttgttaattgtgtgaccattatatcatcctgttttacatatatcgagagaagtgatgagagatagagagaaaaactgttgatagtgttattttatatctaaataaatataaacctaaaaataatatttgagattatcttgtataatattttagttatttttatagtttttaattatagaaatattttaggtatttttataattattgtcaaagcagctaaaggttacatttaatattgtacaatgattaaagaatgattctatagtaacttttgggatgggaaaatattttatccaatttcagttgaagtactcttcatttcctctttattcattattccctatatgggaagatattttagagattattaacttggaatcttttcattttacagttttgattttattgtgaaatcttgaggagtgaagttataatttttcaaattacctatacataaatataacccactgatatttgttttagaattacttttgtaattatactatataaattataaggaaaaatttgtaacaaaatcccgtagaacgttatcttttgaaatattaactccttaactcctctacaatatatgttatattttacaagtctcttaacataaaagtaaatggattaattgcatttccatgtatttttatttaacagtttttttaacagtatttaacagttaaaatatataccaagaagtcattaaacattttcaaaggtaagcataaaaattacttaaacaaataatgaaattgttgaatatttacttttccaaatcacatcaagacaatctgttgataagacaaagctgattttattcttaccactgcacgtgagtgtattaccataacagagactttaatagtagggcagagaggagaagggaaaattgaaacattaattgaagttttatgttttttaagtggatttattaatgtgggcaatgtaagacttcattaggattagataaggaccctggatatgatagtttaggattactggacagagcaaaagaaggattaagtgaagttatttgaaacttaccttcctaggcaagaatttcctggaatgataaagttatgtcgtttaagatgttaatgtagacagtaggttgtttgcatggaggctgtttgtgtctcacaactctgtggttttgttggaaatggagaaaagcccaaaaagttaaataaattgtccaaggtcttgtatctgttggataagagaactagaaaccgggtattttcacaagtaaaatttcaaaatatttcatattttgattttttgctgaaaaaatccattgaagtcatttactttttaatgaaaacatggtaatataaaaaccaccatttaaagaagtagccagtttaaacaatattgattatacagattgctttgagcaatactcaggtgaatatttgccttcataaaatgggcagatattgtaaaacttctgtaacttatattgtaatcgcttatgtatctgatagtattacccaaggctatatgtttgttgagagtaaatatagtatcttgtttattattatagtttcaggatgtagcacaaagacatgtgcataacatatgctcaataaatacaataatgacacaataagagcttccaccagatggcacccagtgtctgtagttcagattaacttatctgcttattttcagctatggtcaattgagtcaattgagtctcatgattctatttgcttgatatgattttcaaccaggcatatttcctacatttaattatttgttaaattgtatgagatgaattattcagataattttatttaagaatagacattttatttaagatcattttaaaaaaatgatcataatgcaccgttatatgacccacatatttgctatttataattcaaaaattataagagatgcaaatttggatctcctttcactctttttttggatcttataatttagcttgaataagtttgtcccataggtatgggtgatttttatctaagaaggtcatgggatgattgtccttttctaagattgttgaccacatatattttaagatccttggctctggcgttgtccacctatggtttggttcattacactaattgctccctctttgacctttggttaatctacataaaatcagaacagaacaacaacaaaaaatatgcttctgattcaatcgtcctttaattcccatttgtctatatctaactaggccaaatgatgtcctcatatttaagcatatgttaaaatataattttaaaaataggatataattatgactttcctagaaacatgaaataagcagggcaaaaattttatttaactcattgatgtggaaccagtattataactggatcgaaggataattcaatcaggaatactgaagtgaattcacaaacagatgggtaactaatttactccatcatggggaaaaaatgattctctccctaccttacaaaatctattttgtctatggacaaaatcatttgcattttatcagttatctaaaattcacagggttgtgaaaagctcaaaggctatgggaagtgcagcctccataaaataatataaccagggtagatgtgcttagattatgccatgtttctcgtttctctaacaataaacttgtcatgctacaagtatggtactggaggtaaggttttggttgtacaattgattttgaactaaatcctggtaagaaggaagacaaatttttatttacccatacaaataagtttcttgctgtgaaaagtagagacagtaacagattttgaatcctggggtgccagtaagaattagatgtcatttaaaaatgttacattttagtttacaaaaacatacatcatgacattgttgtgagttagtttatctagaagattaaacattaatataaaataaacaataattctaaccaactaaccataataatattttcctaatttgttcacttattcctatataattattttttggtctgctcgatctcacgttatcaatctcaagaagctctctctgcctcaaaaaaaaaaatgagttctggaaatcctgacacagttcagtaatgtaatctgaaagttgtctaagtgatgtctattcacaaacttcttagccaaatgtctattttttaaagtgtcaaaagtttgaagtatctagctcaatcttattccacacattctggctggtagtctatatacctttttcaggcaagcatcagaataaaacaatatttgtagaggatagagatttaaaatggctgtgttaatgcattattgataactttcaaatgtgagaggactgatgcagtttcatagtaggaacaatttcattgatcaggaaatttgtttttgttgcatgcaaataataaaaccattccaaaaagaagttaaacaaactatactttttttctattttctccatctaaaataatcaaggacatcatgaagcagcatgaagtcttcatagagcacagaaaactatactgttaagtcaccaaatctctgctatctaggcagattaaacagaagatttagaatttttacattaggggcaaaggcattagttagtatagcatggaaggaagcccatcaaattgaacaaactttgcaaatatttaacacgttcatagtttttcaggcttgggtattataaatcaaggcaaataaaattaattttccaagtttttaccttcatggtgcttgttcatattccaggaactgacactttactgtaggacaaatcttggggcttctgaaaggtcaaaactaattttataataatagtaagatgttatttatattaatatgaaatgcattcctctttgtatgtttaagagaaacaataaatatatatatatttaaatttctcagctttaatgtctatagtgtaatgcctatcattataacctaaatagacagaagctctttgggatcctcaataagtcctgagaaagtaaaagagtcttatggtaaaaaagatcaacaaaaaaacttgaaaaagaacaacaaagaaacctaaagaaccattattttgggctgggaacggtgggtcatgcctgtaatcttagcaccttgggaagccaaggtgggcagatcacccgaggtcaggaattcgagaccagcctggccaagatggtgaaaccttgtgcctattaaaaatacaaaaattagccaggcgtggtggtgggcatctgtaatcccagctgttccggaggctggtgaggcagaatccaggaggcggaggctgcagtgagtcgagatctggccactgcacttcagcctgggtgagggaacaagacttcatctcaaaataaataaataaataaaaataaataaataaataaccatttctttaggtgaaactaatgtttgctggtaaaacaaaaagacatggttattttactctgtcaatattactcctagtgtggtctttactactcatattagttataatttttaaccaaagtaactaatttcgcagaaaaccggggtggggataatagagaactttctgtagctcatattttagcagactagaaatgctcaagaacacatataattcaactttttacagcacacacatctttttctcacctttataagtggcaaaaatttaacatgttaattagcatgaccaaaacttatagcctttatattgtaaacaaaaattaaaaagtatatgaaggagcaattacaagattgatttctacttttcagaaaattgcaggtcagaagacaatggaacgaggtagataggtagatagcataataatttcagattgtgaccattgctgctaggggaataaggagaactgaaaggggaaaacagaagggaagtaataggaatagaaatgggtctaaaaagggttatagtaagagatggtatctctgaaaaggtgatactgaactgaggcctggaatatgaggttgggccatataaatgctgaaagggaagaaaacacattccaggcaaagaaaatagcagaatcactcatcagaaaaaggacttggaagacaagtaacatgatgttagagggtgttaatcttagatgaggttaataagaacccagaaagtagatcgtagaggctttcaatgccacagttaagttcaggtattattccaaatgcagtgggagatcattgaaagtttataatcagagtataattgattgatctgtatacttcttaaaaggttccttgacagtctgaagagaatggattacagagcaaataatagcagaaagaagagagcagttgcaatatttgcagtggtctatgaaaagtaggtgaagatgtggacaggggtccataaaacaaaactaaaaacttccaccttctttaattctaatttggaacaatattccgaactactcagttcgttaatgataactaggttaatgaaacaatgtattctaaaatagatttttttggtctctatttcttttcaataaatttaacactataattgatatatgtttatgaaacatcttataaactatgtatttttcataaaaattaaaagcaaacatagactatgtttataattgatggatacagacaactaatcttttgctacagtcccaaataacatatatgaccattaagtgtgaattttaggtaaatttcagcttctggatggttaatcctaaactgtaccagatccattattttgtttgttctaatggcaaatgcacaaatttccacagatggattaaattagtattcagctgagaaacatgaaaacaggatcatgcctctatttagtcctgtagactcagaagctttaattcagtcccacctcttaacgtggcagtagaacgataggcaaaagcagagagttcttatcttgttcaaaaagtatcagccccgaaatgccatgttcttttatgctgaaattatagacactaaaacacacatggtgccttagaggatggaaatttcagatggatagatggttaaagcttaataatttaaaatcatggatttcacttttgtattgtgtgatatggcctctgaatatcaccattctttaatggctcaagggtgagtggaaaattttgaacaaataagttgccagctgcatgttatggcccttaaactaacttattttagaaatagaagaaatatacctctaaatggcaaccagaaattgcattgttttcaattggagtagaatttcatgactgcactgttgtgttgaagatgcaatttctgttttttaggtaagaaagctatatttactgggccataatttgactcatgtgaatgaaggcagtagtaaagtatggatagaaagattatgttttataaaaattatcagggatttacatatttgttttttgcagttttgtttatttctaatgcaccatttttcctatttgtgtatatatatgaacatgtttgttaacggtgttctcctagtacctttagtatagtccttttaatagcattatttggttcttattttggagtgaaataaatgtacattagaggtcgtaagtttagaaacaattttttcttatgaattatttcagcattagagataagcttttgaataacattttcaaataaaatgcatcatattgcagactaatattgatatcatttgcattatctggcagaaaaacaaatacagtgacacagcagaaaattctctttaaaaaaactgtggtttacttctacggtttctgagcatgtgtgtgttcattttccccagggatttttttcatttgaagtgaaatcttcacatttttcagtttaataatttattaatatgattattttaaaataaagaaggccaggctcacacctgtaatcccagcactttgagaggccgaggctggcagatcacttgaggtcaggagtttgacaccagcctggccatcatagtaaaaccccatctctactaaaaatacaaaaattatctgggcatggaagtgcacacctgtaatcccagctactagggaggatgaggcaggagaacagcttcacccagggatgaagtttgcagtgagctgagattgtgccactgcactccggcctgggcagcagagagagtcgccgtctaaaaatataagtaaataaaaataaatttaaaaaacaattaaaataaacaagaacacttacaaaataaaatttctggatattttcttttaaccttgcatacaaatatttgagggtgacctacacatagagaaaatcaaatgcatttacaatcaattaattaagcaatagccatactaaatgtattagtcaaattttcattacatttctggaattatttttattaaaaataatgttatgagaattcagaaatgcactatgcttttggtcatggtcctcaagctaacattctttctagagagctaatacgtagtatgtcataaattacctatttcctgagaccttccagtaattaccacattatcctatatttctatgagacattatattactcaacaataagcttgatgagtaaaaaaaaaacactttatacaattatcatttgaacaggataaacagatttaagtagtttacagcaccattaatttgatttcttataaattatacattgggattgaactgtttcaatttataggttgactccaacagtgagaaacacagcaactggattccttgcttcataaagctaaattatggtttttgtcaatactttcaacatttcacactgagaagaaaatgtagtatgccatcactgcttttgaatctgatgatctttgaatgtctttgagaattggaaattatcccttataatagttgaagttgcacagcttaagtaagagaaactcacgtgtaataccaaaatatattttaattatacaatttagctatgaggctttgacttcttccctcttcctacattatttctctacccaaaattgggactctgaactttaccatctggcttaggcacactgagccccttgtataaatcttacctcagtgcaaagaaatgtagataaaattgccccacattgtaggattgaatctttccctcctatatttttctaattcaccttgactaatccttcatttctggtgacctgtgttctatctaatttctaagaataagtaataaactgtaagcagtattagcaattagctctatgtcatggttttctcttttaatcacattgtgcactttatctccctctccctctcaaatttgactgctggcaaagtgcctaatgaagagcaaaactgactgacttgagatgtttgaaaatgttttttctctgattcacctaacctctggtaaaagtcaaatttgaagtaaacatctatattttgtgattaatgctgacgtcttcatggggaaaaacagatgagagtaggttaaagtgaacaagtttttcttagacgtgtcctaaccttcaaatgtcaagaaagtatctatagatataaaatatttctagaatctcatgtaacaagattatgttttgttatgttccttaagtatatgtttgagactgtaaaaatatatactagtaacataaccctttaaaaaccaggtagatgtaattaaaattttggctgggcgttgactcacatttgtaatcccagcactttgggaggccaaggcgggcagggcagatgacttgatgtcgggagttcgagaccagtctggccaagatggtgaaactgtctcgactaaaaatacaaaaatcagccaagcatggtggcagcttcctgtaatcccagctacttgggagtctgaggcaggagaatcgtttgaacccaggagatggaggttgcagtgagctgagatctcctcattgcactccagtctgggtgacagagcaagactccttcacaaaaaaaaaaaaaaaggaagaaagaaagatgtaattaaaatttaaaaatctttagataacttgatacaattagaataatatttacagtaagtaatgaatatgtctactacaaacaaacagtgcaaaattatatttgctgaaaagtaagttttcatctcattttggaactcaactcactggttctcagttctttattaggggaaaccatgacttcattatacaaaagtctaccatattttttgtagtggttgcatagtttccaaattatgtaaaaaccacaatttattaaaaacatttttctagtgctatacatttaaattctttccagtctatgctgaaatgagtatctttgcacatatgcctttgtccacaggcactgacatatctgtagaacaagtgtttataaagacaaaaaattatatgcattctcaattttaatattgcttccaatggctttataaagtgacagcttctttaaatttgtgtatctttattgtgagctgagttcacaaatcttatattttcttcatatatgttgactgaatgagtaaatgtaaagtagctaaagcagcatctgatttatagcaagtattcaacattttcctccattattttcagcaatagtttaaaaaggttattttgaacatatttttgtgatcttaaacctaaggcctttaagctttgattttaacaaacatgtattgagaatccaattaaatgctttaaattgtatttcaaaaaatttacttggaaaatattattgcaataagtttaatatgcatttgttttattagtattattttagttgacccataatcattgtacatatttatggaataccatgtgatattttaatacatatatacaatgtataaagatcaaatcaaggtaagtaggatatgtatcatctcaaatgtttatgattgctttgtgttggaaacattcaaaataatatgcattttattaaattaaagaatgaataactgggaaatagctgatggaagtaattgaaagaataatttttggtgggtgttaaagatagaatcttgattgcacaatgttttaaatgaacacaaacaagatagaaatttcagacgacctctgtagtgtcaacaggtagagaataagacaaggtaaatactttttttcattagaaaaaaatacgagtttttttggggggggattatgaggtattgataataaagaaaaagagatagaactagaaggcatccttttcctgaataaaaactaaaataatttttattcatagtatattttagtatcaatagacaaattagttttctattgttgctgttaacaaattactacaaacttaatggcttaaaacaacgcaatttagagattgtgttaatgaaaattcttgtttttgttttttgtttttttattcaggaaaagcataccttctagttcaatctcttcctctttattgccaatatctcataaccaaaaaactattcttatgttttttcctactgaggaaaaaaaaatatttgccttgtcttaatctctttgcttcttggcactgcagagattgtctgaaaggatctggaggccattatccttggcaaagtcacataggaacagaaaaccaaatatcacatattctcacttataactgggagctaaatgacaagaacacatggacacatagagaggaagagcacacactgtggtcttttggggcatgggggatgggaggaaggagaaaatgaaaaaaaaaaaaaacctaatgcatactaggcttaatacctggctgataaaataattggtacaacaaatccccatgacacaagtttacctgtgtaagaaactggcacctgtacctctgaacttaaaataaaagttaaaataaaaatctgcaatttattattttactgttttgaagaccaggcatctaaataggtcagaaggctgcactccttcttgaggctctaagggatttttctttgctacccaaaccctcatttttaaaaatgttgttagcaaatattttacatactcattaattaataaacaattattacctttaacagtgagtcacaagtgaatcatttaaaaaggagatttccctgtgcatttcaaataaaaacttgtttcagaaatgtgatttacattcaactattttataagtatcacacagagtggttattgttgaaagggtgtacaaaattgattttacctgtatgacttatttctttatttttacatgtagttctttaataaggcctatatttagtactcactttaatactaagtgagtgcacacagagtattttaaaagagtttaaaattcacaagaatttatttaaataagatgttagagtcatgttctttattctatttacaatcaaaagacacaagcaccctggccaaatagtagagaacacaattttacatacgctatttataaatatgtctagtttttcatacccatagaaattagataaatataagtgttttcaaatctcatctgagaattttattctatgtaatacacaaagtctttgatgtcaaaggtataacactttaacactagaaagaatagtatacaaatacatacctgaagtgtaaagataagagagttaaccttaaaaaatttcaacatctgtggagattactctgatgttacaggcagaactggctattttatattcattgtatcttttaattctcatactaatctctgaaataactatcatttggactccccaagagatataaaagaaagttaagtaacttgcttacaaaataatgttccgttaatccagaattcaaaattataatactcataacacaactgtctaatttttaattaattaattaaataattggtattcataggcataattgtaaactaatgaaaactatgaggaaacaaaattatttggaacatggctttgtataaatatttaaattgtaataatttgataaccctaccaccagagacaaccaaatttgttttgttgtatttccttctacagactgagcatcctaattgaaaaatctgaaatcccaaatgctctacaatctaaaaatgtttgtttgagtgccaacatgccaatcaaaagaaatgctcattggagcattttggatttggaatttttggattagggacgctcaattagcataatgcaaacattcctaaagccaaaaaacaccaatatctgaaatatctctggtcccaggcattttgggtaagaaaccctcaacctgtcttattatcttctgggcgtagtacatgcagtgtagattacagttgtctcttgttatctgtgggtatttgtttcaggactccacaaataccaagatccagagatgctcaagtctcatataaaatggcatagtatttgcatgtagtctacataaaggtgagactgggaaaattttacttcttcacttagaaacaatcctcgaaattatactctgcctttggatatatattttttcattacacgtttccaaaataaaggatatatatgaacttttacaatcctcagattttattataatattgaagatatgaatgtttcatttttcaagcagcatgttattcatatcaaaatataattgcagaactttttttgcaatactgacattgtatatgccaatgcatttaaatttttgctgattaaaaataaaatgctgggctttttgttagttattggcttttcatgagagtcagatttattggcttcctgttgaaaggaataccgttagagaggaagattttattgcaatgattttgtttaagccatttacctttcagaaaggcacaaatcaacattgtttgggtctaatggttattgatttggaaataattctaacaagtatacttatttaaggtcaaacaaaggttttgccaacttagctgttgtgcaacattgtacgtggctaagcctcttttcattttactttaatttggcttacagatcatgtttctagtaaaaggggtgaactggaagtcttttccataatatgcaatatttccttgttaaatatgttgatacagacccatagtagaaggaattgccattctttccaagttaaaaattcacacttctttgaaacaagtgaattggcactttcttagttctagcatactgtgagctttctccattgttgaaataaattggccactagagattgattgagaatatgaaaacgctgttcatttattaggaggtatgctatgcttatgttgagacaaaatctatgtgcttgccagcatcagtctactgagtttttaagtaattggtattgctttgaaattgttaaatcatttcaatgtacaagtatagatctcttttcaactcatatgtcttttaaatctaactttatcaattattttatatctatgtaaactgttatataacacttttagttcataggtttcatatccttcttctgttctccaaaatatcaccttcaaactatcacctatattgtctgtcattattttaaactttgttattttcttttgcattctgagattttcaatattttcctttatctcttgctatttgaagtgtcagttctctttgtgtttgcattcaatctgatttttattttattgctgcagttctggtttcctttaaatttttcctcttattcatcttccctttaattggatcctgttttctttctctgactctcctcacctcccagggtgtgctgtttcaaacaggccatgtcatcatacttacttctttgcatactattgatacaatataggcatttccttctgttagaaaggaaaatgctttctaaagttgactttctaaaggtaatatttcagagacttctagatttagtttgccatgatctgtggtattttttagagcttctctataattgtttttatatgatctaatctttaaacgctaaaattctcagttattacaaaaatatatttctactactcttactgttcactgtttctttcttatatgtacagcaggaaggtagtctaccagttagagtttctagaacaaatttctataagacatttcttactggggcaaagttgggatgttatactaagccactaccagctgcttgacaatctgaattaaaggaatgtataaacctttaaagtccctatgacagtatcttactaacaatgttcgttctccacttttcctcactgtatttccctttgtacaaagactctacctccaattttaaaatgctcctctgtcaacatcaggttgttttctgagacttgacatctcttaatgggcctagaggggcaacaaaggggcaatacttatgattatgaatgattggaaagctgtaaccatttgtatattttatgccgccctcaataatttgactatataacaacacattccagaaaatactgaagtaatatccacagtagaattagaatgaaggttagaactcacaacataggaagttttcttttgtagaaagaggcaggagaattaagttcttaatctatattcaaaaatatagatatttttgactatatatatttttgactatatatattttggactatatttaaaaataaaatacatatataccaacaaaaaaagtcccatgtgtggaactcccatcaactaggaagtgaaatgtaatgtaatatttaagaatgtgaagtcaataaaagaacaggttatgagcaagtctgaaactaggttaacataaacttgcttcgcattgcttaaaattggattacagtgatacaaaattataaaatccctataagagaaaaataatgtaatgtaaaacaaaaactgtcataatgataaaaataaaatccttacatctagcaccagtgccaggagttgtgtgtatatgtatgatagtttagggtagggggtggaggagttgggagaaatacgtaaagtcaacagtttgagaaattcacttgtgaatagaaaaatttgaataaatagttcattctttcataacactttattctttataatgtcttgattatgctatattgaatgtataaagtataagtcaaaaattaaagtaattcgcaacatttttcttgtcaaattgccaaataagtaaaggtaaaataatgtttggcattgtatgctgccagtgccatagtattatggaaggaaaattctacgctatcctgtgaacatatttaaatatttataatgtttatttaatactttctcactgactttatgttatgtaaataaacagaaaactcaagtcaaaattgtggactgggggctgccttagactctgttccattcctaaatactaaaatgtgtggtgatttttttaaataaattgaactctataacagtgaaaaagaaattttcagctgtcataaagtaagaggtaaaaccccatagaagaatgtaggagtcataggagtcatagggcccttaatgactatttggtgctttaatgccttcctggggagcagaatacatgtctcgaatgcctccccacaaataactggaatacacgtaaacataaagtattgctcatcttagaaagtagcatgaagggtctggggtctagcaaaaatccctcccttattttctactgagaaggatcaatggaagcttactgcctgcctaggctgcaagtggacatctgttacttcaaaaatcagatgagaaaaactagtttttcaaggattcttaaaaatatacacaatgataatttgaaatatagtaataatatctagcattttaacttctgtagaagttaccagctttgtaagtcatatatgtcaaaagaagattgtaatatggaaaaactattttaattcagccataaattacaaacataaaacaaatgcttaaatctaaaaatattcaaatactctagttttcgaatgaggtttagactttaaattcccttcttgccctagtctcacgcttcaaaaagcgaacttcagctctctttttctggaaagtggccttttgtgataaaccagtatgtgctacttacagatgaaaaatcatcccttataaattctagaaatcctgcagctactctggtgattggtatgtttctagttacctagcacatcagggaacatttctgatgaattttcagcatatgtcctaaatgtgtcatctttcatgttgacttccctagagcaggtgtcagttttcatcaagagttgctttgatggtttctgaaagtttaaataatccaataatacaggattgaattttctgatgtcttttctgaggttcatagagaatctgagcaatatgatcttctcagttctagatttgttaatatattcaaaatatgtcaaccatctctatgctgaaaatgactaatcgaccacattctaaggcaagcaagagtatgtattcattaatatcattggtcacatttaatggacgcaggcacacttttaaatgcttcgtgtcatgcattgtcttattataccttgaattaaccacgagttaagtaccactatgatttgcactatatagattagaaggctgagatgtaaaaaaaatgttaaagaattatcctcaggtcaattattaagaggcagaactggcacataaattcagtcatctgatgaaataccagtgtcactctgggaaacttggacaggaaagctatacttcttagaaatgggtgctagatggagacttattaagtagccagcaaaaagataaggagtaaagtggtctctaaaatagcaaagaagaagaaaagaatgcaaggaatgtccacaaaataaatataaataagtaataaaagtagtaactggaagtctgatgatttaacattatgttaaacatttcataatcatgaccactttgattttctcaaaaactatagctagtaaactttttcagatgaagaaatgaactcgtgaagttaaaaaatttgatttgtctaatggcacagaactagtgagtggtggtgcctggattcaaatctatctatcacatagcaactacatgtctatatttattatatggtcacataagtgacatgtgatatttattatatggtcacattaatgactcattccaagaaatgatgccgatattcataacatagggaatcaattactttcataaaacatctcattaccttgttttattatggtcatagttatatatagttataaatttctatagagattaaataaaataacatgtagatccatttttagtatgacttttaaaacattgcatcttcaacagtttatcagtggcctaagtagtctgccaaaacccagagttacccaaaaatcctagttgccctttatgctacctcaactggcaataataataataataataataataataataataatgagaatcttgttcaaatgtccttcactattatctgtgaataggctacttgttattgtaacatttcaatggcagctagtacacaaaacatttgtcttaagaaattggacaattgttgtgaatacatatggagaatttagtgattagcaatttattggattataacaggaatcattttttttctagttacaattagtattgggttaaatatttgtgccgttgtgagtagaatagttagtaccaaggtgatatatgtgtcattcttttcatactaagtgagaatcatgcaattcttatatttgctaaagtcatagggtcaagaaactgatacctctggactcaagagttttcacccaacaagcttgttctgacctctttctggtaactgaaatagaaacctttagattatggaagagccgaaatctccctggaaacattgtctttttctaacattctcctttatgcatggcagtctataaaatttaagctgtttttgtcattcccttaaatgagatagctgatgatacctggataagtgacagaatttgtgatgcttcaattttcaagtataagattttgctgaggatgatagtttgaagactacatgatagtttgaagactacaattttctacaattggagcatgaaagttgccatttctccaaacggaaagttttcaaaacttaacactttactaaagttatatggacaattcagacattaattagaaatgatgtagtcctgaaatagtggacattttttgtgaaatgtgaaatcttcttttagagggtaatgaatggatcactttggttaacttagggttacaaagtgattgtttgacatttgattttggcctactctgatgatggtggaaagtctatcaaactgcatttacttcctgaaccaaatcttttcttctcccctgtgaataatcagttattgcattcttccaagctctgacaatctacaactttttgcacacatgctatatattcttgttaaaggtgtacattcagggatggtaacacagactgtttagtgagtgtgatatattgggacaattgaaaacttaattgtggccaaagattgacagaatatatcaactcagtggaatagaaaattcttagagcagctgtttgtgtccatccttgcttcaagacactaatacacgctccttcttgaatagctttagtttttaagacatgaccacctgcaaaaccatctgtttgcttatttaatcttatttaagtttcatatatagatttgttataaatatgaatctactttggtccccaaatttggcttgcttgcaaacatattataccaacacagctgatatttgtataacctctcaagaaaaacaaatgccaaccccatttgaaaccagtctttggtttcattgtcatattgacctgggagtattttttttttctaatcagggattctttttttcttctagttaacatggtttgatacaccagtattttgctttaacattctgtgtatttgtgactattgtttcattactagtttcttagaaagttaatgtgtgttgtgtgtttcttagaaagctaacgtgtgtgtgtgtgtgtgtgtgtgtgtgtataaatgtatatgtgaatataacgttttaaaactaggaactgaacagagaaaatgtatgagaaactggatgaaggaggtaaggttttctgtctttgttcacttggtgtcagctatcacaagttggtataagctacttcctcagtttagttttatttcaaatatctattcattatacaatatacaataaaaatacgatatttttagaaccaagtttaggtatattaggtgcttattactcagcttcaaactcaattataaattactaaaatgatttttatttgataaatgtgaccaataatttaaacttaaaattcatatacattttatgttttatagccatagaaccaaaataataaaaagagacatgctgtatttactgatttcttaactcttaattcaatcataaattggtgtcttgcaatgacagaaatttttttgaaaattagcttcagtttttagattaatttttctaaatgtaatgcttttgaaacattcattttttatttccccttttgatatgaaaagaatgcatgcaatcagaattttctaatattggaagtttaactaaagagagaatattaattttaagatttgcttgctttgttagacaagttaaatgacctccagcttataaatggtatcttacatagaaaatatagaataattcagattttgtatgaaaatcatttagtatcagaaacacaaatactttaggaagcatgatatggatagtaaaaatcatataatttagtattcttagtaaatataaaagctcagaggaatatttttaataaaaatccatcgtacattagtttgggcttgaaaacaatacaatgagtgtgccgaggtgctttttcttttttaaattatagctgggttatgaagccagagtatgaggaggatcacaatattcccttcataccttacgtaactcctcatacactgattccagacaataatatacacaggattctgtaaccaaaactcaagctcagttttttgctatgttgtttttctgttttgcagattttcacataaaaaatatatatctaatttcaggacaaattatacctaaaaggatttatttcacattttaaaattggccagttttatttattttgggtggtttttatcatgatcagagtagaatatctacgatgtgttcagatacgtgtaatgagaaggaaaatttaaacatttaccaagaatgaagagcaaattgcaaaattgtaagatatggaaaggagagttttaaacaatagaatagaaaatatttggaatacggggtcacaaacgtaatgtgacattgactaacattttaattcataaaaagaataagaaggctgggcagtggctcatacctgtagtcccagcagtttgggaggctgaggcggacaaaatgcttgagctcaggagtccgagaccagcctgggcaagtgatgaaaccctgtctctacaaaaaatacgaaaattagccaggcatggtggggggctaaatattctagtgagaaaagagggagaaactacagccctgagacttttagctaggatgttaaaggcattggtaggtcaagactaatcaggcaagtcactgtgctgaaatctctcaggaattaggtatacttaacctcagaactagatgcccagcagagggattgattgtaaatctgttttattccaaatctgcacttaataactaattatctaaattcatagaggaaacttctgtctttatatcatgtgttatctggctgcctttaaattgatcagaatcgagttgaataatagctatcaatcatcttgctttccaaaaggaaacaactatttttgtaagttattaaaaatggcacacagcttccaatatttctttcttccctctcatcatcttcatatcagcaaatatataatttgttttagtttaggagaagaaagtaccttatatcatattaaaatagtctttgcatttataacaagttttttaaaagtctatatttttatattgtttgctattcaagcccatctattttaactttagagatgggccaattatttagcattaaaaacatatgctacagtaagtgccaagtatgtttgtatcaagtatgttggtatcaaatatcaaaataacaaagacatatttaattttttgacaaataacttcctgggaagtattaaaacaacagcaaaaatattgtatcagtaatgcatagcttaaatatgtaaatatatgttattgaataaaggctgtacaataaatattaatagataataggtatattgtattgatcgatacaagaagaattctgccaaatatttactgtaaaattagagcaatacaaatgcacaaaatatgtatttctgtatttgatctttcttcaaggagaatgaagtccaatgatataattttatttctctgccttcttttatggcaaaatgattttttttttgttaagagccagataggttttatattttttttctcaaaaatcacctcttaaacgagttttatttaccttagtttgtgatttcattttagtagatttttactgtatttcagaaaattgtttttgttctccatttgaatctagggcattctacacaattctgaggtgtaagttccttagcaacaggaaacatggggagcatcttaaaactaattttagtttctgaagtaagcatatcaaataaaccatgtatttaatcctttacatataactcctctggtttaggtacagtgatgaatccagagaaacagataatcccaaattgcttggatctggaggaaaacttccggtgtctctacttactgaggtatttcctgttaacaggcacaggttatcactgcagctaaagactccggttctggagtaatactgtcaatagctgcaaaacctgggattaaaataatttatggtctctaagcctttgtttacttatttgcaagtagtagattatgatagtattatttagataatatgggataatatgtgtaaggcacttcacggtgactagggtatatttatgctgaataaatgcttacatcattattacttatctcatttatgttagagacataaattcttagaagtataggttgttatgaaagtctgtggacacctactacactataaaagcctttcatgctatgctaatgagtctatgttctatttctgtttttgaagtgtagtttaaccgctgaagttcatggttatttcttgagcacacacaatgtgctagcaactcctctaggggcagcagttatgcctagtgtaaatcacattttttctctcatggggctcttgggcaagtggtggcaagggggtcatataagcactattaccatctagtggatgtttattagtcagtcaacagattgaaaacttggcaacttaaaaatatagaaaaagcaatttgtgcataatccaagcagagctaagaattctgtcttatataatgattaatatttacctaatatgggtgtggaggagaaataagcaaaaataatttaatgacatgaacctttgaaggtgtttatagttattgagacaacctaatggatttgtgtattaaggtaatcatcacttaattaagatttcatgtggtgtgccatatgtcaacttaaaaggcattcaagggggaccaaaatgtattttaacttaggaacatattgaatgtggctgagacacagtagaagaaaacctgtaaaataaacatagacaatgtgtatatcatggaacattgttaaaaatatatatgcaaatatatgtatgtatattaatttaagaaacgagttcttactctgtcacccagcttggcggacagtggtggtgttatagttcactcactgcattctcaaactctttagctcaagtgatcctcccacctcagcctcctgagtagctggtattgcaagtgcatgccaccatacctggctgattattaaaaaatgtttttctataaggggtcttgctatattgctcagtctggtctcaaactcctggcctcacataatcctcccacctcagcatccctatttgagtttacagacaggagccactgtgcccagctgaagattttttaaaatctgaattatattatatctagattttcatttatacagtgctcatatacatatgtttagtaatcctttaaaaagtaacaattatatttagataaaagttgttccctgatgtgtttgtttaatatttatttgggcttttttggttttattttgctattcatgcttaattagaattgaagccattaaatatttatcattaatccatataatttatatgttgaaggcttgcaaattagtggaattcagttacacaatatttatccttgttttatcatgcttcttcaacatatagtcacttatgtagagatcatgttatgaattcatatcctgattggtagtaattcaggtaggcgtgtgcttcaccaagatttacttaacaaactttatttacttaacaaacttgcagatgctatgttagaggagaactgctcagccagttgatgcaaaagaaagatgctgtgtcctatatagatgttgggaggcagggttctctttatcacaaattcaacatgaattttgattaaaagttttacatgtaggtccaattctctgcaatttatgtatataaatcaaattgaatacatttttaactaagcacttaaaatagttaattaatctatttatagtctatagtgggtaaagaatagaaacagaccgagtctgtctttagtctcaagacagagaaatcttaccaaatatttatgattactagaggtataagattggcaacaaatgtcatgacagcagctcctcttctatcttgatttgaatgcttctcagagctatctttagttgttagttccatgagtatgggagagactgtcatttttcaaaccagtattaatctccctctgccttagtaacattgctgtcactcgtaagactgtatttgttgccttgctgcagattgggttgcccagtgagatgtaaatggatattggtggatgcaactctttaaaagagcaaagactcaactgggagtatattcccatttgcctctttctattttcctagaatattggcccaacagataccttatgctaatctaatgcccttgttagtgaaaccatgaaacaagaatggcagaatacaaagacagaaaacagttgtttccttggtgacctctagagtggctataccagccctttatgtcctgttttcaaattaattttacacaaaaataaacctataacatatggaagtcactaagcttggatctcttacattagcaggcaaatgtaatttctaactgataaacaacaaaaaaaaaacacagtgatttattcaacctcaaatattattaattatgaaaatttaaaaaaaactgcaccagagtacacatggcacttcactgggctcaataccctcagaaaactctgactatgccactttagtctagatgattagacataggaatattttgctgtctatagtaaaaaatattattttttgtttaaaatgaaaatagcatgatttttaccagaaaaataaaacatggtcatcgtaaagattaaaataaatcaggccaggtagggtggctcatgcctgagcccaggacttcaagactgctgtaacctatgatcacaccactgcactccagcctgggcagcaaagcaacacctggtctctaaaaataaaataaaatattttttaaatttaaattatccataatcttaatatttatgtgtaattcctgttaacattttttttcagtggttttataagtatttttgaacataaattatttataaattgacttttaaaattaacaatataacataggcatttttctttgtcaatgaatatagatggtatgttagtttctctcagctgctgtaacatagtacgaaaatcttggtggcttaaaataatagaaatatattctgtcacagtaccgaaggccacatgtctaaagtctgttacactagattgaaatcaagggttgacagaactgtgctccctgtgaagactctaggagacaatccattccttgcttagtccagttactggtggctgctagcattacatggatggtggccacatccctccaatctctgtctccttgataacattgccttctcttctgtctggctgtctaagtatatggtgatttgatttatagcccaccttgataattcagaataatatcttcatttaaagatattttacttaattatatctgcaaagacactttttccttttaaagaaatatttacaagttaaaaggattagggcctgatatcattgagcagcctttataggtgacatcatcattttaagtagttgtatgatattttgcacatgcatatagaatgcctaattatatcagtcccctaggatagttctttaagaaacttttaatttttagttaatatacacaaaacacacgcacaggtgcacatacacacacacacgcacatgcacgtgcacacacagacacacacatgcacaccttcctttctgttaagttcccagaaatagatttggtttataaaaggatttgaatatttacaatgccaaaacacagtgtccaaaagttcttttaaaaagttattactgcacattcagcggtgtgctgacataaagagatttttaaaaattttattaatgtgatgaagcaaaatatttcatttaatttttatcagtaaaattgaatatgcttgcctgccttccttcctattttctttctctctctccctttcttctttctttttgtaaattacttttattttttaaattactactaccatgcacttttaacccacattatgcattttttaccaaaatttttttaacatttttaccaaaaatgtatagtgtggtttaaaaaatgcatactagtagtaattaaagtactacatactcacgcctgtaatcccagcactttgggaggccgaggcgggcggatcacgaggtcaggagatcgagaccatcccggctaaaacggtgaaaccccgtctctactaaaaatacaaaaaattagccgggcgtagtggcgggcacctgtagtcccagctacttgggaggctgaggcaggagaatggcgtgaacccgggaggcggagcttgcagtgagccgagatcccaccactgcactccagcctgggcgacagagcgagactccgtctcaaaaaaaaaaaaaacaaaaaaaaacaaaacaaaacaaaaaaagtactacatagtaaaaaaaagtgtatatatatatatatatataatatatatatatcttttctttgttgtttgacatttttatccatgctattatttacagtatatgatttttaaatttccttcatcacaagattgtagaaataataatctatattttacatgacaattaaaatctcacatatttagatgttttattaccaagtaataccattaacttcatccagtcccacagcccttccccaatacttattaacctttcctattactctttttctgttaggtacttttttttttattgagttctgctattttaggtattgcaaagttaggaagcttgtcagtgctatttcttccaatattcaatcccagatttcatggcttaagtaggctatgggagaagcatgtcaaacataggttacagtaagtagtggcctgaggctgtgtggtaggaaaggaggatgctggggtctgacagctctattaacagaatttcagtcgtcgatttttttcctagctccactcctcatatctgttccttctgtgaacaaattgacttgctgttcctacatccatcttttcaagctcttaggatttagctttctttcacttctctaaactggttttcaatatatctgcattccagatttcaaaatgtgtttttatatttatcaggtatcctgttatttcactctaccttttttattccaccttgtaaaacacataactttttaaaattcttacagtcattttagtgaaatgttaggagggagaaaaatagaccttagttatatagaccatatttcctcaaagccttcatctttagttatcatttcaattagtcttttattatttcaaatttaaaaaaattcaatttactagatataaaattacacaaactgttacaaacatttctaagtgttgcctactgttcacacaaagtttacagagtaagacaattaggagaatcactgtttgcattgtggcctattattttctttcttttcccttgtagactctagtgtattgctttttccttgtcttgtttaagaaatgtttcatgatcctaaggttataaatatattctgccctattatcttctaaaagctttacttttattttcacattcaagtattaagtatacctgatttctatggggtgaggtaggtattcagtttccttcttttttcttcctaataaatatcccgttgtcctctatcaattgataagaccatccttttcctgttgcttccgggtaccacctctgtcatatagaaagggttcattaatgtatggtatgtttctggactctatttcctgtgtttctgatttgtgtatctatccttaaaccaataaaatgcctacttaattactaaaaggagtctgggtatgtggtaaggaatatcttcctaccttgcttctttatcaggagtcgtcttggttttttttgaccctttgcctttctaggaaatattaaaatgagctttcaagtttcttttaaaaaactgttgggattttaattggaattgcattaaatccataaactgacatctttgcgatattgagtttttcagtctaagtattttagttggacttttgcctcaattactttactgaaataactcttgttagagtcatcagcatattttctcttactgtattcaatgtcctctccctactttacctttagctgcattgcactttgttaataaataccctttctggaaacattgcttcacttgttttttaaaacaacatattttattagtttttcttctaaaacgatttagtcttcttttcttattctatgtgttgttcctgatctttaagcctttagatgttctatttttttacattcctatattctctataggtttaaatactacctttctgtttctataattttaatattacctcgttgtgtctatacactgatgacatccaaatttataacctgacctcagactgtcttctaatatccaaatattttttatctctttctttacatttgtaatgaaacctttattttatatatttacagtataacacttaatttcctctaccaaagaaaaaataaaaaacaaaaacacctttccccccagtctccatatcttaatgacaggcaataatattcatctagttgatcaggccaaaaatatcagaggcataccctcccataactctcacatctaattgactagcaaaggagtatgggcttaatatttgtactacacgcatggtttaacttctttttccctccatttcccccactagtaacctagtcctggtcaatatcatttcttacatctttaatctgttctctctgaacagctacagaaatctgaaggaaactattaaagagcaaaggataaataaagaaagaagtaaaataggaaagaaggaagggaaataaaagaagagggaaggagaaagaggaaaaagaaataaaaaaagagagagaaaccaattcttgccattttcttgcttaaaacagtctaatggtttcccttaccttgctcatcatgccttaggtgattttgtcctctctctgcctcctttgtcttatttttctctgcctctctcattcattactctttacccataaagagtcaaatatttttatcaggatatggcccaattattcttccttatgctttatagaagcatttccctctttatttcttcagttcttcttatggtctgctccttcccatcattctggaaagcaacaggtgcccaataaatatgtattgcacaaatgacattctttgtaatcctcagtttctattctcccaaagtgagatattcacatcattttttaaaaagaaaatgcttaaagggaaattgcttgaaacctcctccatcaagaatgatcagcttgtaaaacagaatgccagtatcacttttaaaagagtgtactctgttttttaaatttgttagatgtgtaaaataacctttacaaggtccagaaaaaagaagggaaaatattagactgtgattttgaaggagatccagttctagaaattcaaagacaatgagattctttttttgtgtgtttttctaaactatgctgtgtccatagtaatattttttaacctacaggcatttatatttatctttaaaggcagtatactaaataaaataatgctgtttccttctattagatagttttttgattatttatttatttactattattatttttagagacagggtcttactgtgttgcccaggatagtctcgaactccaggactcaagcaatactccagtgttggcctcccaaagtgctgggattacaggcgagagccaccacacctggctggatagaaggtttttaaacctcagcactacaacattgataatatgggccagataattcttcagtgtggatggctgtcctatgcattatcacatgcattgctggtctctacctgccagatgctactagcaacaactccccccacttccaggttgttacaacaaaaaatttctttagacaaggccaaatgtcccttggagatgagatcctcataacatcctttaccactgatttagtgtgagtgatttcttcaggcctcccccagtattgatattgtaccattccaactaagatggttaacatctggaggttgacagcttaatacttggtggttgatagcctattcaatgcccatgtgacaaacaaaattctccataaacaccacttattctctggaaggcaaaattgttctcagttgaaaactaattgtataatgtatgtgatagaaaaaagagtttaatacatttaaaaatatagaaaagtaaaaaagtatacaaaccatcctcactgacccatgtgttttaaattaatcagctgaattgtccttattctaatgtttactatgttaagatcttcaaaaggagctttttagagctgaaagggaccttacaaagagtatagttcaattctcctattttataggccaagaattgaaaacaacaacaataaaatgttttgtatattattcataattacatggaaaatcgttttgaaaaaaaataatttaaatccaatgtgattgaaacaagaccattttatttataaaatgacaaatgtaggccggatgcggtggctcacgcctgtaatcccagcactttgagaggccgaggtgggcggatctcaaggtcaggagatcgagaccatcctggctaacacggtgaaaccccgtctctactaaaaatacaaaaaaaaaaaaaataaataaataaataattagccaggcgtggtggcgggcgcctgtagtcccagctactccggaggttgaggcaggagaatggcgtgaacccgggaggcggagcttgcagtgagccgagatcgtgccactgcactccagcctgggcaacagagcgagactccatctcaaaaaaaaaaaaaaaaaaaagacaaatgtagaaaagaaagtacatcaaatgtagaaaagaaagtacatcgtcatggaatataaaagacattccaatgaggaggatatggtatgtcaaggggtaaaataattgtgtgatccacctttcaaattagtttggaaattcttctcagccaacgtaataaatttgtatataatacagggctttaggtgttcatgtgatattgactttttgtttattatggatatattccaagataaatttgttacaggtttcaacttttattttaagttattaggtacaatatttgctttaaatgaaaaccaaaggcataaaatttaaaacattacatacattattaagaggttaagttaatgttaatatatttcttttcctgatgttaaatgttatataaattagggtttacatgtttgaataaataaatttaatggtacattgttttttcttgaatgttgattctttctttcataatttactaaataaaaggataacaacagtgccttaaagcgtatactctctggagagaggttggagtgtcagtatcattgactgactgtataaggatttagtgtttttgatgccatgtatactgaggtggagttgatgatctattatgtaaggtggtaaactggaatggcattcatgtccaattgggaggacactcatctcctgtaggtgtaccctgctccccccagacttatatggcagaaataatccaggatgcatatttttcatcaataaattgctttgctgattctatgaaatttattctataatgatcaaagagattctgatcaaggaatctggctaatatatgacacaaatcacattatactactatttctactaagcctgtgttttcataccatgtcaagagtcagatctgtaagagtctcctgatagaccagatttcaatttcaactgctataaaattgagtgctttttagtttggtttttcccttacttatttttcaataacttaatacacttttagatgaactggcatacattctgtcctgctgtgacatacatccacttaatatgttacacagaaatatcgtaagatcagttgtaatatggcatctagcttgaccaaaaaagagcttcaattatattcaagtgaaactttacattttatactgatctcactttacttttaatcttttaaatgaagtgaattagttataaaaggtaactaaattcattattaaataatcttataattatttatttgaaattcagaaaacatctgttaggtcaattatttgggctttattagagtttacatgtaacacttattttttcctgcttaacagaaattagacaagagcatctttagctgttttggaagaaactccttgtccacaatgataaaactgcgttctcagcatacaaatgcttgcctattttaaattaactggtatatgtcacagcaggacagaatgtatctcagttcatctaaaagctgtatcaagttcttaagaaataagtagatgaaaagtcaaactaaaatgtactctattttatatcacttgagattgaaatctgatctgtcaggagattcatctagatagttctgacacttgcagcagtacgaaaatataggctctagaaatagtagtataatgtgatttgtgttaagcttatgaaatatggtccatagaatattaaaatatgatggtagataaatgattattgtgaagcttcttaaattattctttgctgatttctcagtgagatgactgaaagtagccagtggagtattgtgtctaagaattagtagcacaaagaatcagtggtagagctgagatagcctgtatatccattatcctgtaacaatcactacatttacactgctgtaactgtacataatgtaacatgagcaattttactgtacttaatggatcatactttaccaaaccggctccaatctaatctggctagactgaagaaatgcatgactctttctaatgcagataataatttggaagtcatattttaagtatacaaatgaagaaatggcaaagtcaggctgcttcaacatcataaatcaccaggaatttgttgaatattactaagcattctgtaccattctgctcagttaacatgatgaaaataacacattgatgtggctgactaatcttcagtcttattacctgaatatatttggattaattttgttacttgtctgttcttacacagttgctgtagcatgtctggcgtggtaaagggtgattgctaatgaaatccctaaatccacatccagaatcccgaaagattacattggataatagaacaatattattgtgtgtttttgctttatttcagaatagtgtatctagcaattgctttcctttagtttgaattcgtttctctgcctgtgtcttgcgtcctaatgtgatactgcactaatttatatggtaagcctccaagctccattctctgtgatcttgcagcatcaacagagctcaaaactactcatcattattcatgctacaaaatgatatgtcacgcttctgattctggttttttttttttttttttttttttttttttttttttttttttgagacggagtctcgctctgtcgcccaggctggagtgcagtggcattatctcagctcaccgcaagctccgcctcccgggttcacgccattctcctgcctcagcctcccgagtagctgggactacaggcgcccgccaccacgcctggctaattttttgcatttttagtagagacagggtttcaccgtcttagccaggatggtctcgatctgctgacctcgtgatccgcccgcctcggcctcccaaagtgctgggattacaggcgtgagccactgtgcccggccacgtttctgattctttaaaaatattttttattactacaaaataagaaaatgtggaataattaatcctaagattcagaaaatgtggatgaaggacatggatgtactttctaaccacttccataaattaaagaacagtcgctttctttttggttcattttttaatatatttggttctatgtattagaaatatactattttatgtgaaggacttttaacagcctttacagagaattatattatgataaccgttcacttttgattttgaaattaaagccagttgacaaactgggaacagttaataaaactcaatctcatagagtaaaatcactgctgttcagagagagaaagcagaaaatccagaaagaaagttgactttaataatacataaatgacactataaaactatgtgtattattcggcaagatacttaatctttctgagccttaacttgatcacctgtgaaatttgttaataatttatattctctggcaaactcacagggttttgaagggccaaatgacataatgcgtatgaaagagcctagaaaactttaaagtgctttgcaaatgtaaggtaatgatatcaactgcttttacttaagatcatgttttcttacattggttaatgttattctgtcttcgttgctgtgaaaatattaaaacacttttaggagttcatctttaagcaaagtaaacaataaataacacgtcgtgagcataacatcaagtcgtgagcatatgtaactttattaagaaacaataattacataattttggccaggttctttttgtccatcaatacaaaattattatataaagtatatatttttattgcatatcagccctgcatcccagaatttctttaatgaattcatttttcttccttcaatataaactattcaaatatgtcagattttgctaaggtgtactgatagtatgagttattatttgctacatactgaaatgttttcattagaattactatttgtaaataacaaaactatagaggatgcaaaataaccagtgatttgacttaaagagcatgattttcacataatttagggttcaaatagtatttataactttcctcctgctcaggtttggtcatctgtaacattacctgagctctcttagaactttttctgaagattgaatgagataaggtgggtacattatctggcatattgtaaattccaaataaattcacatacagttcatacagtctcttaagaaactctccttaaaatacacattgctatctgagccaaggatttatttccataattttcactttgacttgaaaacatttgtccaattgtttgaaggaatgaaaagttattcgaaatcagtgtgtgtgtagtgatgagaagggttaaagggaattatagtcaaatatccagagaatttgaagagaactctgaaactagaagaagctcaaaatattcaatactttacaatttatctacaaagtcgctctttcattttctcagttttctctagaaagtttatttcctattcacattctaatacactgatgtgttgactcattcctcatgcgatcattaaaccattcatctactcagggacaagctctacattccctgttctgtgctacgtagtgaagatagaataaaaccatttggcttccatatctttattttatctaagataatgctattttggcacctctttttcaatacataatgttgccaggcattttgatgcattcattttgtattcaccctgttagaaaatgggaactaaatctgaggctatgcaaactgcttcagtgtggacatgagaattcaagtgattcacccagtagaatggaatgggttaatgtaatgcaaatttaataaatgttttctatttaagccagaatttcttaatttgacacatatcaagttatattataggttgttcacttcatttctttatgcttatatgtctctaggcaaatacaatattaaataagtttccattttctttttggtgtattcgttggttcagaagattatgttttcaggacaaaagaatgttttgataatagagaaaagtatccaatcatttaagacaattaaatataagcacacttttggagaactttgtgaatgtagtgccttttttaaaccagaagttttgccggacaagataggtagctcattcctgtaatcccagcacgttgggaggccgaggtgggcaggtagcttgaactcagcagttggagaccagcctgggcaacatagcaaaacaccgtgtctaccaaaaattcaaaaattacctgggcatgctggcttgtgcctcctagctcctcaggaggctgaagtgggagaattgcttgagcctgggaggttgaggctgcagggagccatgatggcaccatggcactccagcctgggggacagaatgagacctgtctcaaataaatagataaatgaataaataaatgaagaacaaataaataaagtacatgtgtcaaaatttttattttggccagttttatggaatgttcaaactaaaacattgaactctatatattttttattgaatataaagcttaatattcattccctaagttcagcaccagtgtatgaacctaggactttttcatctgttctgtgaatcgacacggtggttttaatggcaaagcagactacattgaagataccttgtaagagattttaacagacagcctgatagaatgatttctgtaagtaaattggatttctaaaaccgatagttactattaagtataaagatgatgtaactaattttaatttacaataaggagttattacacaccattaatattttaatgttcatatatgaatatattaattgcatatatttctataattttgaagatgtcctatactttcacagagaaaactagaatcaactgtgtaatgttttaaatataaaaatatattacttcaatttctgtaaattccattttgaggaaaaaatagcaggcaaattaaactttattgttatacacgcctacatctacgacatcagtgatcttttatcaatgttttctgtggatttattttcaagagtaaaagattattcttctagtgataagtatgattatgtatttttactgttaactgtctggtttagattatgcatattacactaataaacaaattttcctagtgtaatgaaatatatatatagttgttcatatcaagtatcaagtatatatatagttgttcatatcaaatatatatatatatagttgctaattgaagaataggaaatgtttttgaatggaaggcatggttgggtaatgtaacttcaaattctgatttcaaaaagtacattataattaatataagtgagtaaaaatttatttaaaaataacattattggacaactacatgtgtatgtataactggttcacttggtttgataaaaataattgttttcttttattaatttgggttcatttacagtaattaacagaaatcttcacttaaataggctcacatcaatgcttctcacactttgatggacttgagaaagtcctggagatcttgttcatcccacatgtgtcacaggcattactcagatttccgattccataggtctgcaatgtggcaagaatttgcatttttattaagctcctggtgatgctctccttactagctcatgtatcacactttagaagctctggcttaaacaaaaaaacatattaaacagtctgaagtttgggcatgcttcaaaacacaatgaaaccctagctttttgattgtttgcttttcttttcctttttttttttttttttttttgttttgagatggggactggtgcctggtgcctggttctgttgcccaggctggagagcagtggcttcatcttggctcactgcaacctccacctcctgggttcaagtgattctcctgcctcatcctcccaagtagctgggattacaggcgcccaacacgatgcccagctaattttcatgtttttggtaaatacggggtttcacaatgttggccagcctggtctcgaactactgacctcaagtgatttgcctgcctcggcacccacaaagtgctgggattacaggggtgagccacttctctgtgctacaccaggcatatatggtatttgtcctcagctaggctttcttcaaggccacaatatgcctgcaagcaggcaaaaagtttggttgtttatattcagcaaaagagagaaaaatcctcttcctatagctgacatatgaggtgttttcttaggtctgattagaccaaaataggtattacacttaaatctcaacaaataatagttgttagggaattgcactatatgtttatctaaaaccagtgtttctgaatcaatgtcaccacaagggaattaagattaccttcactggtttatactagtcagtatttacttatgaaactggtaagatcagcattttctaaatgttttagggttccctggatagagtagacaaatgaacaaaattagtgttttgttatggagatatgagaagaatggtgcttataggtgacaaatccactttcaaatattggatgagattgcatacaaactaatctataaaatcatggaagaaaacagatgtaaccaatcacatgtaagtgattaaaacctcacgctgaaacctcacgctgactaaaagcattggatagttttttgaaacaaccggaattttcctagaattaaactttctctttgtatcataactattttgtgtaatacacatcacccagtaactttttttctttactacattaatcagtagagttgattttgcctaactcgacaatttttgaaaacctaaaatactttgacattgtcttatactatttcaatattgttttgtgacttatttattccgaattcaactcataagttatagcttacaattctgtctgttaatcttaatcccttcctgatcccaaattatgggaatatccaatgtatgacagacctccagtttgaggtttgttataaattcagatacgcaaaacgttcatttcagctttcatttctatgtcatatcaggtgttttcagtcacatcttcacatggttttgagatatcttcatttagttgtatcttccatatcaacctttcttatgtagaatgtcagtgtgatgggtggtcaacaaatgctaattgacttaaataatgactttttgaaaaagtatgaaaatagagagtgtgatggtttaaggagcaatgggttgaaagtgatcaaactactattcttagttatataaatttaagatctccacttaaatagattggagcttcagtatattcatctctaagaccaggagtagctaaatttagatgccctagacatgctttacagttctaaaagtgaatgatcctaattatggcttatgtgtcttatctcagaaattgtaatagactaaatttcagattaggtaaacagaccataacaaggaggccatttacagtaagagagacttttaaaatcttatatttaggtaaaagatagtctgtatgctagtttcagtacatggtggtcgacacaaggaaacattatgtaatatatttctcttgcagcttcacttgtatctgcatttaccaagagactggctatgaacaggagagtactacatacacattttaactttttagctattaaaaacccctgagaaattctaaatgagagctatttatgtacattataaaaatatacttcagtttcatgctcgcgaagtgtcactttcatttttagtttgaagccattgtaatttgatgaaagggcacaaaggatcacaaattagctcccctgggtagattttctatttttagtcagctactttagtaactaaggaaacctattagaagtttttgaaaacgttttatttcttttcaaagtatactactgttgttttgtttattatttgtttgggggaggtggatatttgtttttcatttgagggtgtgtttttaattaaaaacattaagtgacatttctattcacctatacctagcatgtattaagagtgttatagaatttagtttatattgttttatgttcatttatgaagtgttctgtctgttaagcacaaaaatacatcaatgaggtaaattaatagtaatttctgcgcacaaagtaatcataatctctggagcaaacacataaaaatagatattagccatgaaacctgaccaatgatggacatatgaccactctttaataaagtcataatggaagacgggtatctcaggggaggtactgggaagagatggatcaaaaaagcttcttaaaattgttttaaaggtgaagaaaatttttaactaagtaaaaagggtggaagatttggcagcagaggcacatcaaggaagagggaacaacattccatttatttgattatcccaatttcctcacttgctattacaatattaataatacctacctcttaggaattacaaaattaaaataaaatgtaaacataaaacactatgcttagcatatcatagatgcccagtaaatttgagctatgttatagttttatactatgtttcaggagatttttagagaaaattttctttaaaataaaactattttgcttatttagcctatttgctagcaatcataaggataatatgatagaaattatactatctagattcacttgatacagacctatagaatgcgtatactcatttgttcagcgttatacttagtacatgagacacaaattcatctgtaagaagtaaatcccctataaaattaggttaccttttttgttattcagaattttacatcatccctcctatgaattcaaatattcagtgtaagctatatttagatatatagtcggcttcctgttaatcagatatggattatcagagaaggttttaaaacttagagtttatccccttttaaatatacttatgatctttcacactcttcatccccaaagcaaattgtacaactcctttttactcaagaaacatgaactaatgttcatgttaagtggagcattaatgataggatcatttagctaccctctaaaatcatataatgaatcacaaagtaaaattaaatcacttttgggttgtggttgtgtgcttttatatgttatttttaaagctgcagcttgtggcttaaaagaacacatacttcctttaacatatgctccaggtacatatatggtccaaaaataaagtcttcactgaacacgatattaattctatggtatcattttaacaaaatttgacagtttcacatatatattttctgggaaaaagattagggaattttttcacagagtaaaataattactcagaaaaatgtcaactattttttattattattcaaacattaaaattctttatgatttttgatgagataattttcttaataaattgtaaggagatttttaataattaaaattatttaatttaattattcacatgcataatcaaatatgcccttaattcacctcctgtattcaaactccaaaaggatattcagttgtgtttcttggtcaacaagacaggtgatatctaaatttcacattttaaactttctgattcagggaatgcaaaatttagaatataattatattaaggagtttcaaggcattctcagtgtagagagaattagaacataatatgaaagaaatctaaggtacacaactgattgttttcagaccaaggagtaaaggataattaagggtgggtagataaaataagtcaagtgcctgagtccaaatatatagggaggtctgggagaaagagagctagaaatgcagagacaggtatgggaaatgcagaacaggagccatagcgacacacttcactggttacttagggagcctgcaagcctgtcaaagaatattcatctatgaacaattccgatgtgacatggaggcttggtgatagtagaacatgaaactggtatttttcttgattcttcatggcttgcaaatggtatgcaaaaggccagaagtccccacttgctaagtaggtaagagaggctgcaaaggggtaagaaggtgactggcagaagttcagaatcaaatgaagaaaccaaaatctatctaaattttgagtccagaggtagtcacaggaccaattaattcttagtccacagtggcaaacacaacatccattgcattttgactcatcacctaacttccacctcctagtggttatggaagtcatacatcccctttgtcttgaagagacattttaaaaatggagaaatgtgaagctttatgcatactgagttgggagatgtatgtaaagggaaatgttttaggtactgaaaaggactatgtttacctgactgtacatcaatttggttgtccttttcttccccatttgcaccctctccccatatccagcttagcagatgggaagatttaagaagacatgatcagttagtaataatatagaaatctgttagttacatatatatatatatatatatatatatcattaaattaggaatgcatagtgcgtttgtttgtgtatacatatgcatctctgtttgatgctctgttttatgttttcaaaatttattttccaatatacttgaaagcagaatgcaaaagagaatgccacttgtttagaaaataattgatggccactttagaactggttggatgggtttctgtagttgatggctggtaagttggtcgttttaatgtaatcaatagattcctagtttttgaagacttacaaagaaggaaatattcaaacctactctggctggtcaagatttaatgaaaagatgaggaattgagccaagatctacacccctggctacagttactgaggatgatagtgttttgctttctttgtatacatatgtactgtaaactgtataactttcttattacaacattagagtttaatttaaacggaactaaaagctggtaattcttacttggtggaagacataacttcctttagaagtgaagttgcctgtggatttcaattccagcattactcatttactagccgtgtgacattaaataacttatttaactttattatctcctgggtttcccatctacacaatggcaataatattctctgccttcaaattttgttaggaggatgacataattaatattcagaaccctgtgtcacacctggtgcattatcagcacaacaaaaatcctttccttttccctccttccttccttccttgcttccttccttccttccttctttccttctgctcttttctttcattatttttcttatattgtaatgaaagagaatctgtgaaggtgttagaagggacatactgtggctttgaaaagtactaagaaggaaaacaaatggtgttcctttctttattaccaaaaacttaaagagcatcgatggactcttcaagggttcaagagaggaagttcctacaactgaataaaacttagttaagaatcgttgataacaaaattatttggagagtgcaggaagcatctttctttagaggcaaagactgaagttgaatgaaggtaggttttttgtaatcaaatacacagttatcaatagctctagagagataattaaattaaaagatttatgtttcttaatttagtcatatatataacccaatcatatattataaaatcatatacttctcaatatttcttgtgttaatttgacagatatttgttatttactgggttcaaagaccactgaagatgaagcaatggtttgtttcattgaaatacattagaaaatctggagaagtcatttaacaattttaataaataattgaattgcatacaaagtgcagttaaatagaaagttttttcctgttaaaattctagatttttcttcttttagctgtacttatggaggttttgctattttcaacacataatgcatgaaaatacatgtttttcattacattaagcaattgaatttagacaaaactatgcataaagtcagatcttctcttcctctcttccttgttattacctagtaaaataatgtattaagaagagcaattcaaaatatgcttctgattaagttttacttgtggcagcctgagtaaacaataaccacaggcaaaaatgatatgagaaataaatagctgcctgaatgtaagccattgatacacaagatatattcttaccacaaatatcacaatctactttaattttataaacttttgtgtattaaaagtgcaatgtacaagacttccttagtggatttactaaatctttacttgaaaaatgacattctcttcacactataaaaatacctccgaaatggtgcaattccacatgcattcaacagtctttccctttccagagggcaaatggtctttttttccggtaggcactgtgtactccccagagttaattctaaaattcaggttatatccatagagtatattttgtaagaatatgaatttttgtataaaataaatatttcaataattataatttatatagaaatggtaagcattaacagtgaacacagtatatttagaaaaaacgtatagatagcagaatgcagtttgtgtttacctttaaattttgtatctttatcttttttgctatgctttaattttaatatctctctttctagtaatagatatgtgatattttaagggtcttatctgagagaagattaggatccatgaaactactatttgaagtaggttgactgaagaaacagcatagtcatagtttgaaataatacaaatttagaggttttccttttttggcatatgtgcattcatattctctaaagaacagataattagtaatttgaaaaacagtgcaagaaacccattacaagctgaaatcagaattactggaaataatgacattttaattgtgctatctttaataattccatttttattaaaaaagggaattatattttgttctaaggactcattaaatactccatagtaagggagactaaataatcataagtgaaaagagagagaagtattttaaagtattataaattgttacagtagtgaacagcttgacacttttaaaaataatgtaaagctttcctggtttaacttggactttgaatcaagctccatactaattaagatgaacaatttacctacaatacttcccatacctaactgataagaaattaaaaattcaatatagttgacattatatattttctatggattaaagttgagtataaaataatgaaatacttggaagtttgtaatttctcaagttaaatagttttcaggcaaagggaaattttaaaataaaatacttaaaccatgtttcctctatatatttcttactttcttggcttagctttagggcaggcatgtggatacattaaaacactttttaaaactgaaattctgcggtgagtgcacaaaactagccataacatccattttagcataatcaaatgcaaattttagcaaccattttgagagtaatacatgcactccaggtttttcagcatgctattagatttagtagtctgagatgagagctatatgtaagaaaataaatcaaaaatatattttgagtttctctttttaaatacatgattttactagccaattaaaaatgagtatggaatgttgaaattttatgtctaaagttttctaatgtttatcagttcattaaaaataaatgcatataaaaaatctgctgatttccattcaccgttgttatatgtatcacagaaatagattctgaatatactttatattacaggttctgttcatgtgtatgatgaaaagcttattgatttatgtttctccttccccatggagttctcttttcccctttagacctggtcccacgttagcatctcttttagaattgcaccgaaggcagaaggccattatcaatcaatcaataagttgggttagcatagtaatacccgattcctctcacgatcttaagaaaatttttaaatcatcccagctccacttattgatcccttgtctgacactatgtacatgaatatgtatttaaatacatgcatgcatatgcatacatgtaaatgtgtgcttaatatatgttatgcatatgtaatgtttgccagagtccttcagttatcattcaagcaaatattagaaatacaacaaaattgaaataatgtactagatacatgcccttaatattataatatataatggttctagatattcatgggtatattttggtccttggcaaaatactcttcacagctttttattcagacatgttttatccccaataatttgattcaagtctggccataactacaaagtatagtaactgtgaacatatcaagcaacttaaattaagatttaaacaagtatttcattttactaatagcattttaaaagactatgtaaaaaagagaatgctaattactgttttaagcctcaaattatttattaattgaattgagaataaagatttttttccccttacagtgtactcaggtgtttatagaatgccagtggaactacaagggccctactgtacatggaggttttaaatttttcatccttacctttactgacaaaatataaaaaatgtgaaagtgaaaaagaaatgtgaactattacaagttgggagtatctttcttttttaaaaaataacttttatattggaaaggatcaaaagtgacctttttagaaaatccctttaaacatgttccaccctatcgaaactgcagtacaatgtatcatataagagatgcagactgtttgagatttccagttgcactatgtctgagctgagtaaccaagtcaagttacctcacttttcttactctcagggttttttctttcatcagtaaagtagaagtagtaatattatctacatcacagaaatgttatgagaattaaatgaaagaagctcgtaatatacaactcaattcccagtctgtataagagaactaaaaattttagatgatattatctatattattgacattattaaggcaacaaccgtccagtttgacattatttataaggtattttattactttagttgaatgtttatattatgatatggagcattgagatcacaacataattttaaagcctatttttaaagggagtattaatcatcagacacacagatattttttgaagctattctccagaagagtctttcaattaaatcattttttttttttggccaagctaaacccttgttccgtttttaacatcatactgtctgctgtactaaccagggtatgatgatggtaaagcatcaaaaattagggttatgcacacattaacattctcagtaaaatatcgtggaaccaaaaatgatggcttttgcaaactaattagtagtatctgtctcccttcgggtattgaatgcacagtgataaagttacctatctttaatgctggaagaattgaggaagacaggcatgttttggtctctagcactgacactaataatctggtaagcctcgttttgtaacatcggtcgattcagtataatttacagtgtaggcatcactcatacatttcctacatttagatcaccacaggaagcccttgttcctggagaaaaagtgactgaaaagaacatgtctatatctaacactccctaaggaacctatacaaattttttaaatgtcagtttgatttttacgagtatctctttaaaaagagctattgtaaaatcttgttctataggaaatataatttttgtttgttttataatagttaatttaagactggacatctatcatgatgacaagttgctattgatagtactgtcgacataaatgatctttccaattaaaatgctaatgatactaagtatagactagcaattatataacagcaaatggaattcaacatatattttatcagttactgactatgaggcactgtaatgttttataaatgagtaacccatattctcttcattctaaaagcttattctccataatactgtcccttgtctgatttccacacattcagaagtaggaaataagcagagggaggtcatagagttcctgatgaccaagagggtaacaagggagccccaaagtgtccatgctccagataaaataatctcccccagatcccacagatccattaccaggaataaggagggatcaggaaactccttctgctccaaatcagaccaattctccccataactggcatgaaggagggggtccctgaatcctgcaaatctcatgcctcctgctcagcaattatagatttgccacagccatactctttgagaacttcagaattactctaaaggattacatttattttctcttattatcatattaactaatacaaaaagccggggactcccaagtcactcatatgctaaacattaatctcccagtctgaccctaactgccaagtctttttgcactgagactgtaggactccaggtcacttagcataatttctctatactcattcttttatctatgtattgcatttagcttcttgcactgaaatatgctctgcttccatgacactgcgtctcctgtggccttcaccattgtgattgttttctctttccaaaacttaatactaatacaacagggccagaaggtgagccctttttctcttcctcctgtgtgaaactccctcagatttaaatatcattattattagagttcacaccctctaccatgcatcccacctgttccttgagggttttagctgcccttcactgccaatttctgcaacgttttgtttctgtcataatccttggacatttatgtattcatagggaagattcttctaataccccgacctctcattgtgttgacttctccaataacccagaggggaaggttgccctcttttctatctaagcattcacaccatggtcatgtcttagacattgtcattaccaatatctataattgcttcataatttttaatttcagccatcccacctttaatctggaaatttaatctttccagattcgagaatctagcaccctctctttcctccaacctctgatgcctcccatcccaccctctttccttttttatatgatgaatgtagcattattttagagtaggaaatgaagcaattacaagatatttcccccaagatttacctgctgtaattgttcactggttctcaccccctctcaccttctgagagttactgctctagtagttgtcctctgtctctatcaaagaggtttgtttttccatctttacaggaaaagtctcatcagtttacaaaaatgtgtttattgttcccataaattaaccactgtaacaagagaagattcttttgagccattactgccaatttctctggacttttggacagtaaaccttatcaaaatccatttttgtccattttatttcacttcttccacttttctcttgtgtctaccctaatcagaatttcggctcaacctacccaaaccatttatcctgttcttacaaggattagcaagaattttcatgttgctaaaacccatggtcagttggtttgtttccgttccaatagtaatatccatttgcatttattgaggacttattaatgtttcaaagtaaaataaattattaaatgtgccaaatgatgtgccttaagcttatcatttgattttccaatatcacccagcagacagaaaatatctttcccagtgcatgaaatatagctactcacttcaatgttacgggccaaattaggtccaatgtgtttccctttatagtggttctttggacatattatttaccacaagttaatgagactaaattttagttcctaaaccaattatttgtaagggaatacaatgattttgttttatcacaatctattattggaagtaggaaagtattcttttgttttattacatttttcttcattttttcttgagattcacatgccacatggtatataattggatatttgatccaaattaggattctactaagaggaagaaatgggggaatggagggaatagattggatggtagggaaagagatcacaggatgttagatcatgtacaaacatcaaattttggtgacttataaattttataactggtaaacaatataatgcaatatttattctagtactaacatttttattatatgtgtttaatattttttctttattttttgctaaataaaatttgtcctggtaaataatgcttttctctgtctagaatgttcctctaatcttagttaccttataggtacttcatactttacctttattcagcattaattcaagtaattgctaaatatctactcttgtgcctagtactctattaagctcagtaaataagtgagaacctgactagtgcctcatttcagggacatctttcctatctacttggatataatatcaagcattctgtatttacatcttcataagtgttgcatgattttgattattcacttatttataatcacatctttgatgaattttcccactagactctaaagatagccattctgacaattaaccactcagtcatgaatacctggttatattaatttcttagagatgttgtaataaattatcacaaactgggtggcataaaacaacataaatttattgtctcatgtttctggagtctggaagtccaaaatcaagtagtctgtggggccacattctctctgaaggacatggaggaggatacttctctacctcttcacagctttagaaggttgccaaaaatctttgtcaaattccctggcttatggatctattactccaatcttttcctctgtcataacatggcattcactctctgtgtctctgtgtccaaattttcctatttttataattatacttgttattggattactgcccacactaattcagtgtgacctttgttctaaatactctattttcatattaggtcacagtcataggtactgggcttgacagaattcaacccagtaccttgtagtgtctggaacacagtaggagctcaaaaatattattgattaacagattgactgattgctttttctctacagatgctgcaggcatagagtaacttttcactttgcctgaaatattataatttcataaatggaacataatttccattcagttttaagggtaactcactcagagaaggaattccttcatcatttatgctaagttatgtttactcagcctctactcgcacatatatgatgaaggagaatttacctggggaatggcttatatttatttgttgctcttaatattataattattaattaatgtacatatacatgtagaagaagaatacataaatgtagaagaaggctttttataaaatattgctctgaccacaatagtttaattttggatttattaattttaaaatttattagaattcaaaggagaaatacccagaaattggttagatattcaagaataaaattcagtgaagaaatctagagtgaagatataaatttgtgagtcataatcataaagatgacatttaaagccacgaagctggaggaggtcatcaagaaagttagtgttatcaaagtaaaaagagaggttaagactgagcattgctacacttcaaagcttagaaaacaaatgagcaagcaaacaaatgagacataggaaaagcaaccggaaaaatagaataatcaggacaacatgttgtcctggaacccatgctcacctgaacatccatactaccttcaagatttctcatacagctccaactacagacctgtcctcacctttcaccttctcataatggtctctagttttcattgccttcctgaaattttagtatgcaaaattaaacagtgacccaaattcattttgacagagcagagtacaatgcggctatcagttcccatgataaacacactataactctattaatgctgcctaggattaaattagcttctgctagcttgtcatattagtttctttggttaactgaaattcttgagatcttttgcacatgaactgttttcaagccaagtttcctccatcctctaacttttgttattaatttctagcaattatatccaaaaattttcatttatccttattaaatgtcataatttggcttcagctgatttagcctttaaaatttattgtgaattttgattcagcaataagatataatagtgatggttctgactagatgtctgccaaatgcaaaccagaaaagcatgcattaattgccctttccaattcatcaataacaatgatcagaagagatgaagattagaaacctctacccagaataacactgattaacactaagaggtgacattttttggtggtgtggtggtgcaaacgttggcaaataattttaaaaatcaaaaagataagtcctgattttttctcactttaaaataatgtttatgatagtaaaattagagaacaaaagaaaatataataaacaaatttttaccctatggcatagctaagaaatagctagcaatatgagttgtaagccctttatttgtatagtcatttaattcttaatgtaattccatgaactatatattattcacatttttattttacagaagagtaagtgcaagcttagggaagttagtgaagagactccaattacccatccaagctcaaaagatgaagttgatggatcacctcaggcatctgactccagagctggtgtacttattcagtaggcaatattgattccttacaaaattagtttgtctatggaattcagtgcaaagttaaatctataagtaatctcactaacagagatttaaagagaattactataaatattttcaatgatatatttaacattttaaatatacttatttgtttagacatttaaaataataaaacttaattattaatatatacatttttttaaaatctggtatttatttcctttattcccttatacttaaaaacagatgaaaaacagtcccatgtcacaagtacagacctgcagcattgattttagttgccccatatctttgacttaaaggatgagtcattatttttttttgtagtttatttttattattttttttttaagtttttttttcttttattattatactttaagttttagggtacatgtgcacattgtgcaggttagttacatatgtatacatgtgccatgctggtgcgctgcaaccactaactcgtcatctagcattatgtatatctcccaatgctatccctcccccctcccccaccccacaacagtccccagagtgtgatgttccccttcctgtgtccatgtgatctcattgttcaattcccacctataagtgagaatatgcggtgtttggttttttgttcttgcgatagtttactgagaatgatgatttccaatttcatccatgtccctacaaaggacatgaactcatcattttttatggctgcatagtattccatggtgtatatgtgccacattttcttaatccagtctatcattgttggacatttgggttggttccaagtctttgctattgtgaataatgccacaataaacatatgtgtgcatgtgtctttataccagcatgatttatagttctttgggtatatacctagtaatgggatggctgggtcaaatggtatttctagttctagatccctgaggaatcgccacactgacttccacaatggttgaactagtttacagtcccaccaacagtgtaaaagtattcctatttcttcacatcctctccagcacctgttgtttcctgactttttaatgattgccattctaactggtgtgagatggtatctcattgtggttttgatttgcatttctctgatggccagtgatgatgagcattttttcatgtgttttttggctgcataaatgtcttcttttgagaagtgtctgttcatgtcctttgcccactttttgatggggttgtttgtttatttcttgtaaatttgtttgagttcattgtagattctggatattagccctttgtcagatgagtaggttgcgaaaattttctcccattttgtaggctgtctgttcactctgatggtagtttcttttgctgtgcagaagctctttagtttaattagatcctatttgtcaattttgtcttttgttgccattgcttttggtgttttagacatgaagtccttgcccatgcctatgttctgaatggtaatgcctaggttttcttctagggtttttatggttttaggtctaacgtttaagttagacctaaaaaatcaatccatcttgaattgatttttgtataaggtgtaaggaagggatccagtttcagctttctacatatggctagccagttttcccagcaccatttattaaatagggaatcctttccccattccttgtttttgtcaggtttgtcaaagatcagatagttgtagatatgtggcattatttctgagggctctgttcattatttttatcaatattctatcatctaattttgtttcttatatgataaatctgagaaaataatctattacaatataatagtaattataatatagtggtttggaattgccttgtttaaattttgttcagggtgcttcatgaagcagtgatataattttgagtgaattaatttgattctctaaatttcagattgcttacttataaaggatgtgataacagtattagcttcacagagttgaggtacaaataaagtaagactgtatcagaaaaagacttggagtagtgcttggcaacagtaagaactattatttttatttttataaattatctcaatatttctatagactaagctcctgaacgtaaaattttgggaatttattaatatttatagttttctacattttgatatatatgtgatatttatctccagcaatattttacagattctattaaaactctgcaaaagcaaaacatacctaaatccattgatatagatcagttttcattacttaaaataatgaattaattacagtttgattttcctagaagcaaaatgtatgtcttagatttctttctgtgaaaatgaaattatcttcaccctattttgtataaaacataaaataatagattttctttagatccacttttgatgactacatattcatgacactatactaacaaaattctcaaaaataaaacctgaagaaaaaggaaggcaatgataaggcaatgaaaaaaaaaacatttgtggccaatattatctcattattaaaataatgttaaattatatgatatatatgaaaccatatgacaaaagagaagattccttagattggaatcttggccacattattaatgtgtgttttatgatgttacttaacttctctgtgtctcaatgttttcatctgtaaaactgggataactataataactacttcatgaggttattgtagtgtttgaatgggttaattcatgtaaagtgcttagaataagaagcaacacttaataagcacttaataatcaataacatttattattttataagcctgtctgtgaaaacacttccttgtgattatcaatgatatttaatatctgtataatgtttataaattcagaagtgttttttcacaaacattattacatcatataatcctctgaaattagtgttattctgactatctatgctaagaaaaatagagctgggaaatactgagtaactttaccaggtaaaatggattgcaaagtggcaaataggactcctttctagggtttcttatttgaaatttatttcactactcatgtttcatttcgcatattagcacaaaatgatatactctctaacactatggcatacatacactaacagaaatgaatctcatatgagtaacttatagtttatatgttctggaaatttttagggaacaagggtaaaatatccagaatttagatagtagttcttgctaggtaggaaatagctacactgattgcattctcttacgagggaaatgtattgttacaatgtcattgtgatgagttctcacttctgtatgtgctcataattaccaaatgccataatattgcaacctaaaggtggcaaataatgacttccatgaataataaatcaggctttattgctatcttaatactgtaacaagaaaattaagttcttctgaatctaatggctcaataaaaaatttaaaaacaagaggcattactttgttaacgatctcatacaaagcacccagttagatactttcctgatcaaaatgagttgaatagggaggaaaaaaaatatatcaggaatggaagagtgccaatatactaatttcaagggcctcctttcatataccagttccacctgcaccactgtgaagacacaaatcaatactgtatctattctgagctgtcaatttgccaaaccaaagtggtgaaagcacttgaggaaattttgaatggggctggatctacatggtcacagtgaattgaaggaactgtggcatttgctcttcccggattggtttggtgtggttcatttacagggcttgaacttctaggctcgtaactaggcacattcacttggatcttataaactgcaaagacctactggaactgggctttggcaaattcagtggctgctaattttgtgaaagaaagtatacaatgataatttttttaaatatttgaaagcagttgaagttcattagaagggcatttgaattgtcagataaaggacagctttgaatggcatattctggaaggagaaaacatttaataaatatgtaccttgcctcggcatttgcccaaggtagattgtcttttcctcgggaagattaaggaatgagtgtccgttttcctcacctttaaataaatcaaatctttgctcattgtgatcttttgcaaaaatttatacttcggattttttttaaacttcttgcactactaagttgaagtatgaatttgctaagactcattaaatgagtccacatttctaattttcttagcagctattgaatatgcagttggaaccagaaacagtgttttcatttgtgatggtgtattaggagaggaatgtaaatcccagttgtgtgacaaagaaggatgtgacaggatttctaagtgtgaagtaattaggaaaagttgagagaattaaaaaacaaaaatcttaagtctctttggaagtagatacatgcatctagattttttttttctgattttgtatttcatgtcatggaagagcacaaatagaaatggaagtttcactgtgatacaaattttcagacttccagaagtagaaaaatatattttaaagcaaaagtgttactaatagtatagccacacgtttgctccaaggaataaatggtcgtatgcaatatgtgtatctgtttcgtacatgcacatattgtttttggccactgattatttgtgcctttgtagctataattttatgtgtcttaagctttatccagaggatttaggcttaattctgacaaatacattaccatataaaatatgaagaagttaatttccacaagtaatctgtatgaaaaagaaaagaatattaaaatagtcttggaaataagtactgatccatatgcctaggacctacaagtcatccgtgtgtgttaaatgaaattggcctataacatgaatgagaattagctgatggatttaatgaaaaatgtgctaatcactgccattcatttacattattattatttgatatttaatgaatctttggcagaagtttatgaatatttttatgatttgggctaaaaagaaaaaatggctaaggggaaaacttaaggtcattgagatgaccaattaaaatattaaagctatagtaaagttagacatattaatttctgaaaatggaaacaagacacaaatacatgcatacattttcttcattttatgtccctttacaatagtgaatgagaattatacctcattataaaaatatgaatactactcctgaagctcagggctggcttggtacataattgttagtgaggccaaataatttgtgctcactgaaagtctgtgctgccacaaatgctaagaattttgcacagatcgtcggtgtttttttgttttgtttcgttttgttttgttttgttttggtggagggaaaggtcaaggaagcaaaatattgacatagtgagaaactaggacaacacacgtaaattttaaaaaacaatttaagaaaacagacaagaatataaagctgcttttataatgggtgcatgaatagtcaggcaacatgatatcatggggtatagggagagatgaggctcctgcaggagtttagacttcagcacttcagctctagcccttaatctatcacttatcagtgtaaccttgaagaagtcatctagtatttttgaggctcatatttctcaatggtaaaaaatatgcataactggacttcctagttttagagatttgtaaatatcataatgaggagggataaaatgtgttatttatgaaagatgagtggtgtgatagaaatgagcctaggcattaatccccactaatttatttgctaattttgtaagctcgaacaaattgtgtttttttttagaagttctgctatctgtaaaatgaagaaataataacacctaatattaagtgttgtcattattattgatatggtgaatctaaaaaccctgaagtatactctgcctgtagatttactcatatattaatacaatttttcttaattcagtttgactttgggatacttttactgatcataatggatctaatgtccttcatttcaatgtttccttgccttaaatctcagtcctaggatgtcttttctgaaacctaaatgtctatctccagaatctcattgagtcccatagtgttaaatgcaactattttctgaggtagatgtagaaaatttgtttctcctatacagatctcccttcagacgtccattccaatatccatctactttgttgacatcttcctttagatattaaatgactaccttaaaattaatacattgaaaatggagcttttgacattcttccaaaaattctaccactttctctattccctcaccatgactcagtgacttccgcacttttaaagcctgcagatcattcctggtatccccactttccctcattaaccacattgaatccattaaaaaacccttttaagtctccagtccatacattttgctccgtcctcatatcccaaacttagtttaagatatcatcatatttgacctggactattgttacaggcatccaacaaggctgagtaaattcaactcagagcagcaaaggtgatttcttaggaatgtaagttagatcacatctgtatcttaaataaaaatattctttttttttttcttttttcttttttctttttttttttttttgaggtggagtctctccctgttgcccaggcgggagtgcaatggcacgatctcagctcactgcaacctccgccactgggttcaagcaattctcctgcctcagcctcctgagtagctggaattacaggtgcacaccaccacacccaggtaattttttgtatctttagtagagatggggtttcaccatgttggccaggctggtctcggactcctgacctcatgatccgcctgcctcggtctcccaaagtgctgggattacaggcatgaaccaccgcgcccagccctaaatctcttattaacctacagatttctttattaattgtctctttccatctctgcaaattttgcttacaccattcttctctcccctgctatcccctagctaccttgatcttcaggccctgttcccaggctttttcatttgtttatttaatccagaatatgttttcctggcttttctcatgatagtctcattcccaccttttaggtcagccctcaaatgtcagcatttcttgactgttgtatccaaaatagaatctcctactttttaagttattttttttcttcctccatagcaataatctcaagctgtaattactttgtgatcatatattttcattggttattgtttgtaccttttcttcctcagtagaatgtaaatcctgccaggggaatatctcaatgtgccttttatacagcaatattcattacagttgccaagaatactggtacttcctcaataaacacatatttaattcataaatgtctgaataaaaatgtagtttttttgttttgttttttaaatcatgtaataaaaatctggtggtagataatccaattttggtacagtggctctgtacatttccatcttttgtatattgttttcagcaggtcagcttttgtacttaaagttatttttatcgagaactgtgaaaggtttgagattttgctctgtttgtaatttaagtaattaacctgtcacaggttcataaatgctgaaggaagacgtgagatttctgggtcaggtataaaatactttgtgattcatggcatagcaggcagcatgaacttcatgtttgcattggttccccttgccaagcaagtcctactggggtcatgtgaacagctcagatagatgccgcacacactcaattagtgtcacaactgaggaaccccaagccaggaaataccagatcttataatgggactgctagcaaacttgactcactgttgcattggaggggaccattattctggttctagccagaccacttaatttgcaaaaaaatttactggatagaactgctctagagcatgcctggatatttgtctctgcctttctttatcttcatgtctaaaaagagaaaatgattttaaaagcaaaaacaaacacaaacattaacctttaaaaagataaattattttactaatgtagcaacacacatatgttattctggtctgaaaacgaatctgctctcatcccaaaggaatacactatttctaggtttcaagactatttgccatgcaagcatccttcaaaagacaacccagggcaaaagtctttataggaggaatagataaccccatggagaattgcctacaatggtctgatgttgcaaaggggctactgtagctccaaaatgaagtcttcacacaactctgttcagacaaaaagaacagagcaatgtaaaagaaacattttttcctacagcatttttgttttttttctgttagtgatggaagtctttcagagaggtgccaggagactttctgttgagactctggccagaattggatcacatgtttacgtctagacaaacaatactgtcaaatactgtctagaaggaggtaatttccatgtttggtttaactttgaagtaggttttgaggtcaagaagtgtgagaccaccaactttgtttccttcttttaagattgcttcagtattccgtcccctgagattccatattaattttaggatgagttttcatatgtttgcaaaaatgctgtgggtatttgatatggatatattgaatcaatatattgtttagagtagtagtgttatcttaacaagactacatcttccaatcaatgaatatggaatgtcttttcaattatttagaaatttaaaaaatttaatttctttcggcaatattttgtacttttcagtgtagcttccttggctaaatttatttctaagtaatttatttctgatgctgttgtaggtagaatagttttcttaatttcattttcagatttttcattgctactgtataaagacacaattgttgtgagggttgattttgagtccttcacttggttgaatttattagctctaacactttgtgtgtgtgtatgtgtgtacttgtgtgtgtgtgtgttctttcaggttttatatatattatatatgtatatatataaatagcaacagattacatatatatatatatatattatttcctctgcaagtagagatagtttcacttcttcttttcagtttggatgtaatttcttttttaaacctaagtggtctggctagaacttccaatattatggtggatagaagtggtgaatgcagacatccttgtcttatttctgatatgagggagaaggctttcagtcattcaccattaagtattgtgtttgttgatttgatttttaaaggttagttttattgccgtctggaaaacggtctaaagggattaaaagcaggtgttccagttagaaaacacttacagtgtttgttgctcagtggtttgagaaatggaaaaaataagcagacagattagagatatatgtggatgtaggatgacagtatttctagcatgtacaggggtggttaggcatgtgctttagaggtgcactttataatatagcaaccattagctataggtggatattgaaaattaaaaataatcaaaataaaattatattaaaaatttagaacttaattaaaattttcttatttgttctagtcacttttcatgcattcagtaccaacatatggttaatgaccatcaaattggaggatagagatataaaacaatttcataattgcaaaaaaatttactggatagcactgctctagaccatgcgtggatatttgtctctgcctttctttatcttcatggctaaaaatagaaaatgagtttaaaaacaaacacaaacattaacctttaaaaagataaattattttactaatgtagcaacacacatatatcaattaacatcggcagaacttagaaggatttgattatgtcaaaggttcaacgaaatagattcactatcaattaatattcataacagtattttttggaagaaagtaatgtttgatgtttaagaaattataatatgatatcaaactttgtatttgttttctagttcaaaacaaattaacaattacttgtaattctctgtttcttcataaatacaatggggatatggtaattttgagtacctgcctggatttttatgagaataaaacaaagcttacagcagcgtcttccacatttaaaatgcatactaagtcacaacacaaacagatatctgttaaaaccagttataaataagtaggcagacagatgatagcctgatttcatttaacagcactgatttatttatgcctgcatcaaaatctgagttaagtttacagctttaatattgaattttttaaatgtgcattcctttgactgcattgaacgttctagatatgatgcaatttctagaaagcatttagtcaaaacagtgaatgactgaaacagcctcagaacacccaaaggtaatcagctatttaacctgtttaggtcttgtttctcagacagctgctactatattaaaaaaaaaagctatgttcataaattatgcctactaaaccctgaagaggcagaattagttctgtagttacactgttctgtggtcttggcaactgtgagtgccttaaaatttaaagatgtccacagtcattagaaggattctgtttggttaaattttaaatatacttttgctgtcagaaaagcctataatatatatgcctgatgattttttaatttttattatgatggagattacattttcatttaaatctaaaaatgtcctgaaagggaattaaaattatccttatagaaaatggaaaaacaaaatcactaacatatttatttttatgtcctcaaaatagtgaaaaccagtaatgtttccagatgtcaaatatatcagagggcctttttgaaattattctgtcattattacgagaataaaagatgaaagtattttaaaattgaatttccatacatgtgtatgaacaactgtaattaggttagcagccaagattgtttcttcagaatccagttatatgaggtgatgaacttgtgactcaatttatataactgcctgttcatatgtgttgcctattttctgttgggttggtctctttcctattaaaatatagagatttttataaattagatatgctaggctttttatctgtagtacgaactgcttttattcagtttgttatgccttttgcttttgaatacattaattggggataaacatatatttttatttctataaagtaaaaatcaatattttcttttatgatttttacattttgaagcatagttagagtgctcttttccagtacatggtcataagtgacatggccttgtcttttacactattattgaatatacacacatacacacatatatttatatgtatacatatacacatttacatatacaaatatatacaaacatgtatgatttgtatgtgtgtgtatatatatgttaaaccatttgcgtttcttagtgtgagatgagttattgacccaactcctttatttcctaaattactaccttgttgtattttcccaaattactacaaaaaataccttttatttaaaattccattatacctgatttatttgaaatgctacctttatgatatagcaaatttctctacatatttgggtctatttctgaaaaattagtttactctatttgtctgtttatccagatgctattaacccattttttaaattattgagtacttaaattattgtttgttctaatggacttaatgtcccttgttgaccttgtttccaaaattttcctggatattcatacctgtgtatttttccatatatcctgttcatgacagctttaagaggctgtttctaactttttctattattttcatttgtctcattctgcttttgtgattgttaaaaatgttttaaatttttcctcaaatgaatgtttttcatttttcattattttcatgctttttgttcttattattgttatttatattataaataagttgtctctcacattatgtcttctatgggtctttgtgtctatacatgaaggttattgatttctgtgttttaatttcacaccccactaccttactgaattctttgattgtttgtataagtttttcagtttactctagtgaaattgccaagtttaaatcatattattcacaaatattgatatttttgatgcctcctttttagtgtttacacttctaatttctcttttgacgaattaaattggtaaaaacatctagtactgtgttggataataatggtgattataatacttccatgttcttgacttagcaataaagcttccagtattagcccatgtcatctatatgatttttgggttgaaacatagatagatagacagatagtcagagagacagacagacagatagatttcttttcacaaaatgtgtgtgtgttatgtacaattgattcttattatgttatgtcctataaacttcacaaatagagatttagcaaatactgaaccattgttcctagtataatttgtgcatatgtatgtgtacatacacatctcacatagattataatcttgaaccctaaaacaattcttccaggtaaattatatttgctttattttttaaaagagaaaatgaggttcagaagtgttaagtgacttgcttaagaccatgcccctaagtgtacccactttaggattcaaaccctgtgcaattggctccagagcagtaatagcttcttgggctacgctacactacactgcctcctactgtctctgctcatacaaatatagacagtaggaggcagtgtagcatagtccaagaggctgttaggttggtgcaaaagtaatcacagtttttgccattacttttaattgttttacttttgcacgaaccacaattacttctgcagcaaactaatactactgctcctccacctgtctcaccccctgtataagagctgaagcaaaaagacagagaaatgccttgttaggcctcaactgggaatgttgacatcaaaaactcaaagtgtttttgctctgctgtggatgttctttgaatgactgacaaaaggctgccattattagttttggagttagaaatatattctatccattctatccagcaagcaaaatcacaaatgtagaatttgcaaataatgaagatcattggtataaatatgtgtgtgtgtatatatatacacatatacacacacatatatacatatatatgtacacacacacacacacacacacacacatatatatatataattaaggaattatctactttattttattttttttagacaaagtatcactctgttgcccaggctggagtgaaatggcgctatctcggctcactgcaaccttcgcctcctgggttcaagagattctcctgcctaagcctcccgagtagctgggattacaggcatgcaccaccacgcctggctaatttttgtatttttagtagaaacggggtttcgccatgttagccaggctgatctggaactcctgacctcaggcgatcaacccaccatggcctcccaaatatctattttaattttattcagtgttttttagaccaataattattgttgaattttaacatattatattcagtggccagggaggatatcattctaattttcttctcagctatttaatgtcttggggatatttaatgtcttagatatgtaatgtttacaaacattctgctatcttagaatatacccctgttagtcaatattctttaaatgaggtcctggaatttattctctaatattttatttagattttttgttgatattactacagagctttgtctgtgaactatttgtttaacatttgttacttttgtccatttatttaaacttgtgtgataaaaaagaatttagatgaaaatatatactctcaaattgttttactattatctgttctttacaactgtctgttttagtgtaattcctgaactgaactgaaattgccttagaaacgattagaagagaggggaattatgacaaggtaatatggtagtcacatggttcaggcacaatcttttctgcacacctagggtataagccactaaataacaattgctgaagggaaagtacattaacacagacctgcagtcacctcttgttacagaggcactttcttatttatttccagcttatgcatgtcttgatcttgtgacagtcagaacctttctggaactatatggggttgtaacctgagcatcacaaagctgctgtttctgtctataatcacccagctgatgtgtactatctcagcagtcagtaaacaccctcagtaagcaaagaaggactttctgacaggatggttcattgcaggatacagtgaaatatctgtgttagtggagcatctgtatcagtgaggtatccacccatggaaatggtcactcgctttgagcttggttcaacaggttgcagaggcaatgcaggcagaatgcaaggcaacagaatgaaggacgtctgaggtcccttccagccttgcaggttcaatgaattcttaatgtctgtgaggtctggattactgttgtgtcctctcttagcctgtcaggcctgcagtctttcacctcttcccactgtgccctggagaagtggtttctgaagctaaagactactctaaaatgctcgtattcactgtgaaaaaccagtagctatttttcaagcagctaagttttcatcctgtgccattttaacattgatgaggttatgaggaagcccctgaagcttatgtcaccgtgaatgtcggacatggggtaatagtactggttgtacagacctcatattccaaggtggagatgtgataggggtcggagactctctgaatgtcttcaggagctgtgccccctatgccagatgcccctggattaaaataattgatatcgttaaatttaacaatatccatactactcaacatgatttatagattcaatgcaatccttatcaaaattcttagaacatttctcaagggactagaaaaacttaatcctaaaattaatatggaaccataaaagacactagtcaaaactattgagcaaaaagaatacccctgtagccgtcacactacctgacttcaaaatatactgcaaagctatagtaatcaaagcatcatgataatggcataaaaacagaagcagtggccaatggaaaggcaatgaaaatccagaaagaaacctacaaatatacagtcaattgatttttcacaaaggtgccaagaacatataatggggaaaggacagtgtcttcactaatgatattggtaaaactagatatccacatgcagcagaataaaattagaaccttttatcacaccatctatgggaatcaactcaaaatggattaaaaacttgtacataacaattgaaattttaaaactactagaagaaaacttagaggaaagcctccgcaacattgatctgggcaattactttttggaaattatgccaaaacacaggcaacaaatacaaaaatacataaaggggattgcatcaaactaaatgtttttgcacagcaaaggaaagaagaaacagagtgagtagtctacctacaaatttggataaaatatttgcaaaccaaagatgtgataagaggctagtattgaaaatatataaggaattcaattcaatagcaattgaacaaatagttcaataataatatgggcaaataacttgaatagacatttctcaaaggaagacaaccagatgaccaacaggtatttgataaaatgatcatgagacattattaatcatcaaattaaaattattaaattaaaattatttaattaaaatacaaattaaaactacaatgatatgttacctcacacctcttagacagtctattgtcaaaaagatgaaaaatatctagcgatagtgagaatgtagagaaaagtgaacactctaggcttggctcttactctcaggatcagagtagctgcaaaggtcagtggcaggttctagttctgtggcaggaggcacaggcttcgccatgaaggccctgccttaccttagccaagccagcctctcccactgccgccaaatatcctctaacctacttttcgcataagtctggttatttttaaatacaattttgatttgtggtgcctttataaagattcaaatgtagagacttctgtattggatagtaatttcttctgaatccactgttatatatttttttgatgatagattcctcccctcccaaatttttctgcttactctacttaatggtttgttgagaattatatcatctccaggacacagttttgatgaattaattctttcttttctggaaaattatccatttatctaggttttcaaatttatttctatagacttgttaaattggtttcttaaatattttacaaatatcttctgtttctataataatttccttcttagactttctctatttttcttgattaggttaacaatgttttatctaattgacttatttattcttaaagaaccagcttacaaaattgtgcttgtgtatgtgtgtatgcattcatggattaatttgacaattgtgaaaatgttacggggatgaaaactatttagaatcattcttgcagtatcttcctttctttgtttgtacttcttcaatttcttcactgagatggtcaaagtgtgtggttcattctggcaggctgaggagtatgatactagaaataaatgaagccaaggagtcttcagtgaccaactccataatgagtttaaaatatttaataaatcagattatttgcaaaagtgcaaatgtatatttattcaggttcctttttattaataattagtggctattaattattagtttaaacattattttaaaaacataatatatttaacattatgaagcattacattgaaatttagatctgaccattatgtcacatattcgggtcagtaagttcatagtcgttataaaacttgtcctggacttaaattttcctagcaagctagtcacagaaagtacataaatactctatctattaaaaaaacacaagaacatacttttttttaagtctatgcaaattagtgtggctgattttatagtattttagaaaacacattgtctttttgtcaaaatgttttgtcattatatactcagagattgtacatttaatattaatgtgaataccttttcaatattctaaaatttttcacatattgatttatgaaagatttttctaaaattttgaagactaccttttttaattcaaataattatttgaattgtacaacctgattacctcctttaatttaaagcttaattatattaattctggttttaaaatgaaatttggaatgttaagtagatttatttgaaaatgtttcaactattatctcatagttgacaaagctactttaatcatgagaataatatattatcactaattctatcacaactctagagattacctattcgcactgaaatatgatgttggagtcccgattataataacaacaaaagatatttaatctcagtatattaaacacttatctcagatatatataccttctttattaatattacagatattaaataagaatacttacctggatgatatggtttagctgtgtcctcacccaaatctcattttgaattgtagttcctgtaatccccaagtattgtggaagtattcccagaccaaactgagggctgggctgctatttctcacagtctaataacaagattcagatgaactagggaggaaaagagtttttattttctgtaaccagttacagggagaaggcctgaaaattaatgccagaccaagtcaaaattacgaagttttccagagcttataaaccttctaatctatatgtctatgcattaagtgtacattcatctaaagacgtaagtgattaacttcctttaatctataactaaggtctgattcctgaagaccttcctctggagcccgaggaaatttacttaatctaaatgggtccacgtgctggggtgattacccttatcttgtctcctgataaatcacagaggtttcaggagttccttcagaccctcaataaacttgtttgtggaagcctggggagtctcttcagacccaaaataaaacttgtttaatcttaaatgggccctgttaagaattctttcattattttgtcatgctttaaggcccaggaaagtcctaggcaaaactcttgatgggcttttgttacatcctagcctttgtataagggcacgggcttttaatatttaacttaaccactcagtcactactgaaacagttgttatggaggcctgcaatagtgagacatggcctgccgcaggagagacccagcgggaggtaatttaatcatgtgggtggtgaccctcatgatattcctgtgatagtgagtcgtttctcatgagatttgatgattttataaggagtctttccccctttgcttggcacttctccttgctgccaccatgtgaagaaggacatgtttacttccccttccaccattattgtaagtttcctgaggcctccccagttatgcggaactttgcattaattaaacccctttcctttattagtcacccagtctcaggtatgtctttattagcagtgtaagaatggacaaatacagtacatcggtgctgggtagtggggtgctgctctgaagataccccaaaatgtagaagtaactttggaactggatgacaggcagaggttgaaacagtttggagggctcagaagaagataggaaaatgtgggaatacttggaatgtcccagagacatggaggctcagaagacaggaagatgtgggaaagtttggaacttcctagagattgttgaatggctttgaccaaaatgctgctagtgatatggatgatgaagtccaggctgatgtgatattagatgttgatgaggaacttgggaacttgagtaaaggtcactcttgctatgcaaagagactggtggcattttgcccctgccttagatatctgtggaactttgaactagagagaaatgatttagggtatttggtggaagaaatttctaagtggcaaagcattcaataggaggcatagcataaaagtttggaacatttgtagcctgatgatgtgatagaaaagaaaaacccattttctggaacaaaattcaagccagctgcagaaatttgcgtaagtaacacggagctgaatgttaaacactaagacaatggggaaaatgtccccagggcatgtcagagacctttgcagcagcacctcctatcacaggcctggaggcctaggagggaaaaatggttttgtgggcgaggcccagggtcccctctgatttgtgcagcctcgggacatggtgtcctgcatcccagctgctttagctccagccatggctacaaggggtcaaggtacaggtagggccattgcttcagacagctttcacattatactgggcctgtgggtccacagaagtaaataattgatgttgaggaacctctgcctagatttcagagaatgtgtggaaatgcctgcatgtctaggcagaagtgttctacatgggtggaatgctcacggagaacctctgccagggcaatgaaaaagagaaatgtgaggttggagcccccgcacagagtccacactggggcactacccagtggagctgtgagaagagggccattatcctccagatgccagaatggtagctccactgacagcttgcaccgtgtacctgtgtacctagaaaggccacatacactcaatgccagcccatgaaactagctgggaggagggctatactctgcaaagccacagggatggagctgcccaaggctgttggagcctaactcttgcatcagtgtgccctggatgtgagacacagagtcaaaggaaatcattttggaaatttaatgtttaatgactgcactattatattttggacttgcatggggactgtagcccctttgttttggccaattgcttgcatttcgaatgggtgtatttacccaatgactgtaccccccattgtatctaggaagtaactaatttgcttttgattttatagtctcataggtggaaagaacttgccttgtctcagatgagactttggcataggactttcgagttaatggtggaagaagttaagactttggggggctgttgaaagatgactgtgttttgaaatgtgagaatatgagatttgggagaggccaaaggtggaatgatataatttggctgtgtcctcacccaaatctcatcttgaattgtagttcccataatccccacatgtcatgggagggacccagtgggaagtaattcaatcatgggggcagttaccctcatgctgtttttgtgctagtgagtgagttctcaggaaatctgattattttctaaggggcttttccccctttgctcagcacttctctttgctgccaccttgtgaagaaagacatgcttgcttcatcttctgccatgacagtttcctgaggcctcctcagccctgcagaactgtgattcaattaaacttctttcgtttataaattactcagtctcaggcagctctttatagaagcatgagaacagactaatacactgagacaaagtaacaacagagaaaaatttccaattattcgatctgatcctttctcatcttacctttctaagtttctaaggagaagctatttttgtgtctaggtgttgcaagatacagtggccatgattctttatgcctcaggggaaggtttgtgttatttctttggaaagccattatttctctttttccagttaccttccttctatttcttacaggtccacctgtatttcttaaagatattttttcttatctctcaaattttgacaggatatatacattatatatgtgtgtgtgtatatatatatatatatatatatatatatacacttgctctctcattgtactcttcgcagcatttatattttaatatacattttagttttataatgttataatattcatttaatattatagcactattataatataatattatattgtgtattatattgtattatattaattataatatatttttactatatcattatattacaattataaaatatattaatatattttaatataattgttataatattaaattaatatcataacaaaactaaaatataattatattgtaattaaatgtacatcacattataattataatataattatcatattaatcatataacattataattaatattataatatttgtttaatacctatctcccatgaagaaatgtaagcttgatgacagctgggattctgtctagtttgttcagaattgcaggtttagcacccagcagattaaaggcatagaatgtagtaaaatcaatgcttatatgaatgtgcatacaacggaatggatggatgactggatgactgaacacaatgcctcttttacacaatttccaaaacttcattcacagtggtcatctctgctggggaggagtctcagtttctgttgtgctgtggtcccacttcatgttcaggagtcaggcaggattctgatttgtttgagaactttttataaattatatttactaaagatgataatgcaatcagaaatgattttgtagttagtatcttttaatgtcttaatatttcacaaggcatatttgattttagggataaaaacaacctgccctcccatgtcatctttgattttagggaggtcaaactcttgccagttaactgattccaggccaaatttgattcttatcagtccatagagtcttgagttaattcctttttggaaattctatacagaggcgaattaattctctacatagtctctttgtcactcagtaacttgttccattctctccttcaaattatatctttagacttagctagtttggtagtccaattccagtttttaagctttattataaatgttattagcaaagacagttttgcaagcattattaaaatttattttatggttcaactatattttattgaaatttgtttaagattactcaagatgtcttagaattatccaacctttactggaagagcaatttgttagattactatgatttattataattttacataaaatatatatttaatatagcttgttataatttaccattataactgttccaaagtgtaaccattacactttgatccatattttcatagggcaagactgtttgatgttcttctgctccttagcttttgattgccaagttcctgtctctttcctgggctccacgttgtttattgcatagtctgatactgatatcagatatagagactgaaaataccaacttcttaccagaaatatttatttatattatctgaagtaaaattttcagaacatttagataagaccacacattcaagtatcatttcaatcttgatacaagggtagattcctgatacagaccagttccaacttatgcttactagagatatctctggaaaaaaacattataaaatacttatacaaaactcaaaaaataccccacaaatcttacattattaaactattgactgacagcagggtgggaaggggattactttcccagaatcagtctgaatattattaaaagtttaaaaatttcttttgaaatatcttgaaaattttatcagagatactacttttttttttctaagaaggagattgtgaattgcatttcacataaaagtgtactctaatatttgggatatcatttttcttcatattttgttctatagatactccaaacactgcatttccaaaatttaatttgttttctctcacccatcaattcaaatctgtacctcctcctgcattcccattgaaagttgcagcccatcattcgggacatccaaagtagaaatctgggagtcattcagacgtttattttctgtcatcttccacatgcaaataatctccacaccagtgaatttatctcctaattttatttaatgcattcatttttactccattcctactacgattactctagcccagactctccattgctatctcccagatgatcccagtagcctcttacatgatcaatagcaacattgtcgtatttgtcctctaaaatgcagtcagggcaatcttgagcacgtgaaatcttgaaatctcacctgttatgcccctccttatagtcactctaggattcccatccctcacataaaaattccaagtttcttataaaaaatcagacgattcatgaaaattcaatctttctcgttcatatcttgcctctcttggttatatattttatgatctctaataatgtattcagtttctattgtcgtctaccaatgaacatcaagttatttgcctaaaacaacaaacactatttctgcgtgtcaggagtttgggcaggggtgaactgtgtcctctgctcagagtaacacaaggctagcatcaaggtgttgactagattcctctctgaatctcagggtcctctttcaagcttacattgtagacagtacttaatttcttgcagttgcggtttccattttgttgttggctgttggccagggtctgctcttagctcctccagggccactcgtagttccctgccatgtgactatcccaataggccctctcaaacatcagtcattcttcctttaggcagggcccagatttttcccaagggattccctggttaggttgggttcactcagatattatcattatatttaactcaaagtcaagtgattaataacctatttatagaaataatatcctatcatgatcacagttctttctggaatcaagattttattttaaaattaaaaaaatagaggttgtattagtccattgtcatgctgctgataaagacatacccatcactgggtaatttataaataaaaagagatttaatggactcacagttccacgtggctgggtagtcctcacaatcatagtggaagcctaaaggcatgtcttacatggcagcagacaagacagaatgagaggaaagcaaaaggggttttcccttatacaatcatcagattttgtgagacttaacccactactgtgagaacactatgggggaatcaacctccatgacttaattatctcccaccgggttcctcccacaacatgttggaattatgggaggtacaattcaagatgagatttgagtggggacccagccaaaccacattagaggccatcttagaattttgcctatcacagatatcagccagtttgggtttgctgtgaatagtgatgcttttgcttacattatttcttctgacaagaaattcctaacattttgctcctggtgaattcttaccatttaagatatagcttaggcataatatcctacaaaacacatgttttctttttattcccaaaatcggctaagcttttctctgctctgctgttagagtatgctatgtctgtaggtcccctagcatgagtcatattaacttaagaccgtgcttattagtttatattttaaaggtagtgtattagttagctcacattgccataacaaaatgtgacagactaggtggcttaaacaatagacttttgtttctttgaagttcttcagaaatctggaagtctgagattagggtaccagcatggtcagtttctggtgatgcttctgtttctggcttacaggctgctgccatctcactgtatgccctcataacctatgtgtgggcagaaaagaaagagagtgaccaagttatctggtatcttttttaataagagttctaatttcatcatgaagaccataagctcatgatctcatctaaccctaattacttctataaaggccttatctccaaatacagacacattgaaggttacaccttcaacatacgaattttgggagaactcaaacatttaccaccacctgtcaaaaatagaagaaatgcataaattctacagtgcctactttgtggatgatgaagtttgcatgtagccgccttgtacataatatgcctaatggaagtcttcagaatattattgactgtattcagaatattattattataaaaactgggtcttggccaggcatggtggctcacgcctgtaattccagcactttgggaggccaaggtgggcggatcacgaggtcaagagattgagaccatcctggcaaacatggtgaaaaccctgtctccaccaaaaatacaaaaattagctgggcgtggtgatgtgtgtctgtagtcccagctactcaggaggctaaggcaggagaatcagttgaaccctggaggcgggggttgcagtgaactgaaatagtgccactgcactccagcctggtgacagagcaagacttcatcaaaaacaaaaaaacaaaaaacaaaaacaaaaacaaaaactggtcttatattttcctaaattacatattcattctctatttcttatatgatctacaccatggggttcctggctcctgatatctctaatctcttcggaaattatgttagagttatttcatcaaaaacctacttgattaatatctcctgactttaaagtcttcaatggttcctctgagccttaatgccctcataaactgaccccagtctctttcttacagccctccttgcctcttattcctgcttgtccctgtcaaaccaccatggtatctatgcttgagtcaaatgtatctgctcactattctctgagcaagttcaaccacctccccaccccgacttttaaaggtttcacatattttctcatccttgaaatatttgttatctcttcccacatactgaacaaatacatttcaagtgtttggtgacactttccctgactactcttccagagttagatatgtctttattgatgcccctttaatattgtgtagatgtataacttttgccacattaaattataatgatttgttttcttccttgtatctttctctagattgcaagttccctgagaaaactgcagattatttttctttataactgctgtgctcaacacaccgcctagttgtttttgagaacaggaaaaacacagctgggaatagattgaaatacaagtcacatgttttccaccaaggcaacgataaagcctggttaaaaaaaaaatcaatgccattgacttccccagttaaaattgtcatatggtattacattcttgttacatgggcaaaatatgattatttgagaaattcataatttcaaaaggcaatttgaattattcagaaaaaagttaatgaaagaattcatatgtaacgcactctcacattttaaagttcacacttagatatgatttatagaacttactcatgatacacctcagtcttgttttgttttcattttgtctaaaacaattttcctaggcaaatctgcctccacagcaagctagagacatatatcacaatttgttgagatagtcctgcttcctacatgcttttctagtataaattattaacaatatcccctttcaatatcaaaagtattctggtttggacaataattatgcagtttctctaattagagagaacattagtggtttaaataaagtgtcacacagacctttgaaggacaacactttagaaaggctgaataaccaccatcgattactttgtatctgttgaagatgtttactggctttgaaaagaatctgaatagtagagtgagggaaatttacagtttagatgccacttacatagtggaaatgatgaacaatttgacacctgtgtcactgcctttttcaaatttaatcctttatagcctgaagtgagtcttttttctcgctaatgaaagctttttagtgttctaataataaacctaaataagcttgtatgtcacccgcacacatatattaggaggtgaaaagagtttagcccagtattctgttagagggatacagtccaccactgactatgaaactaactatcctcagtttgataattagacaaaataattcaaagaactcactgacagctactatacccatatatatgcttaattaaaggaaaaggttataaattaaaattagacaaaggaggatgaagtacatagggtgaaatctgagaaagtacctgttactttcccagcttcaatgtatgacagtatgcaagaggtatggccaagctcccacaggtttgaggttcagagattgattgattgattaattgattggttgatttcttcttagggacaggtcttgccatgttgcccaggctggacccaatctcctgtgctcaagagatcatcccaccttagcatctgaagtagttgagactacaggtgcatgccatcgtaccctgcgaggctcaaagttttcactggggcctcattatataggcataattgataaatgtctacatggttgatttaatctctaggtttactagtaccccatgattcaatgtctgtaccttaaatcacaccattggtctttctgatatggtcagtccccatggtaaatcagtgttaatatctgtctagtccaaaccaccaagggaaataaatacctcccaggagcgatgagaaaaggctagacctcttcctggcccaagttaaattcttttttgtttgtttgttttaatagcttttgtttttatcattttttatttttttatttgttattatactttaagttttagggtacctgtgcgcaatgtgcaagtttgttacatatgtatacatgtgtcatattcgtttgctgcacccattaacttgtcatttacattaggtatacttcataatgctatccctcccctctccccccaccccacaacaggagctggtgtgtgatgttccccttcctgtgtccaagtgttctcgttgttcaattcccacctatgaatgagaacatgcaatgtttggttttttgtccctgtgatagtttgctgagaatgatggtttccagctgcatccatgtccctgcaaaggacatgaactcatcattttttatggctgcatagtattccatggtgtatatgtgccacattttcttaatccagtctatcattgttggacatttgggttggtccgaagtctttgctattgtgaatagtgccacaataagcatacgtgtcatgtgtctttatagcagcatgatttataattctttgggtatatacctagtaatgggatggctgggtcaaatggtatttctagttctagatccttgaggaatcgccacactgacttccacaatggttgaactagtttacagtcccaccaacagtgtaaaagtgttcctatttctccacatcctctccagcacctgttgttccctgactttttaatgatcgcgattctaactggtgtgagatgttatctcattgtggttttgatttgcattttgctgatggccagtgttgatgagcattttttcatgtgtctgttggctgcataaatgtcttcttttgagaattgtctgttcatatcctttgcccacttgttgatgggattgtttgctttttttcttgtaaatttgtttgagttcattgtagattctggatattagccctttgtcagatgagtagattgcaaaaattttctcccattcagtaggttgcctgttcactctgatggtagtttcttttgctgtgcagaagttctttagtttaattagatcctatttgtcaattttgtcttttgttgccattgcttttggtgttttagacatgaagtccttgcccatgcctgtgtcctgaatggtattgcctaagttttcttctagggtttttatggttttaggtctaacagttaagtctttaatccatcctgaattaatttttgtataaggtgtaaggaagggatccagtttcagctttctccatatggctagccagttttcccagaaccatttattaaatagggaatcgtttccccatttcttgtttttgtcaggtttgtcaaagatcagatggttgtagatgtgtggtattatttctgagggctctgttctattccattggtctacatctctgttttggtaccagataggaagaatcaatatcgtgaaaatggctatactgcccaaggtaatttatagattcaatgccatccccatcaagctaccaatgactttcttcacagaattggaaaaaactactttaaagttcatatggaaccataaaggatcccgcatcgccaagacaatcctaagccaaaagaacaaagctggaggcatcatgctacctgacttcaaactatactacaaggctacaggcccaagttaaattctttactacacaaaaagctcttgtatttggatattattaaaagataccacactgactacagattcggcagtataccaaagccataaattcagcacccaaactgtgaaaattttaaactaataataatcaaaattttctatcacatgtagacagttaagtaaatgaaattagtagtgaagcaatactataatcgaagttcctctggaaattgtttttaaaattcaatttctttacaagcaaaacctttgtaggcacaaacatcagtcaaattaaaatctaggtttggcagttcactcaaggcggtcaatttcaaaatgtctttttaaaaaagatgcataggcctgttttccttttattattgcaactaactgatctgaaaaaacttatagttacattatcacttctaacctgactgatataaaatagaagtttggtcatgaaagtaaattataatccttggggtttaaaaaggaggaagaaaaagaaatgggggaacatcagtatgccaagtggtaatcatcatcccccaaatcatttccatgtgtctgtgaaagcatttgtcactctgtccctctgtagagtacctgttaacctagttgtctcctcagtcgcccttctccttccaacttcttgagtgaatcttgcctaatgaaattactgaagtcaaccacatatttattaaatgaacagttaaatgaatgagagattacttttcattcaaatgggagacctggattacttggtgtggtagacagggtaattgttccccacagatgtctatgtcttaatcttctaaatttgggaatatgttaccttacatggcaagagggactttgaagatgtaattagattaagaaccttatgattgggagatttttttctggattatttggttaggctcattctcatcaaaatatgaaaaagagaggcaggaggtctgaaccagagaacaagatgtgaccatagaaacagagataagagagggaaagttagtgcagttgatgatgctatcctcctgacattggagaaatgtcttattttaagccacaagtttctagtaatttgttatagcttcaataggaaattaatacgtttgggatgtactgctgttcatctacctttctaataccttctcacagagcctgaatggaaaaactgttgtttacagtcatttctgttaaacactgatcttcttatcgggtcataggaaaaaaatgacactattcaattttctattatttaattatagccagactacaaaagaggatagttatttaccatccattcatttaaataatagctatacacttcatctcaagttccaggcattctgctcaaatttagagttaacccaaacaatcataatgtgtactcctcatagagcacatatgattttcaattaaaatttaaaatggttcagaatattagtagaatacatttttgtttgtgaaaatcaaagtttaaatggagaccattcttactggccaacattttgagtgactgacacctattgaacagatactgaacaagtaaacatgtaggcgaatatatagctttatatcttgatgggacataggcatatgcatagacagatgctagctacctagctatctcgctaggtataaattatatgactagggatttggcttagaaatgcaatcctatactcctttaaagaaaggacattctatctgaaacctgaaacttgaagaatgagtcaagtcagttctataaagattgaaaggcatggcatgttatgcaggaggagcagcaaataaatagttccctgttctgggaaaaacttggtacataggaattgcagaaagaataaccatgtgtcttaatgttcccatatatgaattatttccaggaaatttcttgagaaacttaaatgtttttcttaattttagttctaggaacaatcaggaaattaaaaaattaagaaaaattttcataacttaatagaaaatactgacatgcaagtggaagaattaagatctatatttcggggaaacaggtttatagcagtaaaaaagaaatgccacaatcaaatatcatgcttagttttagctgttgtcacttataatgtttgtttttggtttttggccacatctactgctaatggtggaatattcttgtaaatataatctatataaagaagttaatttacatactttatacaaatcttatgagtggtgttccatgacatgtcaagtttggaagtaaaataaatccttaatctggcaattttgtaagtgattctgtgcattcttatttacattactaggagatccaaaggttgtattatttgaatgctaccctgtaatgttccctgatgttttccagtgttggaatatttagcatagtttatagttctttagaaatgctacaaaacttaatactatctgtttattaagtatatattgtttctataataatggctggaaagtataaaatattagatactcatatatgatttaagggattcctgagttttcctgagaattctgatttcttattcataaaatctgaagaatttagaaagactaggatagaggtagctgaattaggtaacgcagaaataagcagatatccaaatatatggagcctcaaatatattaattttattaaaagttgttattatctaaaatgaaatgggaaaaattgtcaaattttaaatagaggtatacaggatcaatatattttttaaatgatcactggtttctgtacaaaaatggatgaaagggtgcaacagtttaaataggaaaaaaaaaaaaaaacacttagaagaccttttaagagacggtggcagtggaaacagtgagaaatggccagatctgcagtgtatttagaggtagaacaaaaaatatttagtgaggtatcacgactgtacaaagggtggcaattaatctcagcaaagaaaatattgtgcacttaggaacagaggagacaatgagctgtggtaaattaattttaaaattcttaaccaaatagttcactgtagtatttaatttctgtagtacaaagaacatatatttatttacattcatttagtatgcatttatgaaacaccttttaagtgacgagccctctgctagttgctaaaaattccagcatagatgataccattctttcctgaaacaagatgtatcaacccctgcaccatgacattttgggctgtataattctttgtagtggggctgtccgtgcatcgtagtttgtttagaagagtccctggtttctattatgtaatgccactagcaccccattttcagctttgataattaaacattaaacattgctaaactgccctaaatcaaaccactaagagaaagcattagaataaacaaatcaataaaatactataacttgataatagtaacttaggaagcctgccatgaaagtatagcttagtcaaattggtagcaagcatcacagagaactcaaacatctggtgagggaaggggacatggtgacagagaaatgagactggatcagtaagccaagacagagtgtttaagtggcttgttaagttcagaaatttggactttgttgtgacagcagtaaggtgtcattgagggattccaagaaagaaagtatacgatcagatttgtgttctagaaagcaaaactaagagtgaaagcatcagctgataaaacagagaaggcaaggtgattatttagaggatgttaaagggagagacttgaccccattaaactaaaggtagtgtatgtggagatggtgtaatatgggcaaatataagacagtcatgtctggtggaatacacaagatttggtgacgtaggcatgatggaggagtgacaataagttgaggtttctgggaaggattactaatgattggtggtgtgtcatccacttcctttttaaagagagagaaatgatatgctccaaaatatacatacatacacatgtataagtacaagcattgaacaaggataatcaagaaactttgatagccaaaattttgtttgaattatttttataatcgtgtttcagttgtagctttaaaaacagagtttaattttaactaagtcctcaagattattctctatactagtgatagtcaaattttaattaaaccaaattgtatcatttaatgtgaagtgatgctgctgacatacttctagcatcttctcactttcaaaaaccatacttttacttagtcactaatcaaagtggcattagtgaggaattcttggcttacaatgtcattattcccacattctgcatcatgctgaggaatactaaaagatggtaaccttttggctcttcattttgtgaattttgtattattaattatagacaattttgattctcagattactatagtttttcctaccctgacaagccaaggaacttattataaaaaggccagaaatatgtaaaacatgaaatagatttaaaacacaacatgttctctggtgagagcctgcatatatcatttttgttaaaatgcttaataaatgaagattttgttttccttttttttttttaagccagcttgctgatggatgacaaagataaggcatctttcctaaatagcaaacacccatgtgtctggtagaagctctgtatgttacagaaaatagtatacagacacaattctaactttcatagctatgaattccatgtgtgcatgcatgtgtgagagagacatgcacatacacacacagagagagagagagagagagaatatctgttgcagtataatcactctgaaagaaaaattatggtagtattttctcttatgaatttaatgaatgggtaggttttgttgtgaggtatagcgggatgtcatggaaagatttcagaataagatagaataaaataataatatgttaagtgggacagagtacacattaggttataacgtcttgagatgtttcatataaatatgttttagcattgaaaaatacattctgcatccttttaattctttattataagtaggaaaatatgatatgtttacttcaattaagagcttcaatctctctatttttaatcattgaattttaaatattctcatgatagataatacctagattcctattttcttagcaggatagaaattttatgagaaaaccttactttgtgtgatactgtctttctcattgcagaatatttagcacctatgaaccaaacattaaactcttctagtatttacccttcgcatttgaaactcaaaagtagtctcacatatttctaagcttcccccagtggaacaggatcacccaaacagattaaggtttactgattcctgtgaattgtgtttaactatatttttggtctaaaacaaattttcagtagtcaaaatgatagatgaaccatattttaaattccctgatcatctaaacttttatggtttccacagaacatatatattttttctacacaaattttttttccttttttaaattactagtctgatacattgtcctgaattttggagcaaaatgcaattatttttattattgggtatattatgttggttggatacagaaaaaaataaagatttacgtctggcatttaaaaataaagaattttttctgtataaaatttaaaatgtttgaaattgtttacctctaacttattcaaagcatattcaaataactcttcctagagaactttcaaccatattaacataataaagataatttagttgcattttttacaaaaaattacttatactgatttgttcatcttagaaatggtgaaaattggataagcacagaagtatacattttaaagcatattattgttaatttatatctgtatcataagaaattactgacccatttaaaaactcttcaaccaaactgcatgaatctatgatagcctacatagaaattaatagaaaccttagttctgtgattgtttcttgtatagatgctaaacagggtgaaaagcctggaatgaccattgtattttcagcaggtcaaaaagcgtatttttcttataaattcaaattttctctgccctgtagtgggatatgttagtagtgttcaatatatgaatatttgcaaatggcaaatttatgtcatacgggtacctctcttccagattttgctttgtcagaatttcattcctatgaatttataaatattcataaattgttaatactatccattagtggaactaactattgaaaaaattacaagtatttttatattgtaagcaaaatgagagtccaaataagttttgcatatgttagcaatctttctagtataaattactcttcctgctgtatccaattgcaaggattgagaatctgaaatttgatgagtaatggcaatgcaaaacacacacacacacatacacaatgtgtaagatctctaaaatgagaaaaggtttttattctcttaagtgacattctttgtctacttcgtagatgtaggaaaaactaaaataccaaaaaaggtgaacttgagggctgggcgcagtggctcaaacctgtaatcccagcactttgggaggctgatgtgggtggatcacccaaggtcgggagtttgagaccagcctgacaacatggaaaaaccccaaaattagcctggcatgatggcacatgcctgtaatcccagctacttgggaggctgaggcaggagaaccgcttcaacatgggagacggaggttgctgtgagccaagtttgcaccattgcattctagcctaggcaacgagagcaaaacacagtctaaaaaaaaaaaaaaaaaacaaggtgaacttgattgattctggctgcagaagcccatttaaactatagtggggaacataatgaatgctggcaggtggccatcaggatcctgcctgctatgtcatttgggttatacagacccaaattctgccatattttctaaactattaagaaaaggtaggcatttagatttagattaggcatagccatgtttaaaaaataaactcaatttcacagtggtttgaaaaactagctcatttttctttctctcagtaaagctagagaatccagggatgcacatggttattagtgacctagttccttttgtcttttgagtttagcattttagtatttggtgtccatttttaaggtcttcttattttctattgtgtaactggagctctggctggaataatattattccaagcatcaaaatgaagaatgttgagagaagaaaatgagcattgccagtagtttgtactttttaggaacttttctgggaatctaagtcatcagcatttacctcctctggtgactgttagctgagaaatatgctgtttttctggacctgttacctccagaacatagctgtggatctacatttaaggagatttgtagagcgatgaatgaaattcatgttatttcatctgtttgtctgctttagccttgtgtttcaatgatcctataagctctaatgcttaatgaacacaatccttttgaccaagggcgtggttttgtttgtacctccttgccattttatctggaagcctcctggttttctagtcaaatgctaatgttaattctggcctctgacttttccttgtattctccttttattcctaaaagactatttgactgcaccctaacactactctatatcacagcagaacaagtgctgtactaaaaaagcattttctcgtccacacacaaggagatactaattctggctttcataattatcatactaaattttaaaatgataatttcaaattaggcatatctaatggtaagcactttcttcctctattatccctttatgaaggctggaatatatacatttttctttatttgctttccaaaacatgaaatccttacttttcatattttagaatgtccataaaatgttgtatgaagaaatggtgtcacatgcttctgtaggttatgtgaagaatgcaaagtgttaattcaaaactggctgtagaagcctatttagaactgtgctgttataaattctaataacaatgatcctactacattctaagaaaaagacattagcttctatatgcctacaatctccaatagcctttgatctttcctaaatgactaatagaaagcacattgtcaacccaggcagaaacagatttatatccttaattttaacttttttagaactctatcatatgggtttggattcattcacctcaagatacttcaaaaaattaacattttaaattaatacctcctgtttctccttcttcacttccctactgactcactctccactcttaaccttgcctactatctctgtaaactattggaaaataataaatttaaagttggtgaaatttagtggctcatgaaaataaaaatagagaaatccaattttggtgtgttctttaaaaattgaggaatttgaatcagccccaaactaagctctagactaaggcagctgtcattttctggtgtcagttgtccctcacatgccagatatacccgagcttagtagaactgcttatgctgtttaatttatgatcccatgcactggccgatcaacataccatctcatcaaagtattatgcttccataagctcagctactacgttttatgaactcaatgtataagttcctcataatttctttaatgtgcctcaacaaattataagagtaaacaaaaataaagataatctggtatttattgaagaacaagttgcgttgtgttataaaataggtgcctgttttcatctactgtgggcagtgaattttacactggattaaatcaaggttgatcctaagtagctgtgttaaataaggttaatgtgaactctgaagaagtgtgtctgctatacctgaataaatacaaattgcctactctgggtatgtgaaggcaaaaactaaacatgcacctacaatttaatagtacacctgtgcagtgcaagtcaaaatagtagactctttggaagatgtaaaagtgcttaatatatttccagggtcatttagatcatgaaaatatggagccatagtgagacattgttaacagagcaatgatttgtgcataaattagaattctttatacaaccattcagatatatcaggataattttagacatataagcacagacagaaacaaactgaatttaagaagttgtgaggcttttatttatttcgtgtaaaggatctgaccacagacctgaattatttggaggtgactggctttctcttcagatttgttagttactagtagaacattttgacactaatcaaatagcacttattggttgaattcacacagagagagcactccactcaatttgcagagttcaaagcaaatggcccaaacatttataaagtcttcaggccaaaaaggactaaggcaataatatctcagataaaaatcttttattttattttactttctaaattttaggtccatggggagtcatttctttcctctctgaatgtactctttctgaacagctacttctgttttatctgttgaacaaaagcttctcttccctattagaattttatcaaaggctctataaaggaaaagtgaagtgagtaatactttgcatatgcttcctaggtttaagtctgtagtttgttctactccattttctatattaaaatattgctgtttcaacttatgctcctacttatgattgcatttatattttatatagacagtcttcaatgcataaccttattctttactttgtgatctagctccttggccacctactgtaaaagataaagggaacatttttacatgtttatgttagttctttcattgataattgaaaagttctaagtaacagaaaagaaataaagcaagctctattccaagcatctggtcatcttatgggtcacgaacacaagacttcaatgatccttatgtttactggagaaaaaaataagaataaaaatttatagcattagtgagtacaatgagaaattcactatattttctgccaatttctgtaaattgtgaatttttgggaaaattggtatttctgcatttatttttaagcaagtatttactgaatgcatatagaccatgaggtgagttaggcagaaaagatacaaaatcctggagaaacagattagtccattaaagtctcaatcctcctcggatataaaattccaattttgcataatgtttgtgaatattaagaattatagtgtcagctgggcgcggtggctcatgcctgtaatcccagcactttgggaggccaaggtgggcggatcatgaggtcaggagattgagaccatcctggccaacatggtgaaactccgtctctactaaaatacaaaaaaattggcagggcgtggtggcacgcacctgaagtcccagctactggggaggctgaggcagaggaatcccttgaacctgggaggcagaggttgtagtgaaccgaaattgcaccactacactccagcctggcaacagagcaagactccgtctaaagaaaaagataataataataattatagtgtctataagcctttgataaataacatgcactcaaatgatagctattattagggtaactgctactgactttgactttgtgtgtgtgtgaggggtgttactgtgttttcctgccttccataagctattttcttattactggttgactgtaaaaatgatttaatgaatcatatttattgagaggcttctgagtactagttactaagagaacaaccataaaaatataggacactttttatccttaaggtattcactatttcttgtggaagatatccaaatgaacagaaaataataaaactgtgacaaatgctgtgatataagaatatgcaaaatattttggttaactaagaagatgtaagtatactattctggggcatttcagagatcgctgttagggaggataaagtctaaactgggtactcaagaatgaggggcagtttgttggcaaaagaagggtgaaaaatataaatgcatattctaaggaaaggtagcactttgtattaaaaaatgatctagattaagtgagattagctagatttctcagattcattgcaaccacaattaggtagatattggcaagaaatgcacatcctttggcaaggaataagcacaggaacactcaagacctaagagtttttttaaaaacgaaaaagtgtttgagattcagagaaaatagtacagaaataccaaagataaaaaggatacattattatttaaagagaaaaaagtgtaagaatgtcttgcatacaactaactatatattaacaaagcacttgccttcagtttagcagcctattgccatagctttgagtgttcccattattttcctatattagttatatttcacatataaataaatcttcacttttttgattatatattttggcaatatcctcttacctcttaggtaataaggcttttgcagttttttggtatattttaagtgtctttaaaatttgttttatgtttaatcattttactacagttgatggttattctcagaatatctgtacttgcctttgcaaacatattaaaatgacagacctgctagaaatgctacattttcttaacccttttattgttctcatgtctgatgctctaaaatgtcactattttccattttatctaatctttcacttatgcaggttgtgactattataatttatttaaatatagacattttaaaattaaactatttaagctatctttattttgatcatttacagagaggatgcatctttctatatttggaatcaattttaggactgaaagataattggcaatgatttccaatgaatgttctaaagaaagaacatattttgtttaatagattgtctttccactgtttactattttaagaagacaattaataaggagttccacctattttaacaagtgttctttttttttttttttttctgaaggtaaatggctatttggttgttgatttcggtaatttaattctttccatgacaggtttttcaagttaggctagctagttttagcaataatcttctaaataatttgacatgcacattttgcataattttgtcatgttttcctaattctaatattaacattttctattttaattcatataacaatatgatgaaatagatatatatgactaatattactaataatattgtatttccaagcaaaaattgattaaaagaatataaagaaggaagagaggaagcagaaagaaatgctcagagaatctgattccaatgttcttcctgattccaggtcttggttttatttcgattctgagctctaaactattgcttcaatttcatgggcaaattggaatttaattttttttaattttaagtaatctggatttagatctttcaaatcgcctttccagagaaaatctgtgtctcttttctggaacgattatgaacatgcacaactggttatgaatggtatagagacagtagacttattgaggtcattttcagaccaatgagtctcaatgtttacaacttttacagtagatctgatattaaaggtgtgcatacatgaacaaggaccctgactaaactacttggcaggttaatggatttaataaaatgttctgaaatttataccatgactttaaaatttattaatcatttgtgacagtttttttgacaatgtacgtaatgcatattcaatacaattatattaaagccaattatatagttctcacagtgctcactacttctgctttaagcgagtgttcatcattctgtagtaataatctcctctgaatgtctattccctaaggtcgttgatggcatataggttaaaataatgctaaattgtttaaatatttgaactttatactctgactagcaataatttaatactgtgtctaccactatcattatttagctagattatttattatgttaaacttttcaactacctcctagctaagagattcaaacatgactgattatcagtgaacacttgatattatgcacattctttcctttgtggtctgattcttgtcagatttttcaagatgaatggaagaagaaaccatgattatcagaaaaagtgttctctaagaaagtcatgatgatgacattaatatttagtaatgattcagagctatactgagtagaaaattgtgaactgaaaatagtaatagacaatcaaatctttgctacttatgtttgcactgaaaagttttgagagggtactgttgttgatggccaattcagcaatcatagttgaagtacagctctgtagcgtcaaactgcctaggcaataatcaagtttagtactttctaactatttgaccttagagaatttactcagcctctctctatcactttactgagctcgaaattgaaagtattgaagtaacagactcaaaggggaatgaaattaatgtatgttaaacaattggcacagttcctagcatataaaggtctcaaaaaatttagttactatctaatgatatttcaacaaacagccttattttttatattagtaatagaagaagatttttttctactgaaattgaaggacaatatattttatcttggtgaataaacatagttcgttttatcacatatatgttgtatagctctccactgatatttactttttgtatattttttcatgagcactaggtctactcatgatattgtgtataatgctgctgtctgctttgtccttatattatgagtacattatgacagtaaaatgcttcagaagacaattttttggcaccatggacttaggaacaagtctataggaataagcttatgactatagatatttataagaagaaatctacttgctgtttgatatctgagtatgatacagcccatttcatttttgagtaaaaataattttattatgattcttctgtccttattagtgtaattgaagtacatacagagtcggtttattgattggtagaagacgtactctccctggtctatgttaccaattttctttaatctaacacctctaacaaattagagattaaatataataatactagtaatggtttttattattgtaatgataataataaaagtaaaaatgattgttgagcatgtactatatacaaggcattcaaatatgcacttaatttatatgtcatccttcctttataatacctgtgcagaatgcttattattttccaattttacagttaagtaagctgagttttggaaaggataactgactttcccaagtagctcaccatagtacatagcagaatcaagattcaaaatcaggctaatttggttttgttttcactttactgtgcaaagtttctgcatttattcatctgtagtcttaacttctctctcaaactctagccttaaacagccaccttcttccaagtatatctgccacagaattttaaatatttacctcttcaaacctaactcattttatttttctgtcaactttttaattcactcttcctccgttcccaaaatctaaccctgggtggttcttcctcattatacatgcagcagtttccctcagtttaataaatcaataattgatacatcgcctgttcatcttaacttcaacctgtactttgattgatggtagatatttttcctagatacatttaatggctatgccgcagttctgtttaaagagccaccatagttcttcgaatcctactgaatgaagtctacctccttaaacttgtattcaaagcttttcatcacttgatcttaacaccgttttctgtctttggcccataagaaaattctgtatttattctaggccacagctaaatacaaacatttatcatttgagatatacttcatatgtttaaacatctatatttattcatttttttcctaaaaatgtacatgtagtttatataactgagatcagaagtattgttacttacaataatcacatttatttcccttagctcagcccttagattgacatcataaagggaggtgtctgcaagagaataatcccaaaattatgattctggaagtttatataggctacatgctgcccagttgccaacagtagccctcatgagagaggaagaaaaatcttacatccctaatataaacatcttacttggaaatatatatatatatatatgggcaagtgcctacctgaaatgaaatatttgactccagagagacatgtttcaatactcttcgtaaaatagcaaaagactccaggttaaacaccagtaggatgtaaaaagcaaatgggcctgtggaaaaacattcagaatctttataacccatcatttttttttttttttttgcacagaaagccctaaccatgaatatgtaagcagaatagtggccccccaaatgtcaacattttaatgcttgaaaatgtgaatatgctaggttacttagtaaacttggagatggaattaaggttgctaattaaaaaatactatatgatagcctccttaatggggagactattctggattatccaggtgacccagacataatcacagtaattcttataagtagaaatgggaggcagaagacagagaaccagataaatgcaagactgagaaaaagacccatcgcaaccctgctgactttgaagttatagaaatggggtcacatggcaaggaatgtggggtactctagaaactgcaaaaaaaaaaacacagaaatagggcctccactatagtgtccaggaagaactcagtcctgctgacactttttgattgtagcatagtgacatccatcagacttctgacttgcaaaactttaacataattgtataatgtttaagccactaaatttgtgataatttgttaggtagaaacaggaaacaaatacactgcagaaacatgaaagtgttagtattgcttcctgataatgtcacacacatatatatgtctgtgtctgtgtatgtttttacatctgtgtatttgtctttgtgcatgtaattttttttcaactatggaactttgatatttctgcctctttttcccatcttatagtcatctccaaataatgtcatcttgtaaagccagtcaaaagataactctttgaaatctagagtaatggtttccttctgtaaatatatgtgtggtctttactcatagatcacgttttttgttgttttgttcattggaagtattatgctatatgtgcttacaaaatgggtggcattacttttacattaaaaataaaattgcgttttgaagtgcctttgtaccagggaacacacactgaaagaaaagtacattttaaagctcttgtgcaaataaaacatgataaatatagaagaaatattaaacatcatatattatcatgtataataaaagtagttagagattttatactaacagaacatgaaaaacattaaaagtgattatttgtcctactacattttaatttgtttgctgacattactgtaggtgtgttcaccatagattagcattgaaaaagacagaggtgtttgttcaactaaccaatgtgaagaacaaaaattactaactagtggctgattgcttttctgtgaagtgtgatggtaatggatcttctaaattccagatgactggaccacggatttcatcttaaactactggagcatagcagttatctcaagcagataattagtgctagtttttctctttgtccctaacatgatgaatataagttctactcaacagagtataaactgcacaagagcagaaaattttgtctttcctgttaaatgatacatctttaagccttaaaaagtatttcttggaaaaaaaaagaatgagtatcagacaaattcattgcttatatctgctcacatagagtattctctacattagaatccaggtactcttgatcctcttttagagaataaggattgagctgaggaccaagtacttagcattgagaagtgtggctgacattacattacacagatttttttttttgacagggcctatgagattttgttttctcattcataagaaaggttctattctagtatgcatgtggggaaataaattaagaacttgtgtggtgttactcattatagccactgaagttccagtaaatagtcttctatttttcaaatgtgggtgtcaggaacacagacttgcttggtcaatctgaaatattagaaagattgggataaattgttcataattccagagatattaaactatctcctcttgagtccagggacccataataaacccatggagagataaatcaatcaataagaaggaagagtatatactgagctagacccaaaaggagtgtcataaaagattttgtactgcagcagagtcttcaaagatttgattatgagatggaaaatatgagctttcagatgagcagctcaaataaagacttttaagcctcacccagtttggcaaatgtcttttggggagtgtcctccatttttctattccttgattacttttcaagtcagtaaaaccactacctgtttgctgccagcagataacataacccagaggtcatttgagattcctatgatacattgaattgaaagcttttcttatctaaggattttatttatctttgatttccccacattgtataggctcaatatataaaatatgagtcagttttaagtgtggctatagaaatagctattttttctttcctctttttgatactcagtcataggtagtaagtgtaatcaatcaaatttcactagtgctgtcataaggcacctgtctaataaattggacaaatggacatagaagcctagttgaaaatatatgccttttgacagaagaataaatcaacatcttttgcaatcttaaattacaattcacaaataaaatcaggacaatgtctataaagtattgatctactgtgtgtctctgctaagtaaaaactcacttttgaagataagatatgaagaactcaaaacacacccatacgataacagaaataaatgcctaaatgaattatattgttagaaaaagggtttggcttgttttaatattttttaaatagtacgggaggcggttggcaggtgggcaatactagaggagccacatgaataacattgtatgagccactctgaatgaaatcattgcccaaggaatatgtccataattacttctgtttggacagaaaaagatctcctcttcagggattttaatttactggtttaacgtaatttatctgcctgaccttcaattacatttaagcattaatttctgagaaacctacttattttcttctaggtcattaactcagtgaactgagatgtgattctagtgcagcttgtacagatactgtagaaagatgtgtaagagttctcaatgttatcagggtttctaccagccacaaagggaaaaatctgactttgtttttttctagtctaggattacaatcctttttcaaagatattcttgattttaatgaagctttagagctatctgcagtgcagctactgctttgcagagtatcctgtgaagctttaagagcaacagtgataaagtagattaactatttttgtgaggcttttgaaaggccactgtcctagagagggtaaggcaaattaacctgtgctgagcattctttcaatattatgtgtgtgctgcctagtttctgcactgaaagctgaagaaaaaagattgttttatttatttatttatttatttatttatttatttatttatttattttgcatttgcaatcagctatactctgcctgtgggggaaaagcaaactttctcatatatacttgcttacaccatcacaccttgtaactatgcataagaaacattcccttttactgacaacaagaatatattgataactatgtttttagtcctttgtgaaatgaaggtcctatatgatagtttttcttaattaaaactccttaccttttctaagtctaaaattacattatcttacattaaaatgtgatcaactgtcattatttctacagaggtcttggatagtataagatagtacaggtaagcaagacacagcccactaggaaaaaaaaatactattacagcaattttattataaattgatagacaaaaacaggcatgtgtctaaaatttgttcagtgtatttccgtttaacatcacttatgttttgatatgcatcatttgttttctttccatattctggtctacaaacatttcttaataaaatatatgcacatatcataactagtagcagtgccggtacaaataaactattttctcctctggacaataggagttgaaatgataagtagcccttagattaccatgtacttaaagtttaccttttcaacaatagagtcaacttagaatattcagaaaaaaataacaaatttacatttctttcaatatccaagacataaggtcctttattaagtaattcttaactctgttatagtgtaaacaaaatgacaaattacctctagagctaggcttagatagtctgctctatttagtttcctactagctttagatactacagcaaaagaaaagatgtcattcgcattgcattctgagatttgatttcttgaaagcttcttcaattgcttaagttactaaaatgtcaagtttagatttgcaacgtttttcctagacatcagatcaagtttgttatccttgaatcattgcaatagggagggatgtattatgtagactaaatggaataactacacttcaagtttttaaagtatagttgaagaaattaagtcaacaccaagcaaaatatctttcatatgtgacaggacccatttcacgtataaaagtatgacaagaggtagacactatcatagtttaaaaaacacagaacaacaacaacaacaacaacaataaaacccaagcatggccttagatagtatccaagtccatgtctgtattagtcagggttctctagaagaacaggactaataggataggtgtatatatgaaagggagcttattaaggagaattgactgacgtgatcacaaggtgaaatcccatcataggccatctgcagtctgagtcccaaaacctcaaaagtagggaagctgacagctcagttttcagtctgtggctgaaggcctgagagcccctggcaaatgactggtgtaggtttaagagtccaaaagctgaagaatttggagtctgatgttcgagggcaggaagcattcagcacgggagaaagatggaggccagaagactcagccagtctagcccttccatgttcctctgcctgcttttatcctagccatgctggcagctgattagatggtgcccacccaaattgagggtgggtctgcctctcccagtccagtgactcaaatattaatcccctttggcgacaccctcacagacataactaggaacaatattttggatcctttaatccaatcaagttgagtaacaatagtaaccatcacagagtccaaatccaaagtcaacagaaggcaacaaaagctaacaaagcatagggaactggaaaacactactcagtttccatccgttttttttctgggagtaggagtggggtacatagagaaaattgggtttcctttgattatctaggtatctaccatggcggtatgcagacttgagtgttaaacataacttcaacatcaaacatatggttcatgttgactgatttctcacttggatctttctctctttccaagatgcctcaggttagtttagtattatataatattgtatgtagctatagttttgtgatgatattcattacattctaaagttatttagttatttcaccaaatattcattagtattcttggtgggtatctttctaggtaaagtcagaagaaggaagggaggaaggaaggaaggaaggagggaaggaaggaaggagggaaggaaggaaggaaggagggagggagggaaggagggaagggagggagtgaaggagggaagggagggagggagggaaggagatagtatgtgaattattattcaatttagtggaatattacttagtattcactttaagaaatgagccatagattctgtagaaagagcacgttttgcagtgctggatgcatgctattttgtctacaccagttttaatttacacccatactttcaggaattcattctccctgtgtaaataacatacatagtgatatttgtcctgggttaaaaatctcattagaggtgtgtggtgtttgataagatttacgttttcttgagtggaagaataggcattttcataccaatatagtagcttgattttgggattttttcattgtgatattttaattcttttgatgttaacatagatctatatggctttcttctagaatccatgcagtgtttgactcatatatagtttattataaacaaacaaacaaaaaactatgtaactattctaatttcatttgtcaaagaaggtagatatggaaactttgcacaacatcaaaatgatcttagtaaaacatagattaatcttccaagtatctcaaggcaccaactgcaattatattgttaaatagaactgttaggcatttgtatattactggagctttaatactttcaattagaagaatgagggagagtagtgatggaaccagtgactgttccaaggagttgtaatactgacttattgtaaccatttcatttcgttatgggaaacagaggaattaaggcacttgccttaatatatatcacatggtagtattccaaaagacggaaatgccagacatcccacttgtagaaattcactgataggcttaccacactaccttataatctttttactgttggggatcacaaataagttctgttatcagatgtcacatttgagaggaagaaaaggttttataataggttacactattccttgagtttgtctaccacaatattaaacagtaaaatctttaactggcaatgtacatgttagagatgaaactagacaagtttacaggagctagcttcattcagactttaaaatctccattgtaatgatgatttctttcaggtaatgttatgatctacttctattgagattatttatctgagaatatcttgaggttttttgaaaaatattcgaatttatatataaagtgttaatgagtcatatattctttaaaatgtctgaacatccatttggggttaagattttatacaaacttcagaaaataaatatatttataccacctgatactaaatattcatcaaacttaacaatgttttctttaacaatatgaggttcaaacttttcaattatgtaaacatttattttaaacatctacatgtaagtaaaaaattatcattttttagtatagtatttataaaataaagacatcatcctattatttatgacttcaagaattagaagtcctcttcttctagagtcactccatcttttaaggcaagtagtaaaagtttaactttagcctctatcgggtaagtgactgaagaaatatcctaaaatgtgcctaggaagtgtttagtggtcctagttgtttaatcttcagttcatgctgttgatttctgcttctattttcacttcagcctattttgtcataatttggcaagattgatgaagatctttttgttccactttacccaagtctttaaaagaattctccctgctttcccagtactaactatggctaactaaattttcctggagatttgtagaaatgaagggaaaaagcaatagggagtaattacaatataaaataggcaatatctttaaactagatatcaaacatcaaaatccatcaagctcatttaccacacccaatataagaagtctctttctagattatatttgtgtcctgtctttcatgcttttttcttcttatagagactaccaccacttctttttttgcatgttcctaatcttaagaaattttctatctgagcctgcccacaggaaatcaaatatcagttcatattgcaagaaccactacagcattttcaccttattatttcaataccctgcaatctatagaactttattttatacttcccagtttaagtttgtttcagagacctaattacatgccatttaaacacccagacaaatcatcttctaagcaaaatataatttaccttagaaactaattgtgctcttaggtagaatgcaaaaagggtcatagtcaattttcagcccatttttctttttataagatatatagtgaatataatctcaccttattcaaggataagagtcatgcacctcaaataaggggaaatacacccatctccctccagcgataatatataaaatacaacaaaacctgaaaattataagaatggaaaaaaattgcatctttttcagtttctcgtgttgatttttccattttaaaaaaattcacacatatttagccaagacttgcaaaattccacattatgatgggaaaccaaaggaaataattattcacatatttttcagcatagactcaaatggacaagagtgttccttgaacgtagcgtgggcaggggccttcaaaaacaagaaaacttgaaaaaagattgaaatcagaagacaaaatcaagctgctttatttgccactccacccatttgtataattaacttattatctgaacttaacctgaaattttcatgatttttaacttttttattatttaaacaaattttatttaactaaagatctgattctctttatgtgtataaatgtgaggtgaaaatgtgggaaggaagtgcatgctcatatagcgttgtgcaaattttgatgcaatgcatctcaactaagtagttattggaagtattatggaactgagaaaacttattggagtcattaagagccctatgaatatttgaagggctgtcaagtagagtgagcaagtaaattaattatgtgttactcaaaagacagaatcaggatcaatgagttaaagttaaaaagcagcagcctaggactcaaaaagatcacaagatatagattgggctctgttacaagaaattgaactccttttcccaggaaatgtttaagtagatgttggtaatcaattagtatggatgttgttaaggtaatttctacactgggaaataatttgcaagatgcaacttaaattcactttcagtcctacaagctattcatagagtgataaaaatagtgtaaaatttaaaattttgtctttacaaggtgatgccataatttgatatatttcatcattaatatataatttgatcattaatatatttgaacacataatttgatcattaataatgcatatttagtttgatgttattaagatgtgcatatgcttcatttactctattaactttattttgattttgatttttttcactctcttgatatcttaaaaaattacgatttgaccactcactgcagtatatgttccactaaatttagtgttattaacaaatgtgatcaccatacctatactcttcatgtgtttgcttcagaagaagggcttcagaaaactctctacgattgaatcgtaggttcaccactcagtagctggctgtatacctggagatcatttttaatttttttgtacattgattttctcatctataaatttttatgcagtgggggagaaatctaccctagcaattgtaaaaattaaataagatcattttttcaaatcaattagtgttgggtcaggtatattataagcatccaaaaatgttggtagtacttgttactattatcaacaaatatatttaaaatttgctggaggtgaaaagcaagtttttcatctttgtactgaatttttttttcacaattctaagtgcaaaacagatgtgaaataaagcttaaaaaataggtatatgggttcatagatgcatgaaaaagaaaagtgaaataaatcactggagggccactcaacatggaaacacacccggattgataatagcctgaagtatctttctaaatcaggaaacaaatatttattgtctttctcttatgtttttattcagagaaagatcatctgatttgttcttaacaactgcccttggagaaatcgtagtactctaaatcacagtgcaaacatgccttgccttggacatatgtagaaatgtgcctttatttccagtcagtcaggtattgccaaaaaggaaataaggaacatatgaataaaagaaagcagagagaaggagcctgttgttttgagaaagactgtctttctgctggcattgtaacggtagacacgcctgagttctgagacccatgtatttcagcttggccaccattcctactgaggagaagaccctggaaaaggtgaacaggtatttgaaatccatacatgtagaatacttggggaagttgtcagaatggacaggtgcagtggtaaatatgagaaaagaatagttagcgtttggctgccatacagtataccagttcagccaaatatgagttcttcggcaacagccctcaagttttcttgaggatgtgctgcttcattggggcaatttgccctttggcacccatttaccatacatattcctactttctatcagtcaaagaaatgaaagataagtaagagttggcagtatatatgcaaattgtttacaggaaattcacacacgtgttcatatacttcttcttgacatgtatcattgtatcagtatttaatttgtgaacaaaataggcatatataattattggaaaaaatagcttaaaatagggttgatgtaagtttgtcttattgtaaatggccagattaacaaaaaattagattcaaatagtctgataacttttaaaatgtattaataattataaaaagcacgaaaagataataataacaaccatattaagaaaatactagtgatgcattgataacaaaatgaatttccttgagattatgggaatttctgccatcaacatgtctataaaatggaaagagcctagtgacattgctaagcataatttattaattgtgttaggctcactgctgcaagtaatagatgccacaattaatgattcaaatataagtatgagttaattcttacctatgcattggaactgtgtaggtgatctactgtttccattaagtggtatttatgtttgctctgatgtataatcccatttctgctagctggaaaagcctatggagaagttcagatgctgggttttcacaaaccatgtctgaaaggaacacatcactcctgcttacacttgatggcaaaaatcagtcacatggccacctcgtactacaaataattatgtgctttctgaggatgaacagaacaacagcaaacaactttttaaaagcatttaacagactctaccatacactgcatgagaatcagacctgttaaaagcatgatgaagagttcttggtaaactattgttctaatggactaaatatggtgtgtgaaatcaagacgacagtaagttttcatagctaagttcaagctttcaagtggttattatgcataggttaaaaaaaagtctttgggtacatacattgttcaaccaggaaaagcttgcattattttttctgatgttatatacttacatatcttttaaatattttattttattttttcaaaacttaataggctatagaatgatgagaacgccataatgccagcttgcaagagctggaggagaggagaatgtgagatgactctctaatggatatagagtttttaaattttattttgctttattttagtttcagggagtacatatgcatgtttgttacctgagtctgttgcatgatgctgaagttcggatgctagtgatcaatatatggattttcaatcctcccccactccttccccgctcccctaagtagtctccaggttctgttgttgccatctttatgtccgtgaatacccagtgatctcccacttattaatgagaacatgccatatttggttttctgttcctgcattacttaggacaatagactccagctacatccacattgctgcaaaggacataattttgttttatttttatggtggtatagtattccatggtttgcatataccacataatctttatccaatcaaccatatgggcacttatgttgattccatgtctttgctattgagaatagtgggacaatgaacatgtgagtgcatgtgtctttttggtggaatgatttgttttcttttggatatatacccagtaatgggattgctgggtctaatggtgtttctattttaagttctttgagaactatccaaactgctttccacagtggctaaactaatgtacattcctaccaacagtgtgtaagtattcctctttcttcacagccttgccagcagctgttattttttgctgtttaataaaactcattatgtctggtatgaagtggtatctcattgcggttttgatttgcattgctttgatgattagtgatgtggaacattttttcatatatttgttggccacttgtatgtcttcttttaagaggtgtctgttcatgtattttgcccatttttaatggggttacttgtattttacttgttggtttaagttccttatagattctagctattaggcctttgtcgcatgcatagttcttgaatattttctctcattctgtagtttttttatttattctgttgatcgtttattttactgtgcagaagctattttgttttaataggtcctacttgccagtttttatttttgtttcaattgcttttgtgaacatagtcataaattctgtaacatggaaaatgaccagaatgatatttcctaagttttcttcaaggattcttatagttttagatcttatattttaatttttaatccacgttgaggctttttttttatgatgaatggtatgggtccagtttcattcttctgcagatggctagccaggtgtcccagcaccatatattagagtgtcctttatcttttgcttagttttaatgagttcattgaagatcagatggctctaggtatgtggatttatttctggatttctaacctgttccattagtctgtttttgtgtcagtactatgctgttttggttactgtggcctcgtagtatagttttaagtttggcaacgtgatgccgctgactttgttctttgtgctcagggttgctttggctattcaggctcattttttaatctcatatgacttttggaatagatttcataattctgtgaaaaaaataatattggtagctcgataatatgttcattttaacaatatcagttattccaatctatgagcatgtaatgttttttcatttgtttctgtcatctatgatttcttttagcagtattttgtagctgtgtagaggtctttcacctcttttgttagacatatttctaggtattttttttttgtgtgtgtgcagatattgtaaatggtattgtattattgatgtagctctcagcttgaatgttattgttgcatagaagtgtccctgatttttgtatgttgattttatatcctaaagctttactgaagttatttatccattccaggaaaattttgcaagagtctctaggattttctaggtatagaattaaatcatcacattgtctgcaaaaagaggtagtttgacttcttttcctatttggattcttttttattattttccctttcctgactactctggctaccacttccagtatcatgctgaataggaattgtgagagtgaatatcctttatttgttcaaattttcaaggggaaatgtttccagtttttgcctggtcagcattatatttaccgtgggtttgtcacgtatggctcttattatttcgaggtatgtgccttcaacagtgaatttcttgaggatttttatcatgaagcaacgttggattattttataagctttttctgcaggcattgagatgatcatgttgtttttatttttaattctgtttatgtggtgaatcacatttactgatttctctatgttgaaccaaccttgcatctcaaaataaagcctgcttgattgttgtgaatttcatgtgtcgttggattcaatttgctaatattttgttgaggatttttgtgtctatgttcatcaggaatattggcctgtattttttttttttttttcttcattgtctctgccaggtttttatatcagggtaatgctggcttcatagatttagttagagatgaatcacccatctttgatattttggaatagtttcatttgaattagtaccagttttctttgtatatctggtatgattcagctgtgactctaactggccctgtggcatttttcagttggtaatgattcaatttctgaactagatattattctgttcagtttttccattcttttctgatttaatcctgggagattatgtgtcctctagattttctagattctgagtgtagaggtattcataatagtctcagaggatcttttgtatttctgtgggatcaattgcaatgtcatatttgtcatatctgattgtgcttatttgaatcttctgtgtatttttctttgctaatctagcttgtggtctgtttatgttgcttatcctttcaaataaccaacttttgttttgttgattctttgaatggatttttgggtctcaattttattcagttccactccgattttagttatttcttttcttttgctagctttggggtcactttgtttctttttctagttcccctagctgtgttgttaattcatcagtttgagatctctctaactttttgatgtaggcatttagtgctaaaaactttctgctttaatttcattgtttacccaaaaatcattcaggggcaagttgtttaatttccatgtaattgtgtggtttcgagatatcttcttggtattgatttctgtttttactccaagagtatggtttgtatgattttgattttttttgaatttatggagacttgccttatggctgagaatgtaatcaatctttgagtatgctaaatgtgcagctaagaagaatgtgtattctgtggttgacgggtggattattctgtacatgtctattagatccagttgctaaagtggtcagtttaaattcagcaaacattgttttgtttgttttctgcctatatgatctgtctaatgctgtcagtggagtattgaagtcccccactattactgtgtagctgtgtaagtctttgtaagtaaaaaagtagttttataaatttctgtgctccaatattagatgtgtatatgtttagatagcaaattctaattgttaaattgaattctttatattttttccttttttactgttgttggtttacagcctgttttatcagatataggaatagcaatctctgctcgcttttttttttttttctttttgtttgtgtccttgatctctctccaactttttcctttgagcctatggttgttattatgtgtgagatgggtctcttgaatacagcagacagattggtcttcttttcttttctttctttcttttttttttttccttttttttttttttttttttttttgttcttttttttgagatggagcctcgctctgttgcccaggccagagtacaatggcgtgatcttgactccctgcaacctccgcctcctgggttcaagtgagtctcctacctcagccttccaagtagccgggattacaggtgcccaacaaaacgcctgtctaatttttgtattttaatagagatggggcttctccatattggccaagctggtctcaaactcctgacctcaagtgatccacccgccttggcctcccaaagcgctgagattacaggcatgagacaccgtgccaggcttgtgtatttttttttttttttctaacttgacactgtctgttttacatcaggcatttagaccttttacattcaaggttgatactgatatgtgaggttttgaacctattgtgaagttcttagctggttgtttcgtagtttctaatgtgtggtttctttttagggtctgtgggctatgtacttaagcgtgtttttgcagtagtggctatcattcttttgtttacatgtttggtactccttgaagtatctcttgtaagatgggtttaatagtaacagattattttagtgcttgtttgtctggaaaatattttatttgttatttgcttatgaagcttagtttgacaggatatgaaattcttgattggattttcttttccttgtaaatctttcaaataagcccccaaatctctcctgacttctaatgtttctgctgagaagtccgttgttagcctaacagcgttccctttatatgtgatctggccttactttctagctgcttttaagatttttttctgtattggtgaccttggacaatctggtgatgtcatggtgatgattattttgtatagtattttgtaggtggtctcctgatttcctctatctgactgtctacctctctagcaagattagggaagttttcctgtgttattccctcaaatatatttttcatattcaaagtggcatattcaaatatgctttttctccttctctctcaggaatgccaataattcattgctttggtcactttacataactccatatttctcaaatactttgttcatttttaaaaattctgttttctttatttttgtctgactggattatttcaaaagacctgacttccaagtgcagaaatgcttctgttatggtctggtctattgataaagctttgaattgtattttgaaatttcctaagtgagtttttcaatcccagaagctccaattgattttttttaaagatgtttagaccttccttaatttcctggattactttagaagtttctttgtgtcaattttcaaccttgtcttggatctcattgagcttccttgcaatttattgtttgaatacattatttttaatgagttatttgaccttcagggaactcacacaggtgaattttataaaacagttattattggtttttaacatattaatgtaataggatccacttgagcagtataaattagatatcacaacatgtgaaaatgacaaatcattttataattgttatgtacatgcagaaatgataaaaatatttttggataagggcagtgcaaatgacaaagattgtgtcagatcagcatatgaagtgttattgttggtctgccagttatacagacatattatacaactgtcttctgaatagttacatacctaaatattttaatattgtcaagtaactcaagacaaccttatcgagtggtccaggctttctgtcaacccttgatgagtgctccttttccacacatcagctatcacttacaagtacattttcataaaaattgatatgaactcttcagtatgtaatttcaatatctacttccgatgacttctcctacatttaaaataaggctaagtttcttcttaatcctttctggtaagtttgctgacttttatcatttttcaatgtatgctaaatatggttttaactttctgtcagtcaatttatcactagtataggcagcgatattccagatctaaaatgtaaagtagctaagttcttgcttacttttctgagcttaatcctctcttgaatctacaaattatttatttaaatatcattttaaggtaattataatcaaatcaaaaattttactgtctggagcaattaatctattttttattacagaaaatacacaatttattttattcccttcagcattttatatgagcaagctttttttctgggtatcagtctttcaaccttcaatgctggctgtttgtaactgtcttgtatttgtcctactatgctgccgattatttagtttttaatatttatttgaaaattcaagcactttgaagaaatataaatttattaaggttataatcttttggtttagtcatctatgaaaacatttttattagatttttgtttatcgagctccacaagtttttgactcttactccctctgagaatcataatgattacaaggtatcacacttattttaaggtaatcaatattgcttttctgcttccatacatctaccctcaattaattacgggtaatttatttcactaaacttatgacaaaaatatcctcatgacaatcattgctttgtgattataaagtatttctatttatctcattatataaacatggatatctattatttaaaatattacaaataatattttagacaaatttgattcttagtagcagtaatcattattaataaaaccatttaaataattttccccaaaataagtcaggaagaacacttaccaaacttaagcaaatatttccagagcaatattggtcatcatattgtataaacagaatgaaggaccatatcagtatgtttacctatttatattcatttatcagtgatttattaacgctacattttctcccaaggtaacttattattgattattgataaaatttgggaatttttgtagggggaaatgtctgtgttcagtggcttgtggtgaattcactggttctgaacccagctttatgtattggagacaggcatgtgtgatctcaatctccaaaattatgatggaacataattttggaaactgccatattaattttcaacttatttttaagtcctctttctcattgagctttcgtgttccgagacaacacacacgttgtatagctataggtcttagaaaatgatctttcttttttgctacttaccaaaacaagttagaagcttgcattacaattaagaccatggtttgactggatctagaaatttcttcaaaatgtctagtgttcttcctactttttgcaatctgaaacaggtttaaaacagttttaattgttcttaccctgtaaatggacaaaaagcagtcattgatatttttctattttttatctagtgttcctctctgtaatgccagaagcatacctttccaatattttatttgttttcttttcaacaacaatttatttagttttagagagattcaggttttataactgtagatttaaaaaataaaagactaagactttatcactcatcactcctatgctttcaagctatgaagctgaaaagggatttttctcttacaatatctttggtgtaactgaaagcttttcatttgcagtaattgtgcacctatctcatgatcatgtcatgcttgtcatgtttgtcttgctttcccatgtaatctcagagtataagttatcatattcaaccacagagaactgtgaaataagcagccttaatgcaaaataagaaaaaaattcttatttttttttttttgtattttcttaagcatgtttctgaggtagacattaaattattattttattcgttccgatggataactctcattagatgaaaaaattaaacaggtacaatgcacttcattcctcaagagaagaattacaatcgttaaagggttttcatatcttcttttgtaaatgttatgattcttaatgatcatctcctttgttctcatttgaccactaaatatgacaactatatttgaaaatcaagtcatcattttggtatgcaacattttttgagactgagaaaaagcagacccagtaacctctctattgtctatccagttatgctaacaagaaaaattataataataaaaatttgacaacttaacatataaatttgtggtggaaatcacttttctccttatttgttccttattaaatttgcactacctagaccaggtatgtgaaagatgtcactatcatatgatagcctattatttatgcatatacttcaattggtagagaacccagacacccataactaatttatattttaaataagaagcttttggtgtagcctacactttgaattaatacaaccccagttaagaccttgaatcctcaaagtacaatatggtcaagttacataatccttctgcgctttgaatgtgtaaaaatgtgagttgcatcacccgctctttaaaagagctgatcaaattaaacgagataattaatgtgaaggaaatcattactgcttgaaacttaatgagtactcagaacattgataatgatgatgatggtgatttggttaaaaatcatacagtgtagaactaaaaggaatgtaactttatatttattagaaaatttaatatttatatgcatatctatttggttggatggtagacatgtaaattccctaattcaagattcctccatcctttctgagaagtatgttgggaagattgacatgttggctttggcaagggtttgtcaaaccatttctggtcctcggattcattttttattcaagttcacggcctttgcaatgtcttcatcactaccctgtcttaggtgatgaatattctaggatattcccgtttctcagccgcactttttcttcaggtctgtctgtgtactcaatcatgtgtatacgcaatccatggtgttctgtcacaagtgagaaatattctacatctctgtggagcacatttaggcctaccggtcttaacacagggtgcagactattattttgttctcaggcaaaactgagagcaaagcaatcctcaggccttgtaatatttttggactgtatttaaagacaaagaactggttttcttctcagatgcacaaacctatcaggactttatcttcttctcatttcccagccccttcctgaacttgtctctagagataaggtgcaaaacaaatttttaggatcaactactgtatttactggaaataccatattcttcagctttttgatccattatatgtaatctcttggtttattatatgaactacctttcatttaaaatactattatttcccatatatgtatgagaaataatcatatatatatgcacacatatatatgcacacatatataaaaatagatttatgaaaaaatcttatatatatttcaatagttttaaaaatcatttcattaattttagagaaaactcacttaataattgtaggcttatactttttcttgcatgtaacatgaacaacaacatcatttttaaaacaaagactacttcttgttatgttgagcaaccatttttccaaatggtgtgaggtttgcataccacaaggtaaaaaccaactatatttaaatattacctgttctatcaacttcagatgaaaatatgcagtataataattttcaaaaacaaatacattgaggcgattctttgccatcatgatgtttccaaagcaaagataataaaacgtcaattaatgaataatgatgatgagtaaataatacccaaatttgtttaatcagtcaaaatataaagccagtgaaactgaaaagcttttgttgtttcctaatcaagagaccttttggctaattttattacttaataaaacatttattacattgacttggttctacaaactttaaaaaatttttgaaatatatagaagtctcatttttatttctataaatcagaatcttataattttcacttcatgttcaaaatatttctccctttgcttcctcttttatgcatggtttataaatagttatcgaagagaattagaaacatacatgaatggtactttaggaggtatatgatttttaacttaattcaaattacagttatgtgttcagttcaggataataaatagagtggtaatgaattctttccatttctgatgcatgctattgggtattggatttatggtagagattagctttgattaattcttccctgtctgctgactcaactctattcttcagtgttctgaccactagatggtagggtcgtgttgcctaactaactagtctggccctgcccctatacagcataaaaaatgtaagatcattcattatttttcttaacatctgtctcttattttaaaggattatttattataaaactccattttaatctggaaatgtgcgtatatacagacatatacatacgtgtgtgtgtgtgtatatatatataacatatatacatatatacaaacacacacacagcaggacatcagataatattgtttcatgaaaatgttgatgattaacaaaatcaatttttggccagggccactgtctgtgtggagtttgtacgttctcatatcatgagcatgtatgtacatgctcatatctgcatgggttttatctaggtaattcagtttcctcccacaccccaaagatatgcacattaggttcactggcctgcctaaatggtcccagtatgagtgagtgagtgtgtgtgtgtgtgttggggggtgggagtgactatgacctgtgatggaatggtgtcctgtccagggctggttcttatcttgtgccctgagctgttgtgatggtctctggccacccaccaccctaaataggaataagtgagttagaaaatgaatgaatgaatgaataaatacaaattgttataaaacaaatattcatgaagtatacgataattatacaaatgcacaacaataagcaatgtggtataaaagtgcccagtgggatctcctattagtaattgtttgcttttgaactgtgtagtggtaggagggtctcctaacaatgttcattgtgtaaacttcacttgatttaactcaccacaattacaactaccatcactcactggttcactaaaaatcgagtaaataattatcttatttattattaatctttcttacctgtatgcatagatgatatttatttcagtgtttaatattaggagtgttttgggtatttatttggaagtttggtggtgtttttatgaccagaaatatactgtaggaagttaaccctgtgtatatcaatcaccctgtgttaaaatttgtttcattattatacattgtattgcttaaagtcaaagttaccaagaacctatccaccaagttaagtgagcacatacatttacacacacacacacacgtatatcacaaagatcaaaatttaaacaaaaaacttatagaatattctttattccattttctatttttaaaatttaaaaatgacatctttataagtgatagatttagtgctaggcgtcaaatgtgcaaagataaatacaatatagcacttactaggaagctgataggatttggatctttgtccccatccaaatcccatgttaaatgtaatccccaatgctggaggtggggtctgctgggaggtgattggatcaagggggtagtttctcatggtttgacacacatcatcccccttggtgctgttgttgtgatagtgagttctaattagatctggttgtttaaaagctgtggcacctcttccctcaatctcttgctcttgctcgggccatgtaagacatgctggctctccctttgccttccaccatgatttgaagctttttgatgcctcccaagaagcagaagccatcatgctttctgtacagcctgtggaacagtgagccaattaaacctattttttatataaattacccagcctcaaatgtttctttatatcagtgcaagaatgaactaatacagaagcctattctctaataatggaaacagggaagtaatttaaaacaaaaacacaacaacaactttgggataagagctataacacaggaatacacagtgtgaaaaagtgccaaaacccaaaatgaggccagtgaaggaagaagatatgccagaggagaaggacataaccatgtaaagaggagaaaggggaataagggagcgtaaggtattccaagcttcagaagagaatgtgaagataaatatcctgggtttagatcctaaaggatggatttagatgaaggtgcgatatttgagtcaggcacatgtaaggaatatcctaaagttctgctagtgagtaggagcatgaaatattaaggtgaataagcacaaccaggtctgagctttattattacatactaagcagaaaagtgtttcacttgttcctgttattagctttcactcattcatgaagataaggtaattaaagctgttcaattcataaaataagtgaaagatagaatgaaatatatagatctacatccgaacaaaatatatagatctacatctgcgctttgttattacatactaagcagaaaagtgtttcacttattcgcattattaattttcactcatttaagaagataaagtaattaaagctgtttattttacaaaataagtgaaagacagaatgaattatatagatctacatctgatataatcattttagggatgaggaaccagtcaggagtatgtcccagcttcataattcagggatcaagtggaaaaaaaaaatctctgtgaaatttaattctgagctactatttgtctttactttttaaacaagaggaaaaaaaatagggacccattataataatcaaaacctttccctaatcctgcatttatcaccagacttcagaagaagctttagcctataagtgcattaccctgagaagcagtttgggagattgagttatatgggctgccaacatgcaagcacctatttttcaagaactagatgggataaagaatacttgagatatattgctttccatagtctaactcctgtaatcaagtgaaagggaaattggtacaaatcaaactattgcatctaagttctttatagaaataaaagaatcaaatcaagaatcattacatgcccccaatgctgaaaatattagataaagtttaataaaactagaatggaaatgggatctcaggaggaaataaataaatgagactattcttaggaagagatgcaaatacaggtattataattctacattgattataaacctgaaatgtaaggtagtttgggctactattaagattaaacttaaaacagtgaatttgagcatacctttccttgttcaattatttaccaatataaagaaagaggaaaggtgtatctgatttgcttctttccttggaatagtatttttatttattcattcaaatatatattgaacttttaaatgctagtttttgtgctcaggaactgattatgcttacacacgaattttgcctttagtcaaagaggaaaatcaacatgtaacagataaatttattttttacacaagtaacctagagatcaatcaattgcagctagagtgcataacatggatgaacaattctactcattcaaactagtagagattttaccaagaaggagataaagtaaaaatcttacagcataagtgtgagttcaacaggctaaaataattaacagggagttctagcaggggaaacaatacgggtaaaggcatagatgtatgaaaaaatatatgcttatttggaatatgataattgttcattgtgatttttttttcaatgtgactttcttaagaactgggaaactattataataaattagaaaaagcataactgaaaatccaagagaaagggaatgatgaatatgagacagggaattgggtctcaagcataatgtgcaacataaaatgacatcaacactttccctttggcaagagggaagaagggacatatgggatgtattgcagacaacttgagagatggagatcaaaaatttgaagaactttctccataatggcctcagtttataccatgaaattgaagacaaggccattcatggaggtttgatgtgagtgacagaaactgaatagctgcccttggtaatggctgagtttggggtaggtgttagcagcaattacgtgccccatttcttctcaagaagaccccttacatcagctgctgctgagagtaattgttgttttttaaggcaaggtattttagagactttttttttttttttttttttgagatggactctcgctcagccacccactctggagcgcagtggcccaatctcggctcattgaaaccaccctctcctgggttcaagtgattctcccatctcagcctcccgagtagctgggattataggcacccaccatcatgcccggctaatttttctattttagtagagatggggtttcaccatgttggccaggctggtcttgaactcctgacctcaggtgatccgcccacctcagccttaaaaaatgctagggttacaggcatgagccaccacacccggccacatttttagcataataaatgataatccaacctttataaaatctagaagtccttcatactctttttcttggttgtcttgaattcatgaatgcttaaattggtgaattcaaaactagtttaatgtaaactcaacaattctttcaggacttagattcagcatgaatattattgatgtgtttttgtttagaattgaaatggatttgagattttagaggtcccacaggtctctgcaacccttatgcattatagcactgaggctgtcagaatgtgtgaaaattataaatctcatttagtaaaatattgagagttttagagagatttagtaaaatactgtgatagtttatattaaccatattaatattatctgtgtataatcataacttattcccactgctactttgaaatacacctttccagggtcagcagcaacttattcttgttcaaacccaataattttgtctcagaatagcaattgagagaagagcatctgtagccacacttctttggctcaattctgactctgccacacattaactagtgtaaccttggacaagtaacataatttcttagtgcctcagatttctcacctctaaaatgaagtcaataattgaatctacctcattggattgtaagaatgtctgagttagggttacattagctactgtaacaaacaaaccacgaagtttcagtaacaaaataaagtcaacctttttttgtcattctgaactttccaatgctgattttcctggtcttcagagttggaggtgataggactgacctctcagtcattctgggccccacgttgctgacagctctgtcatcctcagctgcaccggtgtccagttgtttggggtggggggattgatcatgggggatcaaccataacgagttttgatgtatcatgcttggaaatgtttctcatgttttcccatatatcatctgtttgctaaaactgtcacaaatctacttctaacaacatgagaggctgggaagtattgtttgcctgtgtgtttagaaaaaagaggaaatgaggtaggtgatgagtttgcaatttctgtaaaattctactatttgggacatgaaaatataaatgtaattttcttttaaaatatggaatatacttacatccactgcatgagagacaaaccaaagttccctccaatcattgtacccaagatctttggatctagcagagttatgtccatcaattctggattggttcctcacatctatcaatgaatgaacttaaagcaacaacattttccagcccagacagatgatagccacaataactgcatttctcgtgtagaagagggaagaatagaagacacaaagcaattcttgataaaaatattatgcatgctgaagacttccgaatttatgggtagggcatgtctcttgattaggctttggctgtgctctctgtgaggaaattagttgtctggtgttatctgcagtccttgacccctgccttttgaaagtttgttcttatccattgctctctgtgaccatatctgcaatggccattccactaggtcgaatttcctccttgggaacaccacagcttccagaggccacttgcttattttaatttggactctgggggctgttttaagctcaaacatcactgtttctcaaagtatttccatggcatctaatcttaaattcagtcctccctgtttcctgtatatctgtgcttcctttattacattttcttgcacataatcttatgtgactctgtttttaattttatcaaagtcttcaataactttcttcataggcaactcattgttaatatgcccttcagtcttgtttaccctctcccttcaatctgagtttataaaacttcaccataatgctagtgtcacctgtcttaaacacataccttatgtcacttatctgattttaacttctattttagccccctgataaagtccatcaacctgaccatgaataacaagcccctataggaagtacttcttgtttttgttttaccttcagcatactctcagctctgggtcttgcacatatgtttccttgtactggtgacaagagtctccatattatataattcttatgcgtgcattcaaggtctccgtttagggatttgatttgttttgattgctgtactaacaaattaccacaagcttagtggcttaacacaacacagatttattatcttatagttttgggggccagaagtccaacaggaggctcactgggctaaaatcaatatgtcagtgctgaattccttctggaggctttagaagagaaatagtttcctaacttttcagcttctagaggccactgacatctcttggctaatgcccccattagtccagctttcagacagcatggttaagctgattccttcttattttgcaatgtctctgcttctctcttttgttcctttcctctacttcaaatgactgtttggattatattgagcccacctagttaatccaggataacctcagtattctaaagtcaggtaattagcaactataattcccctttgtcccgtaacccaagacattcatggattctaaggagtaggatgtaggcattttggggaaggcaattattctgcttacccaatatttacttctccaggaaaccttcttttactccccaggctacgttattatttttccaatatgtttccaaagctgttcctacttttctattattctccattaaaaaattacaatttttggtacagattgatcccttgatagacatcaaggtctatgaagtatttttttaatctcaaaatatctatcatagtactctacatatacaagtcactcattatattttgaaaataaattagataattttgcgaaaaaatacaaagcccttaagtgtgctgggtgactcctcacatctctttcagccatattttattttgttgaattgcatttgatgtatgaaagattagtcaagacattaaaatacctatttgtagtttttctaattttgaaaatataagttgaaatatattttacctacttagttcaccaattatccacataagaggaggacaaagctgaagcaatgaaagcaccaaggtcaggtcaatatgggttagaattctgtctgtcttaatagctatatgtctgtataattcatttatttctttaaaccttagttttctcatttgaaatataagaagaatccaagtagctatctcaagggttgttttgaggataaaacaagataatgcagacagtacttatcagagtgcccagaacttattgagatctcagtaagtgttgattattgttgatgatgttgtaagaataaaaatttgcaaaatgtaaaactgaacagatacttacacattacatgtgattattgttaaaatcacataggttgcagaattttgctttaatagtactctatacttagggaggcttccctactaaatacaaatttaaattcctgctaatgcttttaccatttttaccacttgcaggatactgcctgccccaccacccttcacgctgacttctgctttcctttcttcttcctgtatcatctatgctatctatttctttaacttacatgtttcctattaacatgatatacatgcatcaaaaaaaaggcattaccaaattttgttggtctgatttactcagcaccttatcagcttctcttaaaaaggcataaaaatctgcaggtaccaatcccctgaatttatgtagttagccaattttatctatcatatttaattgtagtgttctgaaataggtccattcaattataattttacttattttttttcaaattgctctaaattacttgtaatttgtagtcgtcatcttaagaatgtattggttaaaagtaatttgtaaattaaaacttattgtgcagtgtagtttgtagttgatgacattaatggtagctattataaggatacattgaagaatttgaaatgcatgtttaaaatcaaattgaatagaatgacaatcttgctcaagaaataagccacatattcccagaacaggttattataaccacaaattggcaaagatttccaattaaatgtttgagactatgaaagaaataacccatcacatatgacatgacatttcctgaaaaatatcacccatatccttagctatctcctattatcggatgatgcaaaatgagatttaatttaagatttggtcttactattttggaactttaatttaagaaattttatcttgatcttcttttcaaaacctttgaaccactcatatttgaaagctttcagtaactttgggaaaaaaatcataagaaagcctgcgaatattgataacacatcttaaggtctatttcatttcctattttgaggcagaaagacaacttgtaatataactggatccacaactgaggtactctgaactcttgggaaagcctgctctattcatttcaatatgtcagggtagaatagatatattttaggagatcactgggaaggataaagtattttttctttcaaatatcactgagatcataaatatattgttagaaatgctgtattttgacttttcttgatgctttagtgtcattcaaaatttattttggctttttcagatacatgcatattctctgtaacaatatttctaaatgacagctcattttcaactatgtaagaattttaggagttttttatattgaactttgcaataacataaattcgcaatttacgaaagatcatcatttgctattgagttttggcaccacttcaaatgttgccagttacttcaatataaatatactttaatttttaaatgtttttatctacaaggtgaccttagaaatacatatatatatatatatatatatatatatatatatatatatttgacttttcaaatatcatgtattttttatattttctagacagtgttgagtttaaatattttgtctaattaagataacatgttttgaatttatattaataatatgatcaacatgcctctaggtatgtgagtatttactctcctggcactattcttataagttgtgttgtttttaaactttataaactctttttcatctgtgcaaatagactttacgattgttttatttctccactctctctttagacgcagcttttctttcttcttctctatctttagtgtcaccagttattttactcttatacaatttagaagatctaatcaacttcttttcatataggaaaagttttttataacactgtgatgatataaactttcccacagaaaaaattaacctccatattaactgaagataacattaaaataagtatttttggttggcatttggtttatatcacttcccagattctatgatcaaatttttattaatattactttttgaatcctcaaacccatatcattatttctatttaatttctacttttttttggctactaacgtcaaattcttaatcattatactctgctgccaaccactgtttttcaaaattgattatatatctccttacattctgcctttcacactaggactaatctttgtttcataaacattctcctcactttcatttatccatgtctgtgctcaggtcttttctgtagccttggatgctttcctcatatttctcatatataaaaatcattgtcagttttcaaggcaaagtttaaatgctgtgtcttctatgaagcctttcttgataattgaaattaaaataaatgttctactttttcaaactgcagtcatttatgataaaagcacatgggaccttgtgcttgctgtttcagttcattggcactcttgctagaattctgactccaacccagagtcagaaagaaagtacaacataatttaaaatacttgggtttttaagtaatagttatcagggtttcaaacctggctctagcattcaataatgatttatctagggaatatgaaaccctacatgctggttatggaattaagtaacatgcactagcaggtattcactcacttgaattatattgtttttgtttaaaattaaatagctgctttgttatgcatcatgggctaatctattaatttaatttattcttacctcatggatttggataattatagaatgaagaaatatgtaataagtgactctgattttgaaagatgagcaattaaaagccttggagaaaaggtggaggcttaggtatttcaaagggaactgttctatgaatatataattaatgagttagagaaactggagaaagggagggagattgagtaaacagtaacaaagggagaaagttatgataattacatatgagaagatgataataatgcattaagttggccataactgatgatcttggcttttagaggagctcatttatttaaaaaatggcatgcagtatgctggatattttacataatctatcatattttttccagaaagaaattttggtcaattcagaatgctgttgtaatcatttctaagcatatataaaaacatattagccttagaaataccagaaaatatgtagtttaactttgttgtatttgactagcacttgaattaatcttgatcacaaattagtattttcagaaagcctgtatgccttatggtggaatattttcagtaaacatgaatatgagctgttaaaagcttttctcggtacactgaaagtcaagaaagtgcagaacatttttcatgcaattaactgcaaatgttttgcattcaatacataatcctcttccttatctgtttcctgtgggttctttccttggtgttatttgaaaggggaaacatcagtttagtttgttagaactgcacttaaaaaaaaaaaaaacaacaaccacaaaagaggtgagtccatatatactaaaacacaaaacttacaaataagggaaaatatacagacactagagattggccattgtagcctactccatgtattccagctgcagactctgaagggatctctatgaaatctggtaattgaagtttccaaaaccattacagtagaagattaaaataaaataaattagattaattttagggatttcattctgaatctttgagatttaaatgttatttttataactagaattaaccaagtaatattttcagattagcaaattataaattagagtggtgtacactcctggaaagaattatttcctaagtaaaatgggattattcttccttatataaataatcagggaaaataaaattggatttctcacaaatgattctttggcattatgaatcaactttaagcaaaattgtcatacccagtgtgaattttcttagggttcaatatagagtataacacaatgagacttgtaaaataaaaatcttcgatcatgaggttaataccagtcatttgaaaattatttttgttggaactatagaaagttaatcacacttctctaaaactattcaatatatgccgaaatcatgtttttaaatttaaaaaattacagtaaaatagacgtatcataaaatttatcatcttaaccatttttaagtgtatatgtcaattgtattaaatatatccatattgtacaactatcaatactatacattttcagaaatctgttcaccttcaaatgtgaaaatctatttattaaaaaatgactttccatttctccttctcctgtctcccgacaactaccattctactctgtctctcaaattttggggtactctaaacaactcatataggtggaatcatacaatatttttagcagttttttttttattgtggacttattacacttagcataatgtcctcaagattcacacatgccgtagtatgagttcaaacatactttcgaggctgaataatattttattttgtatcgataccacactttgcttattcattaatctgttgatgtacacttgggttgcttagacctttgagatattgtaaattatgctgctatgaacatgggtatacaaatatttatttgacaccctgctttcaattattttacatatatatctagaagtggaattgctggatcatatggtaattctgtttttaattttatgtccccaaactgccatactgttttccacagtgtctgcaccattttagttgtaactttagaaatattaacacatataaacatatatacattttaacatatggcaatgctataaagtctaacctttgttaatatctttcttcagaaaattcaaggacttcagaatcttttaactacatttcctctcctccttaattatatgtctattgtttagttgttttaattgtattaacaacaatcctttttttattattattatactttaagttttagggtacatgtgcacaatgtgcaggtttgttacatatgtatacatgtgctatgctggtgtgctgcacccattaactcgtcatttagcattaggtatatcacctaatgctatccctccccccttcccccaccctacaacagtccccagtgtgtgatgttccccttcctgtgtccatgtgttctcattgttcaattcccacctcctttgtggagacaaggatgaagctggaaaccatcattctcagcaaactgtcgcaagaacaacaatacttacacaatcattactcttttacactttcagttttgccattcatgagagattttcttttatctagtgctaaaattcaagatatacaagtgttcttatgtcttctcaaaagcaaaattatgtttaggttgccgttaaatataattgaaaactatatacaagtgttcttatgtcttctcaaaagcaaaattatgtctacgttgcccttaaatagaattgaaaactatcgaagccacagttttaggtgtaggtgagggtgtggaaggagttagaggttccctattaccttgactcctttgatatatgtttataccatatcaaacagaaaggtcatacaaactgaagtttaagttcatctgggttaggcaaatgtcatcagagcaaatcttgcttcagtgtttggttcacattcctatgacttagctttctcagatttttgcttctaaagtttcctaattttcttgccagttcaacgtattttgaaatgtttattttagtcacacatttaattatttttatggtaggacaatccaccatcttgcaggaaatggaagcttgttcattatttttgtcttttgttagtgttgtaaagtacagatggaaggaaaatgaaaaaaagaaagttacttcttaatatggaagctctttttttcgagggaggtggtgaacagtgcttcacattactgatgagcaaaatctacactttgaaaaaaattaaaaagcagtaagactgaatgatagactagaataacttaactagtttgagtgaaaatatggccttgctttctattaacatatattaagtgcatctatgcacaaagctatttgtgtacacaaatggaaataagagcatgaaatactaatagcccagacttttcttagatttgccttagatttgtagagacaacttaaagatgctttaattagccaggtgtggtggtgcaagcctgtaattccagctatttgagaggctgagtcatgagaataatttgaacctgggaggcagaggttacagtgagccaagatagctctactgcactccagcctgggtggcagagcgagactctgtctcaaaaaaaaaaaaaaaaaaaaaaaaaaaacaatgttttaaatgaggagctcagttcgtcatagggcattaaaaaaaacttaaaatatttaataaatattgtatgttttaatttttaatttcattcctaattattactctttaactttagcaatgtcactgaaccaatcccaactaggattttgtttccaaatctgtaaagtgacaaaacgcactatacaagacagagtattttgcactcagtagacactcaagagtttaaacaatatgtgctcctcagaactacacgagtttcatggaaatgatttatttttggagaaactagtagtgtcaattgtaatttttactgctaatcaaagctataaaatttgaacaattgtaaatattgaggtactatattgttttacaatagtatcttttatttaaatattctaaactattcaatgaattttatgcataagaattactccatctacctttgagatgttacatttatataacccacttttccctggtctctttaacctcattcttgtgtctaactgtaaatgtgcctgctgtacaataaatcttgattatctgtgctaaaatagttgcgctctaggacatggaattaaaaaaaaaactgatccatccagctagactacagagaatgttgatatgtttcaaacttaatccttataacaactaggtctaggtcatggccattttatctaaagttatacccccacctccacacctagtttagtctttaattcaacaaataattctattaccttgaagaggtaatatacagttttcattagttaatatttcaaataaatattaaaaatatatagttttattttctctaaaactcctttcatttctgtctttatggcccttggacaccctactcttacaatcaaaatgtttcagtgccctccaaaatcgcttatttaaattcagatactccttttcaaccacagtgccagctcacaaacttctttcatttcctttagagtatgttgctcttctgctcagaaattaaaataacatttttggttcacaatttttttttttggacagcactaatttatgaaatgtttcatattgggcagatatctttatctcattaagtctttgttttatcatctctacaagagtgatgattgtatttatagatgcattacaaattattatgagtcttcaaagaatgagaacattgatataaagttatggctgaatatagttatcattgtttttacagggtgtcagttgaatattgccaacaaaacagaaaagaaacaatattttattgttataagtatgtgcatgtgataggacatatagtataaaatatttttcttcgttaatttatgattaacacataattgtacatatttatgggatacaatattatgtttgatatatgtacacattatgtaatgatcaaatcaggataattagcatatccattatcttaaacatttatcatttttttctaatgaggttttaaaacctctcttctagcttttttgaaatctacagatatttcaaaatatgtttatatttacaaatatctgtatatttcaaaatatctctatgttaacatcattgttaactagtcatcctactatgcaatagaacatcagaacttattgctcctatgaagctggggtgttgtagcaattgaccagtttacccccatctccccctcttctccttgctttctaataatcactattcttctttcatgagaataacttctttgattccatatattagtgagataatgcagtatatgcgtttctgtgcctggcatagctcacttaatgtaatatactccaggttcattcatattgttgcaaatgacaggagtttttttatgcctgaatagtattctactgtgtataaatgccatactgtctttattcattcatcaattaatggacatttggattgattccatatcttggatattgtcaatagtgctgccataaactaaagaatgcaaatctctctcccacacactgatttcatttcattcagatagttacccaggagtggaattgctggatgatattgtagtttgatttttaattttttgaggaacctccaaattttttctacaattgctatactaatgccagcagtatataagggttcccttttcaccacatctttacttacactttttatttttttattttttataacagccattctaactggagtgaggtgatatctcattattgttttgatttgtgtttctctgatgattaataatgttgagaatttttccagatgcctattggccatttgtatgtcttcttttgagaaatgtctcttcaaattttttgcccagtttttaactggattatttgattttttgctgttgagctgtttgagctccttgtatatttcggttattaatcctttgccaggtggatggtttgcagatattttctcccattctgtgggttgtctcttcactttgtcggaagtttcctttgctgtgcagaagctttttactttcatgtaatcttatctatctatatttgcctttattgtctgtgcttttgaggttttatccaaaacatcctaacctagaccagtaacatggagcttttttcctatgctttttctcctagtttcaagtcttaaatttaaatctttgatccattttgtgttgtttttgcatatggtgggagataaatatctaatttcatatatctgcatgataatatcgttttcccagtgccattttttgaagaaactgtcctttcagtgtgttcttagcacctttgttaaaaatcagttggctataactacatggatttatttctgagctctctcttctgtttcattggtctatgtgtctgttcttataccagtatcagtttgggttaatatatcttcgtagtatgctttgaagtcatatagtgtgatgatttgtgaaggataatttttaatatgtaagtcttcataaaataatatggtgaatcacatactagctacctagggatatgtttatatgtttattgaaaagtgtaaatgcatgatattcttctattatagatgttatataattgaaagccaaaaatctaaaaaagaaacattttaatgatttaagcctaggttcttggttttatagcatggaaaataaagaatacaaatgacaaagtaatttcttcaagttcataaaacgagttagtggcagacttgcataagtgtagaattcttactttcttcaggtttccatttttttaaaattaaacatttattttatttgatgtatagtgttttttcttcattagatgactaacttttatatgaatggcaatttgaagtactacctaatggaaaaaataaattatttatgattttatgttgattgttaaattttttattaaaccatcagttgtatttttaaatacctagggggaaaataaaaatatttactttatctaaccctgtaattagaagaactgaatcatcttccattttccaatttgccagattttcacatatatcacattaataattgaatattgagactgagccaaattcaaagtagttaattttagttgagtgaattcagtgccatctggacttctggctttactgacttttaactgacctagttctttcagaagtgtcctcatacttaatttataaaatatttactcaagcctaaaccagaataagtaaggctatttgacagaatacttaattgcaattttattaaaaatggaacaaatgaaataaatgactgatgcttaaaagcttatttattttcattgtcagataattatgtcatatagcagcctgatttctcaatatttaatttatagcttttactctctcctttttcaatctttattgaatattacttctgtattgcctatttggagtcttctgattacaatatatttattttacaaaaagaatgattaccctcatcttcatagtcaccccatccctatctgaattatttcttttctataaaacattggatttaaattatcactataagagtcattatatcatttaatttatgtttacattgatatcaaagcattactgtttctacaaaatttaattttaattactctttggagatcatcttgagattatctttcctttaaatttttaaaaagttgatttccatctgctctatattcagaaacttggaaaattaaaatatgttatctaattataagaattatcgttatgtttttataagtgtaaaataaggccttagcatcccccattcattttgaaggtgatataccaacttgttataaatgctaaattttaaactaatatttttatctttttgccgaagtgaaacacaactataaatgtctatactttaaagattattattattatcatcattaattatgttttataacaaggacatataatagtattcactagacagaagctaaataaatattttctatattctgtgaaaatattcgcattctatttaaatatatacagcacttacctgaaagttattcttaatgtagaggaactctgtaattctgtaactcctgcctattttcacatttatgctctcagcaacccaaaactaacctgcagaagacatgggacttttaaaatatgagcagaaacaagtaagccatggtgcatgtactgcataaaatatttatgaggggatttttaaggaaaggttgaataattaagttggacaaagttagatcaaatatgaataatcatgtgtaactgagaggtgtccaatattctgcagtgagagttcatacaaatccaaaattaacataccgaacagttactactggtgctgctagtttggatttttattatcattttaaatatttattgtatttactattaactaaaaattattttagttgtaactgggttttgatatatttgtcatagacattatctttttaaatcacagtgtgatacatttagagttatagaggtgtgtttgacaacttctacaacattccatcacttaaaatatatatatatacatttatatatatataaaatatatatataaatttatgtatatatatacacttcttgtccaaactcataaatgtgcaacaccaaggtggactgtaacatacactgtggtctttggggaataataatgtgtcatttgctttcaataattgtaacaaatgtgctacctggtgggagatattgataatttaggaggctgtgcatctgtggagtttgggagtatgtggattaactctatatttttctcccagttttgcttttaacataaaagtactcagaaaataaagtatgttaaaaaatgcttctatctatatacaagtagtaccaaaacactttcagcaaagaaatatagggaactatagacatataaattgtatctataaatatttgctgaaaaaatgtttttctataactatatatctgtttaaatattatttatgattaaatgataaattttgtcaaataatgcttggttttactgtccactttttctctcaacaaataacacttttgtatagttatgtaatctttctctgtagtcttagaaaactctacctttaaatgaacacagagatagttatgtaattacacagaaatagttttctcaccttgctttgttttctcaacaacttctttaatatatctgtatattccaaaactctagaaaacttttcaatattgtatatactttaaaaatttttatttcatacattttcaggacattacataaaattgtttggaaggaaggaaagagataaatgaaggaattatggaataacaggaattaagaaagaatggaaaaaggaaaaatatgataaatataaaactttttcttttcactacagttttccaaagtattttgacaggtgaagtgaaaatataacactattttcactgttcaaaaggaatttagaggaaatattaaacacaattatattataaatggcagagataaaatgaagtaaagggaggtaatgtttctatgggaactggtaaaatattgaccccagtggactgtgataagatatatatatatatgtatgtgtgtatatatatatatatatatatatatatatatgtatgtgtatatatatacatatatatatgtatatatatgtatatatatatgtatgtgtgtatatatatatgtatgtaaagccatcaataaaatatatacacagatataatcaacattactatagatacataaaaatggaattttaaaaactattcaagtaactctttaaatttttttcaaagttttcaacttctttgcctttgctttgaatgtcctcccgtagctcagagtaatttgatcatctgaagccttcttctctcagctcgtcaaagtcattctccatccagctttgtttcgttgctggtgaggaactgcgttcctttggaggaggagaggtgctctgctttttagagtttccagtttttctgctctgttttttccccatctttgtggttttatctacttttggtctttgatgatggtgaagtacagatgggtttttggtgtggatgtcctttctgctggttagttttccttctaacagacaggaccctcagctgcaggtctgttggactacctggccgtgtgaggtgtcagtctgcccctgctggggggtgcctcccagttaggctgctcgggggtcagaggtcaggtacccacttgaggaggcagtctgcccgttctcagatctccagctgcgtgctgggagaaccactgctctcttcaaatctgtcagacagggacatttaagtctgcagaggttactgctgtctttttgtttgtctgtgccctgcccccagaggtggagccttagaagaatgtataactagaataaccaatacagagaagtgcttaaaggagctgatggagctgaaaaccaagtcttgagaactacgtgaagaatgcagaagcctcaggagccgatgcgatcaactggaagaaagggtatcagcgatggaagatgaaatgaatgaaaggaagtgagaagggtagtttagagaaaaaagaataaaaagaaacaagcaaagcctccaagaaatatgggactatgtgaaaagaccaaatctatgtctgattggtgtacctgaaagtgatggggagaatggaaccaagttggaaaacactctgcaggatattatccaggagaacttccacaatctagcaaggcaggccaacattcagattcaggaaatacagagaacgccacaaagatactcctcgagaagggcaacaacaagacacataattgtcagattcaccaaagttgaaatgaaggaaaaaaagttaagggcagccagagagaagggtcaggttaacctcaaagggaagcccatcagactaaaagcagatgtctcggcagaaactctacaagccagaagagagtggggccaatattcaacattcttaaagaaaagaattttcaacccagaatttcatatccagccaaactaagcttcataagtgaaggagaaataaaatactttacagacaagcaaatgctgagagaatttgtcaccaccaggcctgccctaaaagagctcctgaaggaagcgctaaacatggaaaggaacaacaatatgcggtggcatattctcactcataggtgggaattgaacaatgagaacacatggacacaggaaggggaacatcacactctggggactgttgtggggtggggggaggggggtgggatagcattgggagatatacctaatgctagatgacgagttagtgggtgcagcgcaccagcatggcacatggatacatatgtaactaacctgcacattgtgcacatgtaccctaaaacttaaagtataataataataaataaataaatatatatatgttttaggaaaaaaaactattcaagtaactcaagaggataggaaaaaagagaaagagaatggaaaacagaaacaaaagaaagcattgtacttaagttttataatgttaatcattactttaaatagagatggtatacatacactaattaaaatacagacattggtggaatagatcaagaaaacttagctcctatgtaagctgtctatgaaaaaaacacacttcaaatataacaatataggttaggtagaagtaaagactggaaaatgacataataggtaaacattaatttcagaaaaagaagtagtgactatattagtataaggtaaagcagaattcagagcaaagaaatctaacagagacagtcacttactataatgataaaggattaatacaacatgaacacatattagccttaaatgtgcatgcaccaaacaactgggctgcaggatattgtaagcaaaatttaatagaattgaaggaagaactaaaataattcacaactattgatggatatttcaacacctctgtcgtcagttgctagaacaacttgatgaaaagtcagcaaggatatagaggaacacaacaatgtcaacaaacatgatctagtcaatatatatatatagaactctttaaccaaatgcacagacattttcagggcccccgggtcacatgaaatagagcatattaagagtcatgagacaaatctcaactaataatgatcacacagagtatattctatgaccataattcaagcatacaagaaagcaatactagaatgacaaggaaatttccaaacacttggaaaccaaaccacacacttcgaaacttactataggttaaagacaaagtcccaagaccaattttttaaaaaacccagaaatgagtaaaaatgaaaacacaaatatcaaaaattgtggaacatgatttaagcagtgctgagagagaaatgtatagcacaaaaaactttcatgtagaaaagaaaaaaaaaatcaaaccaataatatgctccctcctcaaagatctttaaaaagcaaaattaacccacacaaatgaagaaaacataaagataatagcaaaaatcaatgaagttgaaaaaagagaaacaatagattaaatcaatgaacaaaaacctagttctttgaaaataataacaataaaaataaaattggcaatattctagcaagaaaaaaagacagtagacaaattaccaaagtcagaactcttaacagtggttagcactacacaactcgtggatataaagaattaattaagaggatacttaggaataccgtgaaaactctatacacttatatttgacaactcatattaagctgaccaatttcttaaaaagcacaaacgaccacagattatatcattgactagccctataattattgaaaaccttgtggttgcaattttaaaaactccaaataaatcttcaggcccagatgatttcactggaaaattctaacaaatatttgaataagaattaacaataattttacagactatttcccagaaaataacacttccagttcatttttttttcaatctactgttaccctgataacaaaccagaagaaaaagcatgcacacacacacaggtacacacacgcacacacacacacacacacacacacgagaaaacagaattcagctacatataaaaggaatttacgccatgaccaggtggagtttattctagcattgtaagtttggttcaacattttaaaattagaataatccataatatgaacggtgtaaagaagaaaaaataaaatgatcatacctgttcttccagaaaaaaggcatttggtgaaattcaacatttatttatgagaaaaaaatctgagaaaaataggaatcaaggaaaaattcctcaacttcataaattgcatctatgaaattccacagctgacattacacttaatggtgaaaaatagtgttttcccattaaggttgtaaacaaggagcttttctctccacagttttcttttaggagttttatgatttcagttcttacatttaagtctttaatcttttttgagttttttttttgtgtattgtatgagacaaaggtccaattttaatccttcacttatgaatatccagttttctcaacactgtttatttcctgattgtgtgttcttcacaccattgtcaaaaattagataaccatatatgaataggtttattctggcctctctattatgtgtcttgttatacaagtaccatattatttttattactgtaactttgtaatgtagtttgaaatcaggaggtataaagtctctaggtttgctggggtttttttaatattgtttcatctattttaagtcttttgtgattttacataaattttaggattctcttttctacttttgtgaaaaatgccattgaaatttttacaggaattacattaaatctgtggatcattttggatagcatgaacattttaacaataataattcttctaatccataaacattggataatttttcatttttttatgtgttcttcaatttctttcatcagtgccttatgatttccagtgtacaaattttttacttatttggttaaatttactcctaagccttttattcttttttatgctatcgcaaatggggttgttttcttaattccttttgtggatagttctttgttagtgtataggaatggtactgatttttgtatgttgagtttgtatcctacaacttcactgactttattttttggtttagtggagtctttagggttttctttgtgtaagattacgtcatctgcaatagagacagtttagcttcctttccagtttggatgtattttatttatttttcttgcctaaattctctggctagaatttccagtactatgctgaatagaaatggtgagtgtgggcagccttgtgttgttcctgatcttaaaaaggaaaagcttttcatttttcaccattgagtatgttagctgtaggattgtcatatataatccttattatcttgaggtacattttttctatacctaatatgttgagagtttttatcataaaagaatgttgaattttgtgaaaccctttatctgcgtctattgagataattatattgattttgtccttcattctgttaatgagatgggtcatatttattatccatgtatatcaaatcatccttacatcccatgtttttttttaatttttaatgtttgtgggtacatcctaggaatattaaagacttaaatataacatgaaactgtaaaacttcaagaataaaatataggggaaaagatccttaaaactggttttggcaaaaattttttaaatataacaccaaaagcccagcccccccccaaaaaaaaaaccacaaaagcaaacaaacaaacaaacaaaaatatagacaaatgaggagccagatcatgatggccaattagaagttcccagtgattgttaccttgcaggtacattacattgaataactatacagattaaaaatcacattcaaaagaacaaaattaatcacagtgcctgattttggtataataaccaaaagaggggaattgaagactttagaaaggacagtaccacattgtctaaaccaccccttcttgataccagggagagcagtgtggagagagaaactggctgcttggggagggaaagggaagtgagtgtgggaatttgcattggaacttagtgctggccctgccacagtggaatacaacacagggcagggccctcatagtccttgattctagactggcgcccacagaagaggcatttagacgtctctgcaccagagaggaatctgccacccaagtaacagaaacctgagtcccagcctgcttcaccactacctgactacagtggcctcgggccctcagtaaatttcagtggcaagcaggctgtagtgaccatggctttgggcaagtcccagtactgcactggtctgggaggctgatggcttggggagcaacctagcatcatgtaagttgtggcagccattagagtgcccagatcactcctcccccaaccccaggcagtgcagtgtggagagagaatccctgtgttgggaaaagaagagggaagagtacaggggctttgcctaagacccaagtacgaaccccaccacttaaaacaacaaaggacagaaccaagtgagctgcttggcacttctagatccatcctgggccagaagggaatccaccatcctggcagaacaaaccggagttctggccctcttctctactggctgcctaacgtagcctcaggccttgaataagtgtcagtgtcagtcaggcagcagtgactacaggccttgaccaagcccctacactgtgctggtcaaagaggctttgggtgcaattcagtaccttacaagctgcagaggctactggtggcctgcgtcaccccttcttcaactacagaaagtacagagtagagagagaatccttctgcttgagggaaagtgggaggagagcaaaggactttgcctagaaacccagggaactgtcccatgtcttttccatgttcaggttggagggttggtgagctagcagtttgcaagacttacaacaaacctagggtcagggcaccctttagtgctaaaatgccaagagcaaccactggcttacggagctcaacaggcagtcccctttaaactactggaagactctctgaagaaggacaggtacaaacaaggcaagactgaaataaatacctaatttttcaatgcctagttattgatgcatgcctccaagtatccaaaatattcaaggaaatataacctaacaaaattgattaaataaagtgccagtcaccagacctggagaggtgaggtttgccctctcagccaggaactgaaaatagctgttttgagggccaggtgaagtggctcatccctataatccaagctctttgagaggccaaggcaggaggatcacttgagcctaagagttaatgaccagcatgggcaacaaagtgagaccctatctctacaaaaaattagtcaggcatggtaacacatgcctggagtctcagctactcaggaggctgagctgggaggatcacttgagacctgggaaatcgagtctgcagtgagccatgattgtgcaactgcagactagtctaggcaacagagtgagaccctgactcaaaaaaaaaaaaaaggtattttgaggtacttctgatagctataagatgtttttgtaaagttaatgacaaccacaatgccaaaaactataataaataccctaaaagtaaaacttaaggaattaaaaataccaccagaggaaataacttaacaggaaaggaaaacagtaagaagtgaagagaggaagagaggagctacagaacatctagtaacaaaatggcagtatcaagtccttacctaccaataacaacactgaatataaatagactaaatgttccaattaaaattttgtggctgaatgaattaaaaaagaacaaaaagctaaatctgactgtatggtgcctacaaacaatccactttacctataaagacatacatagattgaaattgaagaggtggaaatatatattctatgaaaatgaaaaccaaaaaagagcaggagtagctatgcttacattatataaaatagacattaaatcaaaaactgtaaaaagcgtgagcgaagttcactgtataatgataaaagcatcaattcagtaacaggatataatgatagtaaatgtttgtgtactaataccacaacacccaaatatgtaaagcaaatttaatagatctcaagggaaagatacacttcaatgcaatgataataggggacttcaaaaccccattttcagcaatgtttagattattcaggcagaaaaccaacaaggaaacatcaaagttaaactatgctccagaccaaatggatcaagctgacatttccagaacatttcactcaaactgctgcagaataaacaatcttctcatcaacacatggaatatcttcaggatagatgatatgtaaagacacaaaacaatttcaagagattcaaaaaaattgaaatcatatcaagtatcttttctgaccataatggactaaaactagaaatcagtaacaagaggaatgatggaaactgtacaaatacatgggaataaaacaacatgctactgaatgacttatgtattgataaaaaaattaaaaaagaaaaatttaaaatgtcttaaaatgcataaaaaggaaatcaaaacataacaatacatatgaaatatagataaagcaggaataagaagaatatcacaataaatgcctaagacaacaaaaagacttcacataaaaacttaatgatgcacctcaagaaatgtagagaagtaaatgcaaaccaatcccaaaattagtaaaagaaaagaaatagtaaagattagagcagaaataaatgaaagtgagattaaaatattacaaaagatcaacaaatcaaaaataatatttttaaaaagatgaacaaacatttatctagtataagaaggaagaagacacatataagcaaaatcacagataaaaagaagacattacaataaataacacaaaaatacaaaagattgttagagactactatgaattcctatatgctaacaaattggaaaacctagaaaaaatggatacattcttggaaaaatacaacttacctatactgaatcacgaattacatgaaaacctgaataaaccaatagtgagtacaaagattaaagaagtaccaaaatttctcccatcaaaaatagactttactcttctgtttatttatttatttagagacaggatcttgctctgtcacccaggctgaggtgcagtggtgcaatcacagatcaaggtagactagacttcctgggctcaagtgattctcccttcccttctcagcctcttgagtagataggactacaggcaaatgccaccagagtaagctattttttatttttttgtagagagcaagctatgttgcccatgcttctctcgaactcctgggcccaagcaatcttccagcctcagccttccaaagtttcaggattacaggcatgagcgactgtgcccagttgtcattttttttattttatattttttcttgtcatgtagagtgactcttcataataagttttacagttcatcagtattttaggtttgctgatcacttccttttcaagaatacaatatatggccattaactataattgccatgctctacaatggacctcttgaacttcttccttctgtcattttgtatcatttggccagcattttccaaaccctcccatggctccatatccccatcctctggtagctaccagtctactctctgcttttatgggatcaactttttcagatttcacatatgagaaaggtcaagtggaatttttctttctatacctggcttatttcacttaacataatgtcctctcctccaggttcatccatattgccacaaatgacagtatttcattctttattatggctgataagtactccattgtgtacatataacaccttttaaaatccattctttcaccaatggtcacaggttgggtctatgtcttggctactgtgaattatgctgcaataaacatggaagtgcagatatctcttcaacatataaatacgtatatatacccagtggtgggattgccaaatcatatggtagttctatttttattttttgaaaaatctccaaactgttctccacaatggctgtttcaatttacgttctcaccaactgtgtgcaagggttaccttttctccatatccttgccaaagtttgttaacttttgtctttttaattgtaactattctagcaggagtgaagtgatatctcattgtggtttcaatttgcatttccctgatgattagtgatgttgaatattttttattaaaatggtggccacttttagatcttcttttgagaaatatctattcaggtccttctttcattttcaaatcagggtatttttatttgttttactttttattattgatttattttagcaccttatatattttggatatgaaccccttattttctcccattctgtatattatttcctttgttgtttggaagcttttaactttgttgtaatccaatgcatctatatatgcatttgttgtctgtgcttgtgttctctgcaccctgagctcagagtttggactatactatatcacctattaaagtaactgattataaacctctttaatcattcacttcctacaattcatcttttaagaaatgtgaaatactctcaaaggccctttaagtccttctaccatgtagaggtttacattctctgtttcctgggtagctagtcaggacaataaaagattaatctatacttggctttttgcttctgtttgatatatattagtatttctcacattcctccccatttaatggataaacttctctcaaccttgtctgtttcttctctttcctctctctctctatactccatatctttttctgtctctcccatgcatcctccatgcttcccacaaatacacacacacacacgtgcacacacacacacaaacactcacagatatacattaccagtaacagccacctttcaatcaaagttgctatcaatctgtaaatgagttaatgtcattaagtttgaggtctcaccccctagattcaaattcttgctagatatacagcctcggagaatttatttctaacaatcttctctcatttatcacaaggagataaaaagagcacacacctcagtgccatagtttaaaattcataggttgatcgcttagaaacaagtctaattaaattatcatttcaatttcaatgatgaagtaaaagttatctggcagaaaatgtttaatgaacactagtatgaaagttgtttttgcctaccaaacgtataaacttattgactgctaatcagtgaaaaattacattttaaagtttataggagaaaactagtcaaatatatttatttcgcccataaaagatgaaaactgaatttgtctatatcaatgtgcttcccctgccttatggctggcatagattagagaaattaaaaatctttttatagctgaaatatctggattgctgttctcaaagtgtattaaccgtaagatgcttggagtaccacaactatacattttactgccctagcaggaaatgatagcatatttctaaacttccaaacatatattttagatatcagtgggagtaggtttttacatacggttagtgtttctcagtttagagcaaatagttaacttttaatttgccctagtcacatgaacactcaaagaggataattgagaaatatattcctctactgagtttgattttctgtgaactttagtcagggtgtatactaactagtaggaaacctcattctttttcatacttaggtagctatttcattttagctcacatgagaatatttactcatttcatgattccgagtgtatttaatgagtgactactatgggtcattcatttgagtcttaaaaatacaatggttataagaaaaaataattcacatctacatgaaacatgaatcaaagagtgacacaagtaagttcacagaaggaaaagaaaattgtgccacgagtgcatataacaagaggacctgaattaattggagacaggtatggtagagcagaaaagatggcagttcccacatattgttagtgtctttgaagttcatatgaagcaggtaatatttaagaagtttatattatataaatccccaaaagaagatggtaagaccaagtgcttgctagataacaagtttcaatttgtaatccatacaagacagtggtatccacagaaagatgaaattacctgttaatattttataaagtgtttgtgtgtaaaattgtattctaacaatcaagcctgattcatactgaaaggttataatttggggaataaaaaatttataccttgtaaacttaagtttatactttttctgaaaatttattttgtcacaaagtaccatattcagtctccctatctgatgtatatatgaaagacataaaattaagagcatgttgaaataaattatttgtatattaaagcctatgacctgcagcaacacattttcatttgcctcaactatgtgggaaaaatcatctaacattttaaaaggaattccctttaagacattttaagacatatttcaggaaaaatgtaaattctactgaattgagttattattcaaaactcatctttattatgaaaaattttctttaaaagatgggcaatttatatttattgtcactagaaatgcagttattctttaaaaaatccttcattttgccttcttacttcatgtaacttgaaatgaagcaatatgtgaagttgtaatttattgtaatctcagatatataattggttagttaccttcacataatccatggtttaaaaaaaaatccaatgtttaatttaaggtagatgttgtatcatcataaagaaatctcagtggaaatgttgcctaaataattgaagaaattgtcagcaaacattattttttcattaacagatatctatttcacatttacctatctttatgagcattaaacttattagtctatacctggaacaacactggtgtggtgcatattctttaagtgattttatttataaattcttttgtaaatttttacttattaattccacaaaatcgcattaccttaatcaataatatttatacatttttaaaaattaacatcctggcacaaaaaacccacttcacaaatttacatgtaccaaaaattactaagaagtaatccatgttatctgtactactgtagttaagttttacaaattttacttcaaaatgtctcctgtatcagttttattacacccatgatcatagatgaggtgtgtttatatcaccgaggttatgaacttgcaaaaattctgaaagctttacattttgtgaattaaattggtgagtataggatttgaaacttcagttgtttcactccaaattccatttccttttaaaaattaaaattccctatctaaaataataaaatatattcacaaatgcaaatatttatatctattaatgaagataatgaattacttctgtaagtataaatgctaaaataaaaacattccatgtatctctttttatcagaaacagactaaatattttattttattttattttagctcagatatgtctatgcctcttgacttgtctacacttatcaatagttacctaatctgtattattatatgaatgtaattaaggagtaattttgataagttgatataatatttgtgatagaaattaaactatactttcaaactttagaaagcaaaatttaagcaaaattcttacatattttcctttattcaaatgagaagatcattaacagcatgtttgtatgtttttacagaaagcttttgctaacaagtgttcaaaatgtgatttaatttaaacaagcttaatcaatttctgtattatcatatatacctgcatttgtgttgtatttctcttagtttgcataaaaccctattaagctatgaaagtgatttaaaactatgtaacataaaattaaattattttcagtaatttcaaagccctaaaatataacatattttaaaaatctgaagtgtgcataactagccataaaccagaccatcctttaaaaatttctcaatagccccaccttcatcttttttgtttcaatgatagtcatgaggttacagctacaattaattcttgttgttctactgagatggcaattgtttttgttgcagtcatgccaattgtcttctgtagtctactttgagtttggcagctttttcaaaatacaacagtcattaatcagtgcttatcagaaatcctacatataaacactttacataagttgtatttgtgattggacttttatccccagtattttattggaatagattcattctgctaaatttccagcatcatccaaaaatttttcccaagcttaaaaaaaaaattaaactctactactattaaatttattttaaaaagtttgatgtatcaaggggctaaagggagagtggacttttttatcttgccaattgctgagcatttagctgttttataaacactagcttcagtggtacaggcatccaggccatttaaaacattttccttttaccagccaaatggaaaacagtgtcatttgtgagatgttgaagctatatggtaagaatgtttttgtttttgttttttgagatggagtctcgctctgcggcccaggctggggtacagtggcacaattttggctcactgcaacctctgcctcccaggtcaagtgatcctcctgcctcagcctcctgagtagctgggattacaggcacacaccaccacagtcggctattttttttttctttttttttttagtagagacagggtttcaccatgttggccaggctggtctcgaactcctgacctgaagtgatccgtccgcctcagcctcccaaagtgcttggattacaggcatgagccactgtgcccagccagtaaaaatgcttttaaagtcaattttatatatcacagtttctcaataaaattatggggagccaatattgacattagtgccatttcttaagatccatatgattttacagatgtaattagaatgttatcgttattaaagtttggcaagttaatttgtgatttttgttttgaatttgttccagtagacatgaatgcttaggtaatatatttattttaagattctattgtgtctgaaaattttaatggttattgataaaattactagccaacaaatatagtaatgtgaaaagtaatgtaataatagcatttaggactttagacaacttcatttaatggaaattaacagttaaaggtaaatcttttcagctactgcatcatctgcttttgtcaatatattttgggtttctttttcattggtatttaatccaaaatttctaatatgaagagtggcaaattctgtgttttgggaaagccaaacatatgtgtgtacttttaaagaaatcatgacagttaatatcttttaaatatactgagtacatttgtgtatttgtatatatttaaatgctaataagaaaggttaatggcaatgtggcaattatgtgaccagcatttaactgaaatttgatgatgtcattcttattttctagcctttttatgagctgagtagggataaaattataataaacattgtagaaaaattaacgttgtatggacatacatagtagatgattgcacatcagagtttttagcagacaaacataaaactctaataaacaaatagaggctccttagagtatgatccccaaaaatattttcaaagtaatgttctggttaaactggttacagcccatatgtgtgttctatatcacagtggtgtcttgaaaaggactgagttacattaaactaacgattgtgcctatttaattgaaagacttgcaaacgttatgatgggaagatagttacgttctgtgaaggctccaagtagaatacaacacttagttagatacaacaatgttcttatttaatataaacataaagcatctggatgaaatcctgagatgccttaggtaaaatgttctcattatggtaattacatccaacagcatgtttttaattcagcgctccattgctttgtttttccaacatttaatgaatgcatgatctagttgtaactgaggtgaatcttgtcttcaggaaacaaggaaaaaaaaaacaaaccctcaccccttagattccaatttatatacagacattagctccttattaccttcctaagatttcccagagtcaaaaaactttacatcaataatgatatactagattatactactagaaaataagcaaatcaaataatcccataatctttgctggagggcagtggcatgatctcggttcactgccacctccgcctcctgggttcaagtgattctcccacctcagcctcccataatcttgatgactttacatgacaaaatttactttcagttcattcacttgttcatcctgttaagcgttagggatatatgtggaccatagcaattctgattatagttgctaatcaatgtccgggcttatggaccaggttatacatacatgctcacaattcatctgtcaaagtaagccacatggccacggtgacttaaaatgtcatcagtaatgtcttatcttgtattcgggaaaaagggacactgggaatttcgattcatatctaatgtttactactcacagtgtggttctccagagatgactgtctttacttaaagcgctcttatcaccacttcttaggattattttgttgttttatctcagtttccagaaaaactttataaagattataacagtgatcatatttcacgacagtacaaaccaaatgtggagaggaaataagagctctcttagatttcaatttgaaatttatgttgtctacacaaactaaccttgttggatatacaaaatggtgtagtattttgctttattcttttggatatacacaatggtgtagtattttgctttattctttatatgaaaatatggggagaaaactggaagattaagtttcttgaaattaagaaaatatttttctttagttattaacaataactataattatttagttatttaattagttttagtttggtgatatccccaaagagtttctttctttttgttttttgcatgacagagataatagattaatagatggggtgtcaaagtgttttatcatttgaaatattagaaggtgaagtgagactacaaatttaacatattgagtgagtaaaaagtacctgatagctgaaggaagctctctggaaagttgtccaggaagccttcttaggctattcagagaaaacatatccaaagtgagttggattagatccattcatatcaaagaacaatgataaatgggtagaggagttgggctaactaagctactatacaattgtatttttacacagaaaaatactctaaagcctttgaatggcaatttattcattcatattttatctttgtataatttttgagccctcgaggtcatagattttcttatgttcatctgtattgccagcaacatggacaataatattagttgataataaagagtaaacaatattttctttgaatagctgattctacagtattatagagccttataaattgatttcataagatacataatttgttttagttgttttgtaatatgtctattgttcttatttaagaggaacaaaatgaaggaagtcataaatacatcaggtcagaatagatcatggatttatatttgcatatttactaattgttaaaaaacatagaattgcacttttctagcatgtgtttactctcagtcatgtatcgaaaatctttcagcattttagaaagcatttatacaggatataaaatattaccattgaatcaatcatcttggattttttagtctaattatttcacttagattgtatcttaatctataaatacatttgagttaacaaatttagcactgtaaaccactgaaaaatacatgtcacagctttaaggtcaagttatgttactctattgattaaattacaagcatttttcaggagttaaaaaattaaatgtttgagcataagcctataaattttggaattaatgagcaactattattttgatcatggtataaaaataacttcttagaagttttgtattactatatatcctgagatatatcatcaaatttaggacttaaatatttgatttcaaatgatcttttgtcaatgtttaaatttttatttatatatcctatatttaatattatatattttatatattatacatatacatacattatgtacctacaattcagatttaagtaaatttattgtagaagtgactaacataaaaatttattgatatcaacttaggtttggaaagataaagacattcttactctattttgagggaacattataataaattcagcctataaaagccctatatttactgaaaagatgacactttgaagagatctgaaagacaatatagcaaattatgtagatcggttgttttattcaaagtatggtcaccagaagagcagcactagcatgtctgtttaaaatgcagattctaactcctatctaatacctaatgaatcagaatctctgttgtgaagtttccaggtgattctgataggtgctgaagtttgagaacccttcgaggaaaaacactaattaaaactttagatgagctgattcttacaggagatagcaagaatttctcaaagatgaaagaatttctaatttatgttcaggccaaagtcttccctagattcaaaagtgattctgatcatataattagtgacaaaaatgggctgtttgtcaaatatgtgccacaagtactaaatatccatagttagaaactgtcagtgtcatgtccctttgtcctggaagtatgtacactgttcctcattattctgcttcagtccttttcctgcctccttgcaccaagcaatttattattattttttcacatattgcctaattgttgtctcggcagagttaccctccttggccatgtaatgtaaaatatggccacacttcatatagtcatatttctcatcaaagtggtctgtatgtgtatctctcagtacatatcagaatttaaaactttaaaaaatttaattttctgtctttattttatttattcctaaacatttctccaaaaggagaaggctacttgcagatggacagtgtgggtctcatcagtagatgaatctcttatcatgcactgatcctggcacatagcaagcattttttggagaaaaatagaaataaagattgcacatgtgtataaagtgtttaattaacattttatttgattattttataaatatgaattaacacactttgaagtattaagcctaatgaagagtgttcttccctgtgggtgatatttgagaattttattggaccacttctcagaaaaattatcagatgcagtttgctataattcttttctaatttattatcagattgattttatctcaatgtaaatgtatacattctttaaaaaatgtataaatcttttatagacatatctttcatttttctaacttggccaaattcatccataaaatcactttgcatcttgagaaattgcaatagctgaatttgggtttccaaatatgttgtaaaccatgattattaaaaaaaaaaagaagaaaactgatttcttttttgttgtttttaaagttctgcgtctccttaatattcctgaggttttttatgttcccactctaaagtgaatagagaaagggaatcattagggtgatgaatataaatcattctttttttccaatataccttagaaaatgaaaaaaattgcccttaagttgttttgttactgtttagtaactctatattcatattctaggcataataaagtcgtttttatgaaaatatattttcttggggaaaaaaatctcagtggaagctgtacactttaggtggcttatttttcctttacatgacttggttttagagtattcactccagttaaataaattataaatattgcttctcctactcatagcacacaacctagtattacaagcaagagacattgtaatgtactgaccccagctaccaagtgaactcaaatgaaaacattcagatagattatgcatttatgaataaaaataaatttgcttttcagggagtttggccgctggaaagtaaataaccttgcagttgagagaagaaatttccttggctctcctctgcctcttgcccctgaattcttccgcaacataagacttttgggacgtcgacctacccttcagcaaatcacagaaaaccttatcaagaaatatgggacacatttcttgctatctgctactctgggaggtacggctctttgaacctatttgtgcctgtgtgtgcttgtgcctaaaaccgtataaatcgcagaaaagtgttaattaatcaagatagctacagtatgaatagttatagaactcattcattcatttacccaacacattttgagtgattattaaatgtcccacacagtgttcacagttgtgaagcagatgaatattactaagtttctgcatgaaagctatttacaatctaataacatacaaatatttgacataattgttgcactctgtaaggtgatatggaaacttttatttaaaatacatgaataataagaagtcacaggtggggtcatcaattctagttatagagagaaggaaagatttctttgagtacatattaaataactacaattacattgttagcaccattttagtgtttctgattgtagttgatacagattgtagctggtacggaaaaagtgataaacaaataattatgatgcataataagaaagtagaaatgaataaatgtcactttctttgtatatgtaaatgtatacatttgtaaaaattaaggaagctattgtgtgatattgttaaatactatttagccttaaaaatatggctttttcatagtgatgtgtgattcagcattttgaatatacttaaatgaccttttaggagataatgtgtaataagcaacatatgacattttcctaaaattaaaaaatatcccagaattacatatatttaattttgtgtttgacttcaaatcatgtcccacaattgcatttagaaatagatgttactttttcttataatgaagaacactgtataaaattgaataggaaagccaggaaaagagtgaatccctgctttcttgtcagtttcttaatgggtttaccaaagatagccggactgattcgcagcaatggtatggtgtcacaaaaggcagcttgttcattttctagccttagaggatgtcttgtctttccttaacctgccagcccagtctttcagcaagtcatgtcaattttttacaccagaatataccccatatcaaactctttcctcacctgctctccagcatctctagaccaagacatcatcattttttttttcctacaatactcaaatggtcccttctccacacagctcttttaaaatcttggatcagttcatattcactgttttaactgaaacctagaactggccacttaaaataaaatctaagtgtctccctgtggtttataaagccttacatcaatgatctgtgaatgctagctttaaactcaggcctcttctcatttcttcctcatgctctatttttcagtcacagtcacaatgatgttcacatttttctacccaaatgttattttttcagggaggccttttcctgactactctttcatcaatagtgcccagtgaaccccattgttctctactatttcatgatcacatttgcatttatcacagtatttattatcatgtgaaattattttaattatttggctattggtttattatctgtagttcttgcatattttcttaaaaacaagggccttagctatattggtcaccacttcatccccatggctataattgcccttcatttacagtaggttctcattaactgtttgttaaatgaataaacaagtaaaactacactttcttaggagattgaggtcatccaaataactagatatatgtaaacatttataatataaacagaggataattgagttataattcaggaataattctgaatgcaagcaaatccagagagccaactgggtcaaattcacaaataaagattcagaattgatgagaatcagtacccaagtaagagtagataaggaaggcatgaacaggttgaaaaaggagtggatgcctgagcacattgtggaaaataactccggcatggaatctcaagacattaaaggtgaaaaatataggcggctaaggcagatggaaaagtctggctgtaaatacacactatttctccattaccttgttccacaaatgaatagtgataaaataagaagagaaagagatcagccatatccttgttgaatcctgattctccctccccgtcttttaggcaactgtgagactttaaaatctattaagtaattcctctgcattttaattatttaacagaaaaggggagaataacacctatgtgatgggacatagaaaggttagtataaatgttgaaaactgtgcttagcacagtgtgtggtataatttaagtatgtgatgcattgaagttgttttcattatgttagtgtagatagccaaaaatataaaatattttaataattgtgaagattgattctgtgaaagctgtgtctatttggcttagtaatgtcaattattattaatgcaataaaatctgaaaggtaaaatttgagttatttctataactcctcctctgaaaaagttcagtgattttgaaacacatacttcattattattatataagtgattcaaagcacctgtaagtatttcagaagataaaatatatttttccagataagaaaagaaggaaaagacagaggaaagacagaagagatcaaaaacaccaatggttccatagacattcttgttccttagttccaaaattatggtgacttttaaatttaattgttttactatgttgatatggtggatgccacattttggccttaagattcgtttttgttttgcatgttttttttttgtatacaccatgtttcaaaatttgtaagattattcacttgaggttgattcttccagtgatggcagtatgctctctctaaatgattttacttcagttttttgaaagttttgttcaagtattgccttaaagggggaaagagatggaattaacaaccttactcagtttctaatctctgaatattccttggattgagttttcatagttttttgtgctggaattatttttcttctcaaaatattactttattttcctgcgggaatttttgttcattaaagttaataattcagttaagatgcatgaaattatttaaatagcttaaggatataagatatctgcgattaaaatgtataccagaaatgattttggcaattttaaaattattgctattgtacttacactaaaatctttttagtggctgtgagtttatcatttaaccttcactgttttacctgattgaacatgaaattgtatttctccatttaaaaaaaatggaggtttgtggcatttaaattgaactaatccctccacttctttctcttaattaatgaagaccaaggaaaaacttataacactagggtgtaatgtatataagcaaacctttttaacaaaaagccagttgtattatgactaggtgcttcctaagtacctaaatcttcaaaaaaatttcaatgcttttcaaaacaagttgactataaaatactcactatcagttttacagtcataaaaagaaatacatgaaaaatggctttttcccctaagagttatttagtatatcatattattgatgtagacataaaactttgggtaccatacttgaagcctttaatgggatattttatgacagataaagccagtgattgaattatcattctatctatagagaaaaataaattataaaaaacattcttcaatatatattattttccccatttatttcattttatagctaccagactgtttatcgatatagtaattcagtttgcttctattttggataatgatatctaaattccatcactgtttgaatatctaaaataagctactcaattgaaagaatcaatcttgaaaaagactgcacttctgggaaatattgatttctagctatggaatatatttaatgaccatttttgtaatacctttattataattcaatatatgacaaatactaaaattaaagtgtatctgtgtactgaatacaaaatacaaaatataagtgaatatgacaaaaaataatgactttaaaattggtgggctttaattagggggagaaagagagtttactataatgcaacaaaactgtgttctggatcaattttaaaagacaaaacactaaggaacatagagaccaaaatattcattaaaaatgtattaaatgttataacaaaatatttatagaaattttaaatgtgcccttatccgcatctcctgaattatatagcgttatccaaccagtcatagtagccaggaaacctgtgagttcctccgctagtactcttgtctctctcagctctaaggcagtgaggagcagaacaaagcctgtgatctcctgacaagcacatccacaaaaggaggaagagtaagaggtggagttttcatgggcagcctctttcctacactatgcctttctgttaactcactgcagctctgtgggccatcagacacatgttaacagtgaggattgtttacaaaaaacaatttctcatgtagaggaatgcagggaaaaagttttcttttctgaatataaatatatatatatatatatatatatatatataaaaccaaaatttatttcaggatcaaatagacaatataataagatttgttaatttagaaaaactttgaagaatagtttttattctaggcatcataaaagcaagttcagtttgaccactgttattgaatgtacaatttaaaaagctataattaaattattagcagaaatagttacaatatacttttttcatttgcaagtccttttaattttttttctgaaagtatttcttaagataatatacattttgattactctatggctaaacttaagcattttttagatatttaattttgtttcaatacaaaaaaaattctcttcattgttggaataaaaaattcatgatcaatgtgcaaaaatagtattaacttcatacaatagtgatttaaaacaatgtatgctacctcaattctcatgtagtatatatatatgtgtgtgtgtgtgtatgtgtgtgtgtgtatgtaaaactatgcctccaatgtagttcacttatctaaaaagttttacaaaatattgtgtgtgtgtgtgtgtgtgtgtcttttaaagaaagtgtaagtcagaagttagtaagatacaatatggataaaatatcaattataattttttgggttatttgcattcccataagaataagaactctgaatatgctcatttaatttcagaaatagtcaattctcacttttcactatgtgaattatgttctgtataaagtattcagacagtttttaattatttgtcatatgccaccttctttcaaagttggttaactgctgtggttctcattttcacttggtctgttaggaagaacaaatttatttcattttagtttataacataataaagttaatccaccaaatacacacacataaataatttatttcttaaagaaatatgaataattacttgagatgcatagaattactttctctcagaatatatattgttttaaaagaaagaaaaataaatatttttgaagattcctatcctaggaaataatcaaaataaatgtcattgaagggagaaaaggactgctgtactgatatttattaaaattaatcttaagatcactgatatttcttaagattatatcagtttctctgtctcattctctttctgtctctctctctctatatatatatatatcatgtttcactggtaaataaaataaaatatctgaagttaaagcaatattgttaatctttttttaattgtttacaaggcagttatctactaaagcaattttaaaaatcacttatgtaaataataagaataaacaagagcaaaatgtaattaaaatttctgtgtcagttgatcttagtaaaggtgttcgtggcaaccaaggtaaaagataaatgttaagttctagaacattggacattttattatattttttctggttcttttatatagcacattgataaggtagataaattacttgtctacttttttgacaaatatatactgagttacttatgacggtgcaaaacacccaagatcttccttaaatgaacattcaggtcaatgataaagacagacatttaacttggtaataaatgttattatggtttagaacctcattacttgtgtgtggtccatgaacgaaaagcatcagcatcagtttggtgcttgttagaaatgcagaatctcaaattccaccacagattaatgaatcagaatctacattttaacaggatctccaggtgatttatatgcacattaagttaagacaacactgtttaaagtatctgtataaatttaaggtataatcaactgttctgagaaataatcttaaaaaaatcatagcaagagtttgtaactatacataccaaaaatgttttagaaaatcttgttatatcattgcaaatagctccaaaattagaagtaacttaattgtatttcactcagggtagattcattgccacctaacctcagagcgatttatttccagttcctttattttcatgttattgtactactatcgagagtatcatggtaccttcaaatttgcttagaaaatttgtagtctattcttgagggtaactcttaataatcataaggtcagttgctctcctttgggatactttgcaaaacatattatgtttctttgtcaaagtaatataaggttagctctttcctccccataatatcttgcagatgccaattggtgttaagccaacatgtctatttcttaactatcctaatatgtttggttctgcttcttggcaaaagcctatttctctaagattgttttttttcttcttatgtatatctatttctaaaacacttttttcccccacaataccatactagtagattagtagatagatctcaccaggctgtgtacctttaacatgtggagcttaagaaggatgattatcagccctgagagcaacatgtaactgcaaactcaatataatttcaaaagggcagcaataacaaaaaatattgtaaggctttagcacaagtaataatatggcttatcattgccaaaaaatggaccatctttttgaggcaaaaggctacatcaaaagtaaaacctacaaacaattacatttaaacaatgttttcaatgtatatttctgtgagaaggattttcactcaaatagcattttttaataactacaaatcactccaaggcaaaacagtcattcagagtaagatattcaaatgtaaggaagttgaatgaccgggaagacatctgccataaatgcacataattttttttctgggcggaatgtaaacattataggacaatggactaactcaagggcagtggcaatcgcgaaataaaataaaatacatccaactcataagagtcagcctcatggtagtaaaaaaaaaagacacaaattttagttgatcataacaataattgttgcttctgaccaatattatatgttggtttctgtgggtaccctgtgattctgatctatgtgtcttgggaatgaagaaggactcttttgcaacatgccatcctcctggtaggggtaaaaagcaagagaacaggtgtaattttgtgatgactgtccaaacttgcattatatcaacatctggctcacttgcatttcactgatcacagcattctccttccttctaatatcagaataaatataatgcatcatgaactgctcatagttgttctctacaatggatcatgaaactatgtatgcatgtttgcatttatgatggtgttgtaagtagttgcaaagaacaaaataatctaccacattatcattgttgatttacctgtaggattcttcgtatcattgttttatctattatttttagtctgtttctaccctcaataactatatatatgagaatgccaattgagaaaatccaagtgagaagtaaacagtatgaaggttctttaatttctatttctcattgactcaacatagatgatttaaagatcagaatggaaaaatacataattttaagggccatatcttataaaaaatgtcaaattctatgagccagccatggtataacattaaaatggtgattttttgtttgtttgttttattgtcccctgtttcccattttctatgaaagcatccttcaatatgtgcttttaatgaccataaaccaccacaaaattttagttgcacaagacacagctgcatgatttctatgtggaataatcacatctttttatatccacagtcattaatccttttgctgcctaacagactcagaatgttgaatcattttcaaaatcacatttagtttctacaaaatgtgtggatgtcctttggaacccatgtcatgcttatgagctacagctggtttaaaaaaatgaacaaaaatgacttttgaacgcaatcatttagttgattgaataacactatttcagttttcgaatctgaacattgtgtgtcatttacataggttctgatgaattgttataatttaatacttgtggaaaagttacagtaaaaattgagaatacattttctcaggtcgtaaaattctcaaacaactgtgaagaagataattacaaaagtatgatagttatgcacaattgaaaaaaaaaaacagatctcttacaggaaagaaaggcctattctccatgtaaattgagtgcccttctcaaaatttcttaaatattcaacaatccatgatttataaaagttgaaggttagcacaaggcaacaagtttacatcaaatagtcatgtgctctgttgtaagtaagggttttaaacaggatattcattaaaagaactattatggtgatttaaactgcagatttaagttgccttacatgcatatctacaaggaaagcttttgtatacatggattaaaattatactgtagagaagaaccatgagcaatttattaatggattatctttatcaggctattagaaatgataacccactactattattagtaatcctatatattttgattataaaaaccattagaaacaattatgactatgtcctgattcctgtggtaaaattaaaaaactatgaaatcctagcttatgaaaatttaaacttcctcatcaactgttaggtcttaataaaaaggaaaagagagaaagataacatttattgcactcatataatccaccaggtactgtagagggattatattatttaatcttcccagataattgaaagaagaatattttctttgttttagagatgggaatgctaagtacatatgcaactttaccaaagccccacagtcaacaagtagagagatgatgtgctattactaggatttgcccttacatacctgactctaaacctcatgtttcatttgccttcattatgtcatattgcctttagaattatttaattgaagccaagccaattaaaacacaagcaatatagaattagtaataaaagtgtattatggtatacaccaatatattatcatctgatttttcttgtctgaaatacatattcttcacgacagaagtaagaagtcatattaatctgtaacttacaagcaaatgtggacactgaaaaagacttttaaatctcctgtagataggaaatgaaatccctcttatttgtgatgatgatgttagaccatcattttactatgttcatctttaattgcctcaacatgtattaggtttgtattatcatccatgtccttacaataaggactatgctaaaatggtgatccctacttcttgttatgtgtcactttccagttgtatcataggacaacctaacatgtgcgaagtattcctaaatcaaattggttttaattcactgtttaataatgagcatgtgctccagctattttggggggtgaagtatggctcaattggaatcctattaagaagaaattaatgatgcaccatacttacctgaaaagcaaagacatatgtagaaatgcggtatttatctgaaaagcatttatctgaaaatcaacatagatagcaatatgatatttaaagaactgtggtgggagatctttactctctgtatatcattgcagactataggacagggttaaagaatttgtaaaagtagaaaggccaacttctcatcacaaataagataaactagctaaatttactagaaacttctaggtatggaatgagttgatttatgcagctctgaataatagtggtgaataaaagagaataataatatattaacaactttcgaattattactagattccagtgatattacaaaccctttacagctatctatttcagcttacaactgctctttgagaaaataattactatgctaatgttccataaaaggaaactgagtcctaagatgtgttgttcaagatcattcagttactaaattgaaaccagcattagaacccaaatctgtttgacagtaaaacttggtacacttacatctaaactaaaactgattatacatttctgtcttccaggacctcataaaccagtgaaagaatgccttctattggtctaattatctcttctgttcaacaacatatagattttcaattaatgttgcaacaccttcagtaataggaaaattcactaccatacaaagggagacttactgaaaatgactcttttcacatatttaaaatggctttcttgcatctccaggaggcaaaactaatgtccaattggttaattggatcaaatgttttgaatttaatatattactcaattgaagaaaatatttgatataattattatgtttttaaaaacgtggaagtctccttccaaatacaagaatgtgtataaaacattgaatgcatgagggttgatcttggatgcttcttcaacattttaatgcattttccaagtgtaatcatctgggaatagccgaatcctttagagctttattttagctatagtattggttatgaacttaccaattacttcaggatatttttattataaaacaatatattttaaacctgggccagatgtagaacaggagttatgaatactcgtcccattatgattttgtcttcaatgacttttcaaagatacccaaaatagagatatttgtacaatgaatacccatatactcatatgtaacaacatactgcataaaaccgtactactatgagtatgctgctcatgcaccaggtataaagtttattgattctttgtacctttattcgtcttcagaatatattccaaaaattgatttacattcaaaataatgtgttcttaagtcacttatttttacaaacatgatatacaattagtatcactggattctgtttttattttttagggatggcttttaaaatttgatataattttatttttataaataaataataaataattttaaaaatgtttctagtgcctaaacaacatgataaaatatgttcagaggaaactttcttccaaaagtgtttctttaaatatcatatttctatctatgttgattttcctgttcctgtaggtaaatattcataaatacttttggttaatccttccagtgtttgatgcttttttccaaataaaaagaaacaaatacatatatctttatacttgtatctacccttttcttataaaaaacttttcagaaacaatttttatccactttatgagatctccgtagaaataatctttgctgccttcttctggctgcacagtgttctaccgtatggttgtaacctagtttattcctaccgatgggcatttatgttgttgccaaatgtcaataataaagccacagtgagacatgttttgcatgttttagtcagtcatcctttgaaatacattctaaaaagtaggattgtggagtagattattgatatatattgccaatgttccctgtatgtaagttgtatcattttgcaatcccaccaacaatacatcagaaggcctgtttatttctacttttccaatagatttgcccaagttgtcaaagtatggattttagcaaattctgtcattgcaaagtaatatagcaattacttttaatttgtatttctcatgctatgacttagattgaatatattttcaaatctatgtgggctagttttatctgtttttgtctgaacactcttttcctatttattcctgtttttctgtctgattcttgttttccttttccttgatttctaggagttcttggaatgttagaggaattaaccatttgtccgttatataagttgtaaatattccgtatcaatgcaatttgttttatttgtgattttgtgctgaaaaaatctggttttacttgttctaattcatgaatgttttatgtccttactgttggatttttagttatgaattatttccttcctttgtattttcatgaactttcctctagtactcaaatggtttcatttcattaaataatcatgtctctaatctgtttggagtttatcctttgatagaatcatctcccttgttttccaaattgctatttaggtgtcacttagtaaaaagtctatcttttcccaaggaattactatcccactcttattacatgcgaagtttccacatgtacttgttattttatggatatttttcctgttctactttgtctgcctattcatgtgtcagcctgcactgtttaattatacagattttacaatttgcattcagatatggtaagatgttctcattcttgcctattctttttaagtctttcttacttttttcacttacaattcattgctgacatgactaattttcctacttccaggaaacaaaatattaatataaactgatatattttgatgttgaatatttatgctcaagaaaaaatcgatcatgtcatttaataaggtctattatggcaactttcagaagtgatttacaaatcttttcatgtatgtttcacattttttgtgctgtttaaatggtgtgatctaatccattattatttatgcttagataatattcgtgtgtttcagtctattgagatagtaatatttttattatttgcttgtaccttactaagttttgttactgtatatgtgcagtagtttgtctattaaattttgaattttcacctgcataatcatattatctgcgaaataaacatagtttaagtgttttttctgacactgtgattctaatctgcattctcttctaggtttacattttaatatatttattagcatgttgaataatagaagcaactgtgggtatgtttgtctggttctgattttaatagagatgcctcctgtgtttccccattaagaaagttgctggcttttatgcttaggatcctatatttcacttctttaaagaagtatttacaaggtggagtggctcatggcagcaatcccagcactttgggaggctgaggtgggaggatcacttgaggccagaagtttgagatcagcctgggcaacacagtgagactccatctctatgggaaaaaacattgttattcattgattcctaatttattaattcttagttaatcataaatagttataattattcataaatgtattttaagtaatagaggatagcagcgtttttgtttctggatgtgttaatatgctgaattatattaatgatttcctactattgagccagttttgcagtattggaattatcctattggtcatgagataagcatttttaatagttactgttggatattgttcattattgttttagtcataattttgcttcaatatttattaattgtaaaatatattgtatatgatgatttttagatatctgtgctaatcttacactcagtttataaaaatagatttagaagttttacattttcagtattatcaatttttttatatttaaacttcaggcaaaaatccactgtgaactatttgggtatgttaattttttggggggttgtggggaaggtgttctgtaacacctaatcttatttgcaatatggtttagaaaataattcttccctgtttttaagtaaatgctctattctctgttttattatatatttattctgtcaattcgttatgtaattttctttttccatgaagaaaaaaagtaggttaactaatcggtgttttttctcctgaaagaagctacttttggttgtgtttatcgtttccactcttttaaaaaacaacgaacacctgcttttacctttgtatttatttttattggatataagcttttttatcatttttttgattttagaatcatgtagttaactcatgtatgttatagatatttctctcagcagtgctttagctgtgttccttaaattctgatgtataacattttcctttaaaatttgtaattttgccttaagttagcctatcattcaaatattatacaatagggaattttcacatgtaatagtaatatctttttaaattttctgttaacttttaggttttttattgccatcagtgagtcatactatattcttacaaatttatggaatttactaaaggtttctttgtaacaaaatacatggtcaccgtttgtaaatgttctgtgtattattgaaagtaagttttatttgcactattcttaacataaggtttacaatttattgataagatctaccttattttgaggttgtatatatttctatcattacttttatcccctttgtacctagaaagaaatatgtgttgaagtctcataatatcagtgtatgtctattgctcctgtatcttgtgctttatgaaaagtgttgctgttaaagcaacgttgcaagtttctgttactagcactacattgctattttttctcatttaataatttttcacctaaattctctaatatcaagattcttagctttatttttaatctacatttaccaagatgtctctgtcattttatttttaattttccttatttagacatgtctcttgcataattcacagaactacactgtgagtacttacttagaccaccataccactggtgttctttctacatctatctacagggtatttgtatgttttggcactctcacgacttatcacgtggatgagtttttctgattcattggtcattctgagatgcacttcctgaaatttcctcacctgttgatctttttcttggagagaatgattgtaggggattttttgtttgtttattttatagcatttatgtatgtattctttttctcttttagctgcctctactccaaagctgtttttcatttacactacctaatattgttgatgatttgacccacctatttattcttgagatatatgttttttcttaaactattctccttcctctaactgatttctaatatgcatgttggggtccaaataccaacaagaaatgtgagttttagaaataatatttgttgaaatctatttctgagagaagctgaactgatctctggtagacatgtaagagctcttacttaagattggattgtcacctgggctatgtcattttaaaattgatattattgtaagaaagagaggaaatgcaaactattctattagacaaacttatttgccttttcataaaagtgacttattagtttataaatgggcacaatactacccaaacaaaagggttgctgaaagaatgaaaacagcaagtttgacaattatgtgctagatgagtatccgataatatgtttgtcggaggatcacaagttcttaatgtctaacttcaatgacatggatttttgtcttttggacattgaaaagttcagcttaattgtaatacactttacgttttacgtttgagaaccaattgctactacctaaatcctacatagatttcagtgtttttcacacagtgtattaacacacaatgtttcaatatatcctatgcagggaaattctgaatttattacatatatatacatacctgtatatgcatacacatgctttatctgaattttaaaggtgcagatgaaaactagtgctttgtcatatttccatttggatattctattctatggtaaaaatttctgagtaaatgcaatttctttctttttatttatttatttatttatttttgagacggagtctcgctctgtcgcccaggctggagtgcagtggcgggaacctccgctcactgcaagctccgcctcccgggttcacgccattcttctgccacagcctccggagtagctggaactactggcgcccgccaccacgcccggctaatttatatatatatatatatatatatttagtagagacggggtttcaccgtgttagccaggatagtctcgatctcctgccctcatgatccgcccacctcggccttccatagtgctgggattacaggcgtgagccaccgtgcccggccctgagtaaaatacagtttcattttatgcccctcacttgtttgttttccataaattaattttattttggaccatatgagtgttatgctaaactttgttagaaagtcaataaaatctggagaaactgttctgcaaaagctaaatatctgacattcagtaactacgtgtttaaagtgaccaatatcccaggcactttttgaggtacttgagaaatatctgtgaccaaaaataaaaccccttgcccttttggcatatatcactcctttgttttactatattcataagctagacctttccacctgcagataagttaaaaaaaaagattttaagtggaaaattgaataatttgaaatattattaatgcaggagaggagtcactcacaatttttgtggacaagcggaagttgagcaaacgagctgaaggaagtgattccaccaccaatagctcttcggtcactctggagacgctacatcagctagccgcttcttatttcattgacagggacagcacccttcggagacttcaccacattcaaattgcatccactgccataaaggtaagaatgagtttacgctaaaattatcaccttccattgtttgtttcctctatatccaaaaggcatttttatgtatttgcttattccatgaatttaaacaattattttataaaaatatatttacaattttcttgctttcagttatgtaatatatttaagatgaaattgtatgtatttcaatataatatttacttgataagtaggtcaagatttttcatggttaaatgtaattaaagtatatttgaattgtatgaatttatcttggggtacacagactccctcacaaaataaacatgaatacaaatttgttttaataacatcaatttcttttataattctccttaatttattttacccacttaaaaatactattctgagaagagaggctttatcaggcttaaagtcgtccatggcacaaaatatttttaagaagtcctgcttcatagaaaatgacccctcaatgtttttaagatatgttaagatgtacaggtgcatggttatatgggtttctaggaggcaaaatataacataatctagaattggtggattaatattatgtgttcactaaagtcatttgactttgaatacactaaggttgactttatcaaaactgagaaaagaggagaataatttagttctgattttcaaaagaaaaaaaagaaaatgagagaaagagattgagagacagagaggagaaattgttgtctcctaaacaataagttttagacatattctctggcaaattaggtcaatgtaatttcatttgtcaaatggccattgtaaaattaacagtcagaagagtatgatcctagcctaagttaaccataacaaaataatatagagagagcattttggagtgtttcaaatctaacctttcatagtcaatacaaaaaggaatgattaaatgtaacgttgtattactttatgaaactaaaattaatgtgtgttcattgttgtgtcagttgaaaagttacttaggcctggcacggtggctcaggcctgttatcccagcactttgggaggccgaggcggggggatcacttgaggtcgggagatcgagaccatgctggctaacacagtgaaaccctctctactaaaaatacaaaaaattagctgggtgtggtgccgggaacctgtagtcccagctactgggaggctgaggcaggagaatggcatgaacctgggaggcagaacttgcagtgagcggagatcacaccactgcactccagtctgggcgacagagcgagactctgtttcaaaaaaaaaaaaaaaaaaaagttactacttcaactttcaacttaaatccataaatgggttagaatgctcggaagattgctccaagtatatctttttgttcgggatgtactggagaaaattaaaggtgatgtggaaatacctttagcttaagggttacttaaacaatatgacaaaatcctaatgttgctagtagatgatgttgggaaacagacttcagtagatacaaatcatgcaatatagttagttggcttctgactctaggactaatgttatattgagtaacaagtatataaataatatttatgccgtacagataaaaatgtagccagcatgaatgcagatgtttcagttaatttaaaaattttgtaagatgttgttagagaaacttagcttgtggttgctgaggaaaactaaacttttccagaaatcaatttcaaggatttaaacagaaactttggtcaaactgtattttctaatagaagaaatcattgttgtaaatgattttattatatagctattgatttttgttgttgctgttcagcaccaagtgtgtctgtgaaattatacaacagtttttgtactctaagtaagaaatatacaggcacatttcacatcaaaacataatgggtatttgcatatacttctcttctcccacaggagaagtatgtggcacaaaaaaagaaatatatatatatacacacacacacacatatgtatatatatatgttttaatgaggcatactgttatatacaggcattgtatttagactctgttaatacaaatgggaataatgatgattcattaagtctataatctagctgtgtggtcaaaacgagtcccaaagaagtgacacttataggaagtgtgtcatctaagcagttctgagagggaagaaagagtaatctggaatttgggagtcaacagtctcaccttgacagggccacggggaatgcccattgtccgttaaccatggaaaggagttccagtgctcataataaaaatgatttaaagtgtgtgtagagtagctggagatgggtggaaagggggcttcatactaggtggaggaaacagcaaacagtgggaatgatacagggtctatatcattgtgaacagaagtacccatcttgtgctgtaactaaggaaaaaaggaaataagataagcaccagctggtaacaacatagccaagaatacaggcatggaaattcatagggagtgcaagcgtgaggtggtgaggtagcggggaataggaaagagtggagagcaattacacctttcagggtttaatttagacctcaggggaatttccttctcaggcagctgtaattttaagtagctgatgattttccaggccaaggttagctgcactcagggttattatgaaggttccagggaagggcattgtgcttgtgtgctgtgttcaagcaagagtggagccagaaacccatgatcatgtgcactgcaggaagtcgacagctctgagttacatgaacactgatgtgtctgtgcaattttgtatggagagtatcttttatttttattacttatcaaatgtgtccctgcacaggtaaaaggtgtcccccttcatttataagtatgactaagattgcaagtgcttagaagtaaatatgaggaactgagtagatgtgtgaggggacttcagtaggctggatccaagggtattcaactactgaaatattttctagttgaataaacaattcgatgtaaagtgctcttgtagtctctgaaaccaagatcttaattcctttactaaatacctaaaggttcaatgcattgcttgtatgctttaaattgtcaaactaaggataacaagattcacaatttctttgatttggtaatgtaagttgtgttttaagtgacatatagtaggtatttaatttctagagcaaatattgaatgaagttgttctgtgatttacagaatttaggagacagataattggtaaaaaataaagtaaacagaactgttatcaggtaacagcaaaaatataattagatctacaaaatcatgccagcttttatcacgctaattcttacaaatcacaggagttaagcaatttaactatgagccagtttctagaaagtggaataaagcaatatgtttgttttgtcttttataattatgaatataaatgtagactatactttgttaatctgtaaataaaaaacactgacacaaacatccatagcttaattaattgctatactcttgcaattaatagtgtttatatcaaattttatttcacaatattatttgtagtccaataaaatgtgaagtgtaatgtctagagttggtcattattttctaccgagactcaattcaattgacttaagttattcaaaaaattatactaacatatttttatttttaaatagtctaataaacgttaatgctatataattgacggtgatgagaaaaacacaatacattgtatattttgaaaagatatttaatctatcacctgacatattatgtcacacatattttcaaagagaattttcttgttattttaatttttagaaataatgcactgagtaaaattaagtttttataataggactctactaaaaagttttaaaagtaattattttcaaaaataattactgatatgttactgtgtttcttgtattcttgaaatgtagaaaagaaaagacaatcagatagctttcagaattatagtgtttggaaagttttgagcagcaaacctaggaataagtagaaacagtatattacaattaacttgaaggtcagtatttcagcttaaaaaaatccatcttgaaatgagtttttactgctgcatagttaacttaagagtgttgcaggtgatgttgaaaaggcactagagctaactctaaatttacatttctgaaattataaaatacattacattaaaattttaaagctatttatgaaattaaacatgacaatacttttccaagaagcagttttgataagtaaattatttgttatttgggggcaaaatcagtaaaatgataatatatttatttttaattttacctctctctctctatatatatatatgtttttaaaacttactttaagaatacccaagaaaatatgcatatggaccattcataattgttgcacattttatattttacatttataggaaagattcatatttggtactctttttgattgtatatatttagggtgtacaacatagtgttttaatgtatttaaacatagtgaaatggttactacagccaagcaaattaccataccaatcatcttttcatcttacatactttttttctttgtggtgagagcagctagaatctattctctttgcaaatttccactaggtgatacaatatttttaactataatcttcatgtcatacattggatctctacatttattcatcttatataactgcaactttgtgctcattgacctaatatcttgtcatgacctcatgacctccctctaccacctctcccatcctagtaaccactctgtttttgctttccttttctttttcttttttttttttgtggttcttaagttgcttcttttttttttttccaatttcttttgagatggagtctcactctgttgcccaggctggagtgcagtggctcaatgttggctaactgcaacctctgactcccaggctcaagcagttctcctatctcagcctcccaagtagctgggactaagatgcctgccaccacgcctggctaatttttgtattttaagtagagaccgggtttcacatattggtcaagctggtcttgaactcctgacctcaggtgtttcacccgcctcagcctcctaaagtgctgggattgcaggtgtgagccaccatgcctggccttctttgagactttctattagataatgttatctgcaaacagagacaattgtacttcttgtccagtctgtattgcactttattttatttatttatttatttatttatttatttatttatttatttatttattttttgcctaattctcctggtggtgagaatggaaattctttctttgtcctgctcttaggaagaaagtgttccttctctcattattatctaggatgttatctgtgggtttttcatacatgctctttaatacatggaggaagttctttttaattcatagcttggtgagtgttttttacatgaaaatgtgttgattttgtcaaatgcattttatgtctattaagcatgtaatttttattttttaattctatttacatgatttattacattagttgattttaggatgttgcataaactttgcattctttgggctaaatctcatctggtcaatgtgtatatttcttttatatgtggctagatctagtttgccagtagtttgctgaggattggtatgcctatattcaaagtggatattggactatattttcctgagatacatctgtctggttttggtaggcggtaatactggcctcataaaaggaatcgggaaatattccttccacttctattttgtgaaagagtttatgaagaattggtattaattcttccttgagtttttggttgaatttagtggtgaaaccatctagatgtgaacttttctttgtaggtagattttggttattagttcaatctcttcactaggtttattcatactgtgtatttcttcttgagttcagtttcaagaacttaaggggcttaagagatcctccaactttggccaccccaagtgctaagattacaggcttgaaccactatgcctagcccttgttcagctttatcttgtggctacatggctcctccaaacatttatcactgtcctcaccaactctatccaggcttggcccttctaaacctgagcaatgaccttcatattctatgtgataaaagaaatcaaggtcatcacttaagaaagtctctgtcttcctagaaatgtttccatttcattgaaattatacaatttgttggcatgcaattgttcatagtatttctttaatattctttgtgtttctgtaaggccagtagtaatatccctaatttattcctgatttttagttatttctagtttccttacttttagttacatgagttttctctttttatcttgatcaatcaaggtaaacttttttttcaacttcgttgatcttttccaagaatgagcttttagttttattgaattttctgtattttgttgtttttttttatttttccaatgagttaatatttgaaaagctcttaaaacaataactagtgcagtatttgggtgggagtgtcccgtttttccaggtatggtcttagcaaatgacacaccagattatatcccgtgcctggctcagtgaggtcccatgcccacggagccttgctcactgctagggcagcagactgagattgacctgcaaggcagtagcctggcagggggaggggcgtccgtcattgctgaggcttgagtagttgaacaaagcagctggggaagcttgaactgggcagagccccccacagttcagcatggcctactgcctctgtagactccacctctgggggcagggcatagctgaacaaaaggcagcagaaacttctgcagacttaaacgtctctgtctgacagctctgaaaatagcagtggttcccccagcatggtgtttgagctcagagaatggacagattgcctcctcaagtgggtccctgaccccccatgtagcctaactgagagacacctcccagtagaggccaactgacacctcatacaggtgggtgcccctctgggacgaagcttccagaggaaggaacaggcagcaatatttgctgctctgcagcctccactggtgatacccaggcaaacagggtctggagtggacctccgagcaaaccccaacagacctgcagctgagggatctgactgttagaaggaaaactaacaaacagaaaggaatatcatcaatatcaccaaaaaggaaatccacaccaaaaccccatctgtaggttaccaacatcaaagaccaaaggtagataaaactagaaagatggggagaaaccagagcagaaaagctgtaaattatgaaaaccagagcacctcttcttctccaaaagatcacagctcctcaccagcaacagaacaaagctagatggagaataactctgaagtaggcttcagaaggtcagtaataacaaacatctcccagctaaaggacgatgttcgaacccatcgcaaggaagctaaaaaatttgaaaaaagattagacaaatgtctaactagaataaacagtgtagagaagaccttaaatgacccgatggagctgaaaaccatggcacgagaactacatgacacatgcacaagcttcactagccaatttgatcaagtggaagaaagggtatcaatgattgaagatcaaattaatgaaataaagcaagaagagaagtttagagaaaaaagagtaaaaagaaacggacaaagcctccaagaaatatgggaatatgtgaaaagactaaatctacgtttgattggtgtacgtgaaactgacaggagaatggaaccaagttggaaaacactcttcaggatatcatccaggagaacttccccaacctagcaagtcaggccaacattcaaattcaggtaatacagagaacaccacaaagatactcctctagaagagcaaccacaagacacataattgtcagattcaccaaggttgaaatgaagggaaaaataataagggcagccagagagaaaggtcgggttacccacaaagggtagcacgtcagactaaaagaagttctacctgcagaaactctacaagccagaaaacagtgggggccagtagtcaacattcttaaagaaaagagttttcaacccaaaatttcatatccagctcaaactaagcttcataatttaaggagaaataaaatcatttacagacaagcaaatggtgagagattttgtcaccaccaggcctgccttacaagagttcctgaaggaagcactaaacatggaatggaacaaccggtaccagccactgcaaaacatgccaaattgtaaagaccatcgatgctaggaagaaactgcatcaactaacgggcaaaataaccagctaacatcataatgaaaagatcaaattcacacataacaatattaaccttaaatataaatgggctaaatgccccaattaaaaacacagagtggcaaattggatacagagtcaagacctatcagtgtgctgtattcaggagacccatctcatgtgcagagacacataggctcaaaataaagggatggaggaagatctaccaagcaaatggaaagcaaaaaaaagcaggggttgcaatcctagtctctgataaaacagacctaatcgacatctagagaactctccaccacaaatcaacagaatatacattcttctcagcaccacatcgcacttattccaaagttgaccacagagttggaagtaaagaactcctcagcaaatggaaaagaacagaaatcacaacaaactgtctctcagaccacagtgcaatcaaattagaactcaggattaagaaactcactcaaaaccacacaactacatggaaactgaacaactggctcctgaatgactactgggtaaatgacaaaatgaaggcagaaataaagatgttatttgaaaccaatgagaacaaaggcacaacataccagaatctctcggacatatttaaagcagtgtgtagagggaaatttatagcactaaatactcacaagagaaagcaggaaagatctaaaatccacaattaaaagaactagagaagcaagagcaagcacattcaaaagctagcagaagacaagaaataactaagatcagagcagaactgaaggagagagagacccaaaaaacccttcaaaaaatcaatcaatccaggagctggtttttttaaaagactgacaaaattgatagatcgctagcaagactaataaagaagaaaagagaagaataaaataaatgcaataaaaaatgacaaaagggatatcaccactaatcccacaggaagacaaactaccatctgagaatactataaacacctctacacaaataaactagaaaatctagaagaaatagacaaattcctggacacctacaccctcccaagactaaaccaggagaagttgaatctctgaatagaccaataacaggctctgaaattgagacaataattaattgcatatcaaccaaaaacagtcgaggaccagatggattcccagccaaattataccaggggtacaaagaagagctggtaccattccttctgaaaccattccaatcaatagaaaaagagggaatcctccctaactcattttatgaggccagcatcatcctgataccaaagcctgacagagacacaacaaaaaaaaaaaaaaagagagaattttagaccaatatccctgatgaacatcaatgtgaaaatcctcaacgaaatactggcaaaccgaatccagcagcacatcaaaaagcttatccactataatcaagtcagcttcaccctgggatgcaaggctggttcgacatatgcaaatcaataaccataatccatcacataaacagaaccaatgaaaaaaaaaaccacatgattatctcaattgatgcagaaaaggcatttgacaaaattcaacaacgcttcatgctaaaaactctcaataaactgggtattgatggaatgtatctcaaaataataagagttatttatggcaaactcagacaatatcatactgaatgggcaaaaactggaagcattccctttgaaaacaggcacaagacagagatgccctctctcactgctcctattcaacttagtgttggaatttctggccagggcaatcaggcaagagaaagaaataaatggtatcaaattaggaaaagaggaagtgaaattgtccctgttgctgaagacatgattgtatatttagaaaaccccatcgtctcagcccaaaatttccttaagctgataagcaacttcagcaaagtctcaggatacaaaatcaatgtgcaaaaatcacaagcattcctatacaccaataagagacaaacagagagccaaatcatgagtgaactcctattcacaattgctaaaaagagaataaaatacctaggaatccaacttacaagggatgtgaaggacctcttcaaggagaactacaaaccactgctcaacgaaataaaagaggacacaaaccaatggaagaacattccatgctcatggataggaagaatcaatatcgtgaaaatggccatactgcccaaggtaatttatagattcagtggcatccccatcaatctacaaatgactttcttcacagagttgaaaaaaaaaaaaactattttaaagttcatatggaattaaaagagagcctgcattgccaagacaatcctaagcaaaaagaacaaagctggaggcatcacactacctgacttcaaactatactacaagtctacagtaaccaaaacagcatggtactggtactaaattagatatatataccaatggaacagaacagaggcctcagaaatagcaccacacatctaaaaccatctgatccttgacaaacctgacaaaaacaagaaatggggaaaggattccatatttaataaatggtgctgggaaaactggctagccatatgtagaaagatgaaactggatcccttccttacaccttatacaaaaattaattcaagatgaatcgaagacttaaatgttagacctaaaaccatagaaaccctagaagaaaacctaggcaataccattcaggacataggcatgggcaaggacttcatgactaaaacaccaaaagcaatggcaacaaaagccaaaatacacaaattaaactaaagaacttcggcaaggccaaagaaactactatcagactaaacagacaacctacagaatgggagaaaatttttgcaatctacccatctgacaaagggctaatatccagaatccacaaagaatttaaacaaatttgcaagaaaaaaagcaaacaaccccatcaaaaactcggccaaggatatgaacagacacttctcaaaagaagacatttatgcagccaacagacacatgaaaaaatgctcatcaccactggtcatcagagaaacacaaatgaaaaccacattgagataccatttcataccagttataatggcaatcattaaaaagtcaggaaacaacagatgctggagaggatgtgtagaaataggaatgcttttacactgttgatgggagtgtaaactagttcaaccattgtgaaagacagtgtggtgattgctcaaggatccagaactagaaataccatttgagccagtgatcccattactgggtatatacccaaagaattttaaatcatgctaatataagacacatccacacgtgtttattgaggccctattcacaatagcaaagacttggaaccaacccaaatgtccatcaatgatagactggattaagaaaatgtggcacatatacaccatggaatactatgcagccataaaaaatgatgagttcatgtcctttgcagggaaatgaatccagctggaaaccatcattctgagcaaactgtcacaaggacagaaaaccaaacaccatatgttctcataggtggtagttgaacaatgagaacacttggacaaagggcagggaacatcacaccctggggtctgtcatggggtgtgggacagggggagggatagcattaagagaaatacctaatgtaaatgacgagttaatggctgcagcaaaccaagatggcacatgtatacctaagtaacaaacctgcatgttgtgcacatgtaccctagaagttaaagtataataataataataataataataaactagcatctgaaagtgctatgcaacataatgttatcgagcacttattttattacagaagtagtttattctctcatctctccaatcagagctcagtataagataggagctcaataaatgctaattgaaattaaatgaacctaactcagcatgagcagaattgatgatgttgtggcaatcggaaactgcagcaatcccagtgttccagattgctaaaattagttaagtggtaacaactttagcatgtatgctgaaacagctttgaaaagtttcacaggaatcctcaataggccttaatctttctatatcctcatatttcttctgcttcagtgtagtggagtaatagctctttcaataagcagaaagaaaactcagtactctcttttggaaataccttatttttaacaacacacagttgctatctatttttataataattctgtatattctacatcatggtctccagtgcatcaagatcacagcacagctaaactaggaaatcccatcagtgtaactaattggtaaagctctttggcagaatctctctcattttgaaatgctcacagaactgagcatggaacacagcagcattgtacatgctgacactcaacaaatatttgttgaatgcattttggtgaatttgtgaaatatcagctgccagtaataaaggttcttagaaggaaaaaaatatctttacaaactatatacaaagtgacttttgattaaatctgtgttatagtgtatctgacaaatctttagtagagagacttgtgttctctcatctattgaatgaataagaactcaatgttttcaaaatcatctttttattaatcatcattgtctgaataaaaagaaaaactggattagtttgcctacatttgataagatctctggtaaataaggaaactatttgttggttttgaaatgtatgagcatggtttatgagccatctctttatgtttttttttttggttgttgttgttaaagagtattgttaaatatcatattaagtgaaatgcaaaaaacatctttgcattctactcctcccatattgttctgaatttgatttatctacctgtcagtagatgttacacagtcattattagatatacatgcttttcctcaatttcttttattgcattcctaggcagagagttaagtgtttgacagaagtatctccttatttctcatttctctacacaatttgtacataccccttggttcagcatggcatgtgatatcagaaataggccaaagagaagagaaatgaagagctctaattctagagctacatggccctaggttggtgtcccaatatcactacgtattgattgtgtcgttttgctcaattaactgtcatctctatgtatcagtttaataatctgtaaaagaaagataataatagcacttacatcataaggttgtcaggaaaatagggagagttaatatttttaaggtgcttagaacagtacctggcacatattaagtgctttataaatgttatttttaaaaattatgctcatagttataagtacaagttcaagcaaatacataggactcaggaataagctctaacacagaaaaataacttggtaagggagtagaaatttcaaaatcctcttaccctttccaaaagaaaccaattgctaaaaagggaaccaaattaagggtgttttactttttaaaattttattattattattgttgttgttattattatttatagagatggggtctcagtgtgttttccagcctggtctcaaactcctggcctcaagagatcctcccatcttcaccacccaaattgttggtattacttgtgtaagccaccatgccaagttaagggtatactccttattaaaaccacgctacaatacaagaatcctgtattaaaacttatgaaaatgtactgaacctgagatacaggctaagttatctggtgaatttatgtatttccacccataatcactggatggtggttggaaaagaggtttgtagaacattctaaggttctgcttcccatatgtcaaggggaacattgcgtatcaggcaaatgcagccttcatactgttccaagctaaattcttacgatactatcttaaaccatactacagagctgctcagtacttggagagtctcttatttcctattacatataatgctgacagataatgatctctataaatgaatgatgcaatacccctgaccccatcctattcaaccatttcatcactgatttgactaatgacataaaggacaggcttatcaagttggtggtaactggaaaggaagtgagtagagacccaaaagtactacagcaagctggagtaaaaatgagtttaaaaatatgacatgccatttacaaatatcaagttaaaaaagacatcatattttcccccttaacattctaaacatttaatatattatttctccgtcttaaatttgaacactttttgctcagggaattaaataaaacttagctaggtttaagaaataattagtgatgtgatatataattccaaatttattttatgtcacttcataatggatattttacccattatgctgcttaagaggagctcaagttttaagtgatcaaaactcactagaggatgtgcttggcatagaatttctatttcagcttctgcttttccctctaggtggattgtaaaaggttgaggttaaattacttttacattttaaagtgcattaacttcataacatttctgccctgaaatgctacactaatttgatatttgtcctatatccattttctatctaatttagacagaaatctgagttgaccttaattgtattttctttccttttaaactacaatcttctattagcaattcttggactcataaatggaaattttgtcatcttaaaaatgattttttccttttaaatttagaggttttggtaagaaatttaataatactgttgactatataatatatatcattagtcttttgtgacatgcatcagtagaaaagtttggggcctgctttaactaggtgcatgaaaaatgtactctcaccttcacgtaactcaaaaatggcttaaacaattcagttcaaattctcaaacgcgttcacatttggtgtaggttaaagtttgaaaaccaaatggaatcctttccattgaaaatgatgatgtaaacctggaaattataaaattatcatatttttgacataatatattactatttttgcttaagttaacacattttacttttcttgatgcttataacagaaatcagttgctattttttacatttgaaaaatctattaatttttttgttttaataagattagtgaaaacatttaattgctcttacctaaattaataatattagaaattaaagcaaaatgtatacatagtaagtgatcctgtaattgctagaaataataaaaatatttagtactccatataagggtaaatgtgtctggaggtctacaatttaccaaatttatttgcatatttggtgaaggtttattcagtgtctgtgctgtgcttagggctgctggggaataggcttacataagtgaacgtgacatgatttttatttgagaactaataggctactgctgttctatttaagctacagctgtgtggcatggttttctctagtagtcttccagtactctcagggttgctaccaatgaagtattctaatattcttgcagttgaactggagtccaaatgagcaaataaagaaaaaaaaatagcaacacatactctgaggcatcccacaaaaagcaatatcttttagaaaaatcactataagcctctaaagaaatatagctgatagggaaaattcttgaaaatttgagaactatagtctcaaataatttgcttttgagaataatatattatttaatggagaattgttacaaataaaaatgaacagaaagtctgtctcataaccataagatgaaagtaaagaaaaatataagaaaatttaggatgtcatatgcaatacaatatataggtgtttgtgagtgtatgagtgtgtgtgtgtgtttgaatgtatataaatatagtcatagagttcaaatctccatataaactcacagactctgaatatatgtactatgttttaaataataacaaatgtgacataatgcaaaaaaattgatatcctagtttagaactatgcaatcagaaaaaaaataaacatacaaaagtcttttcctgaaacatttttgaaaggaggggagaatagaaatacaaaaattctgaaagtaccctgggtaggtggagagtagagataggagaatgaaagaatgaaaaattaagacgatagtatcttaatgggcaggtggcacattatggaatagagttttttggtgaaatataattttcatattatatcagagtaagagttttcaattattagcattggcaaaggggagaaaattattaatgaaaggcagatgtgcaattagattaaattataataaaaaataaatagcaacttgactaaatcaatacaatgaatttaaaaaaaacaaaggaaaataaaagcaaaagtacttttttgccattaaaagtaatggcaaaaaccgcaattacgtttgcacgaatctaatagcaagaggtgacacagatttcccactaaaataactaaaattatggattaaaaataaaagaattcttctgtgtattcataagttgataggaaggatattctgaaaccagaataaaaaagaaaccatgcaaagaggggacactgagatctccatagcatttgctgaatcagatggattgagctacttttgttttattctcatgtggctcaaggtacaaatgacaaagttcaaactttgtcgaagatagagtgtctagggggaacccataaatgtaagaccccaacggtctgtgaccttgaaatatattggaaatgtgtattggaaatgtaagtaggtaatttattttttaaaaatccgtagaatcatgtcgcgccaacatggaatagcttggaggagatcatgttaagcaggttgtcaggcacagaaaggtaaatactacatgctttcactcacatgtgggacgaaaagaaaaaaggaattcctgaaagtagagaggtagagagtagaattgtgggtattagagggtgagaagtatgggaaatataggggagagtggaagatggggatagatttgttaagggatacgaagttacagctagataggatagatgagttctggcattctgcagcactatagggtgaatatgcttaactataatttattgtatattttcaaaaatccaataagtaccaatatctgtgaaatgcaattcttctgtgcagttattcatccatcagcatagacaaaatgcaccatttctgatagctaggaatactggcacattgttaccataatgttgactaatgaaaaaattacactttggagtctgcttcctttttctaaaacaaaaatgcatatttgtaaagataagttccttccacaggtattgcaggtaaattattttaacgtttatatctggggagaatactcctgaggctcaggagcttcatacttctagttacacagctagtaagtgacaaacctgaaaatataaaccagttttaaatctatggtgtgtttttttttggtaaccgaattgcttcatgctctgtgctagaaaatttagcataacaataggattatgtataatacggttatttgtaacttgaaatatataattttaaaaaattttcaagttattcttcatagcttaaactatatttaatatgtcagaacacaaaaaggcaagtggagaaggtgcctgagtaatataaagagacttcataattttcattcttttagatgtgtgagattcctgtaatttttcatttagaaactactcaggaacaaatctacctaggttgcttatctggtttcttcactgataatagatttgtaacaagttttagagagtgatgaaaagggctgctggtagaaggcacaacagttacatcaataagtaaaattaaattaatgtaggaaaaggaggcaagccacataaaacagctaaaataacagctcctacatttcatcaggtttcatttagttcatggcagaaagccaaattctcaacatattatcaaaagtttttccctcaataatattaagtaaattaaatttgaatgaatagtaattttagtttgtagtctgttccatagaaaaatgtaaaacacataaattgaaatatttacccagtgaagaatcatttttctcctgtctgattttttttttctaacttggtgcattttagtgttaagtgagctaacaatcacctggttgtatggttaaagacaacttctagagacccaaaattcatagacctggggttttataaccgaatgaccccagagcaaattgttagtggattggctgcaatctaagaaacccttgatgccaattaaagcttcatgaagtcccagaggtaccatgaaggtacaaagttcctctgggattctggtctctagaggaaatagtcaagaaggtaatgatgtaaggagatgaagatatagtggaaaagttatagaaagaagaggaacacaaaaattgcagttgtatttcacattggattttaaattatttttaaaatgtttttccaacaaatacatactttaaaaatcccattactgggtatatacccaaggataaaacatgctgctataaagacacatgcacacgtatgtttattgcggcactattcacaatagcaaagacttggaaccaacctaaatgtcgaacaatgataaactggattaagaaaatgtggcacatacacaccatgaaatactatgcagccataaaaaatgatgagttcatgtcctttgtagggacatggatgaagctggaaaccatcattctcagcaaactatcgcaaggacaaaaaaaccaaacaccgcatgttctcactcataggtgggaactgagcattgagaacacatggacacaggaaggggaacatcacacactggggcctgttgtggggtggggggaggggggagggatagcattaggagatatacctaatgtaaatgacgagttgatgggtgcagcacaccaacatggcacatgtatacgtatgtaacaaacttgcacgttgtgcacatgtaccctaaaacttaaagtttaataaaaaaagaaaaaaaaatcactaaacttcttgtcctttccatttttgttattttttaagataaataattaacatagctgatgatgtttcagttaaagaaaactgggggagtgggcagcactgcataatatgattataatattgcagagagtttgggccagtttattgtttttttcccctggcacttagaattttaataattatttgtaattcatgcacactatatgtttcttctttctcctatataattaatttgttcttttaatgtcatattactgctgacttttactgataataagttcctaaagaatttggatttgtattaacttttttgtgagcaaagccaatttatttttctgaaaaaaaaaaaagaaaagaaatgacagaacagtttctataatggccagttgaaacaagaaatccacttctgtctttctaattatgcttgagtctgttgagttttagtgtgctgcgctttatcagttctctcgggtgcttgtttaattgggtgacaaatgtaagaatatgacggcctcagtataaaactttagctagtctgtgcacaggtattagttgtcctattatttaggacagaagcttttgatatgcttaaggaattcagaaatatttgataatgctgaaacttcaaacggctataataaaaagttttaagttttaagcaataagatatgtttaaataaatatttcagaagagtaatattaaatatggaatttcagaggagaaattgaaaatttttgatagaagtatttactcgaaataaaatagtgggcactttgagatatgttctaatatactatactggctcctacattgagtaggagaaaattaaaagtaataataatgaaatagttgtattaaatgttaaacaactaaaatgtgtgtatctaacgaggttccctgctttagtaccctagtatagcagagaatcttatggaaagactgttcgtcgggattttgacagtgacagattgctttgtgtgcactgctagctgtgattagctgtcaatgccctggattctgctgccatcgtcttccaggatggtgataggtgcttttacttcattcagcacttgacatttgcacctgaacatttttagttactctgtcaaagaaagcaaaacagataattcaatttctaagtttttgtatcatttggagcatcagcttgcagtttgcttgactgagatgctaggtgagtatcaatcgagcagattgggtagatgtagaaatgttttgataaataaaattatagagtaggaagtaggaattaataaagggagtagttctgtttagtgtgacattttgcttcccagtcttggcaacagatattttttttgcaactttagtgggatttgcacaattataagttagtctatgcaaacagtccccatccattttggcaccaggaactggtttcatggaagaaaattgtttccacgaacttagtggagggaatggtttcaggatgattcaagttcgttacattaaggtgcactttatttctattaatattacattgtaatatgtaatgaaataattatacaattcactgtaatgtggagttagtgggatccctgagcttgttttcctgccactagacagtcccatctgggggtgatgagagacagtgacaattaaaggcaatgagattgaaatgcatagaaaaacaataaagattaaaaagtaaaatcagtctttaatgttttacttcttcagatagctttcatttgtaaaatgaatataatcaacactgctttagattacactttttgaatgtaaagaaacagaaaattaccctggctcctgagttccttgaaatatcatttctctggcccaggaaaagtggcattcaggccagacagtggctgtaagaactgaggtcgctgcctagtaactctcaccagagtgcaagggaaatgccacagccctgaaccaggttgcaaactgtacctattgtttgtaactccctgtggcaataaagctttacttttattattattaatattgaaaacctcagaaaactcattagcccagctagagtaacaacatatccctttagatttcctgtaatgaagttcaagtttaccattcttgtaacaccatcagttatagctgccacaaatgtagtttttataaaaatgtcagttttctaaatgtatattcatgcaattaggaaagtaatgaaagcttttttatggctacatgtattttttatagttgctgtgattttaagctctgtgttatctaaaaaaaaagtcaaaataacatctgtgggagtgagtttacagacttggcatctccaagaccaatcaagtgccacacatttaatttccatggcaaccatggtttaagcacaaaggggtcctgatgttatttggcaactttgtcctaactaaattgtgtccagttttgcttattccatatcacactaaatcaataatttaagaaccttagaaaacttctgttgtctagtcactgtgtagttttatattttaatgtgtactcaaagaattagcatagtctctctcactaggtttacatggggatagttgagggtggtgtgcttgtgtattattttgatagaggataatttataggctatgaagaagtagaccaatcattgtagtcgtgcctggcctcatggtaacaaacacaagtgaaaactgcactgaagcaattactcttcaagaagacatactcaattttgttcctaaatagagtgctttgttttttgtattattctcacgtaaccttcagtttacttcaaataaatatattttgctctacatttttttcctatggttaaattttataattcacagttattctgcatatactttatggatatacatgatattgtttgcaatcatactttcgatccttatgtttcgagtatcactatttctcctgtaaaaggcaaataaaaaaaccaaacactaccttttaaaaatgcagttctataaacttctaatatttttaaaaaattggtttattaaaattatgaggaataaaattagagaatatagttgtcagcttcaagtaatttgcatagatgcataattcaacagtggtataagttcccttgcactgaatgtgtttatccgtgtttgtgctttttatgtgaagatgtgagtcatcctggatgaataatatatcatacactattttaaactgtatctatatgtttggagaaggcccaagaaaatattgacaatgttaaatatattttaagtcactatattaattatgtataacacactaagtataatgcttacttttgtgttgagatgcaagaaaattttgcattgatatattttttatttgaggacatgtagcatttttatgtgaattttcacttttcccacaaaatacactgtaaatactaaaacaattttgaaaattaagaaacattttgctactgaaatgtttattctgagacgaacattttgtttttaatgcatcttataattaataatatgtttgaaaattcattttttactaaaaataagctcagaaatatttcaactgggtaaaaaagtggaactacattgaattgcagtctgatattaagtacttaatagaatgttgaaataagacttaatgactatcagaggaaaaatattaaatggtaaaattacctttaaactcaatattaacatttgaaaaaatattataaggcactatcttcagttgagaaatgaagggaaaatatatattttcttattttttaacatcaaaattttataaagcattttgttagtttaatagatttagcaatatgtaattttaaaagatcttatatgtgtggtaacagaaaagattgtactgttttaggaaataatagaaactaatcaacacttgtattttactcttcacaatcctagtgggaagtaatataagaatatgcaggatgttatatttcaaagcattaataaattcatacttagaataaaagttaattcatttggccttcaatcaaagtcatattaaccagtacattcatagcaatattttttgttcatgaatgacccaatatactacaccattgtaattgacttctacatcaatctagaccaattaaattgtgttttattgtaactttattgccagagagagagagagagagagaattaattacattgattaagccaagcaaagtttccaaaacttgttaactataaagcttggaaagccagtgtgttgtttagaatgggtatttgatttatgagttaggaggtctaagtcccagttctagctctcatttcatacaaatgatcctgaagtagcttgataactacttcatccagatacagcatctcttttatataatgagatggtgaaactagatgatttcaaacttctgatagcttaaaaaatttagatatattgtctcttctacattttcttcaagaggttcccaaaaaattcaataaattttcttttgtaataaatatttctaactaaaattaaaatatttatccaccaatttaatccaaacatttttaatttctaccatgtgcccagtactgtgtataattatgcatagagagtttatagttaattaaaggagataatagaaataaattattgccctgcaattttatgatgggcataataaaacataatggaaactttgaggtaaaataaaataaattaaagatatttttatatttctgagaataccttgagggtggttttttttttttttttttttttttttttgagacagagtttcactcttattgcccaggatggagtgcaatagagcgatcccagctcactgcaatctccgcctcccaggttcaagcaattctcctgcctcagcctccagagtagctgggattacaggcacccaccaccacacccggctaattttttgtatttttagtagagacagagtttcaccttgttgatcaggctggtctcaaactcctgactgcagatgatacacccctcctcggcctcccaaagtgctgggattacatgcttgagcaatcacacccacccccacttgagagttttaataccctaattcttcatatatctatctactcctcagataatttttaactctggggaaacagtgcttttgcttttgtttaaacaactgtttgaaacaaactgttttaaaagaaattttgctttaaaatttttttgcaagtagacctatggggtctttttctgatacccctatattcactaggatttgtgttttgaatataaactatataaatttaacaaacttttatctcattaaatataatgatttatttgaaaatactctaaaaagcatttctataggcaaaggaaacctgcatagtaattataataataagaattgcatatttaaaataacttgcttatttattcatcctttttattgctatttagatgtgaacttacaagaaaaaactatttttttcattctaggtaaatatatggtttggaatagtgcatacttaaaaatgaaatatggatattaacctgttagttcctagtcaagttagttcctagtctattatctatctaataaatagaagataatttatcatctatatatcttcaattatagaacagtagtaattgtagccttgaaataaaaaaaaaatgacgtattctaagatgatttaaaatagattgtattggattttaaaataaactcatattagtaattgaaaaaagtagtttgtttttcataatctttcagtgtcagatttcagcattttctttttgcgaaactatattagaatatttatgcatttgaaaggatatatgtatgaaaatccaaatttgcattttattacatatgcatggatgattgataaaaacaggtaagtagatagatgtctagatatccatacatatgtaaatatagatatagatgatgtggtaccttccttgatataattcacaaggaaaattaatattaaccaattattgttagcaaatattagtaacatataacatttatacagcgaagtacataaagtgttcaaatttgaaaacatttcagcaaccatgtcctagattaaaaaataggatatttctagaacataagtatttatcctaatgccctcttacctcatttctatatcgaaagggtaaccaccatcctgtattctaacactagaagtttattttacctaattttgagctttatattaatggaagttcaagattaggcaaaataaacttctagtgttagaatattgaaacatttatatattgttccttcaacattgtatttgtgagatttgttcatgttcagtattctgtggacagaatacataaaaatttattcttactgtagtacagtattcatatcttctatgtacttccacattgtattactgattgccacttgatatggtttggctctgtgtcttcacccaaatctcatctcaaaatgtaatccccacatgatgagggagggatctggtaggaggtgattggatcatgggtgtggtttcccccaaactgttctcgtgatagtaagttctcaggagagttgatggttttaaaatgtggcacttcctcgctctctttcacctgccaccatgtaagacatgtcttgcttcccttcaccttctgccttcggccatgattttaaatgtctgaggtctccccagccatgtggaactgcaagtcgattaaacctatttcctttataaattacctagtctctggtagcatctttataccagtatgaaaatggactaacacactaatgtaatatccttctgtttggggttactaagaatagttgataccaacctcattgcaagtgccttttgtacacacatgttcacatttttgttggctgtgtatctagctcatataatgtgcctgtgtctacttatgtagatactttcaaagaattttctaaagtgattgtacgagttaaactcccagcagcagcatatgagaattccagtttctccactgtattgtcaccacttggcatcgtctggctttgtatgcttataagactttctggtgaatggatagtagtttctcactatgttttaatttccagctctttgataataaagttgaaaactatttcaaaattactggatgtttatatatcttttttgtcaagtgagttttcagtgttgctcttgccatattattgttagtttgtagaatttatttatatattctagatatgagccatttgctgtatatatgaattgcaactatgttaatcaatatttttaaaaaacagagtatgtagtgaataaatttttaatactaattatgtaagattaaatctttatttctattttaataataagtatcaattcttatattaaatgttaagatatcagaaattgaatacgagccaaatatagttattgttctctagtatagtttctaccttctcaacccaaagttttttgaatgattaaaaaatagaaacacttatttctggaaaaggagacaattgaagtggacagtataatagagtatatctaaggtaaacaggggcaaaatgtataaaattaaataactggtatagcagtttgtcaagatgcaggtatcagtaacaaatttcactactcccccacctcaactcctgatatttcagatgtggttttcttgttacaatataggatgggcaaaatcccctcttaaatattaacattcattttgtagttgtccagatgagatgtaggtctctagaagagaaaattgatttcagatggaaagtcttagattatgcctgtttgggcataactctattgtaaaagagctaattgtacttatcagtattccagtgttttatgttcataattgatggctgataaaattactcagaagttactttgatataacctaatgtaactaggaaacaaataaaataattaatgagaaatacagtgtgaaaaggtaaaggccatgatatttgtgtgctgcgaataaagaatagtcttgaagtgcaattactcctagtctcaaccattttcatgtctggcaaaaggataggggaaacatataaaagtagaaaaaatggcaattgctcctctggcaaagtattttatttcattgcttaaatttccatcatgggaatttgttacttttattattaaaaatgataggttggaacaaacaagtaaactgctattctgtgttttggcacagttagcatctctgtagtaaatttatttttattttctttacatttttatttattttattattattttaaagaattaaataagtatgagcacatttactaatgctgacattagtaaggaatatggaggccttaaatggaatacaattgaaagatagatttatttcatataatgtgtgagagtttgtaaaattttatattaaaccagacagtgatcagtgaattcagttgtgaagaatagagaacaaaataaaattataaatatgatatgctaaatttatatcattgtatattgcgaatgatgagaaagtaaagcaatatataaggacagagatattcaaatattctcaaaacgtatgtctattatttaattttcttacatgaattgacaacaacagagtaggtgaatataagagactctttgtaatggggtaatattatttaccttcttttaaggatgaagtgttagaggagtttaccttcccttttccaagatcactatgtcaatgagtatgagcttaatgccaattttacttagaaaactttctaaaaaaggcaggcgtgtgtgtgtttatattcatgtgatatgtgttggttggcaatagtgaaaccacatgatagaataatatgaaaatttaaattatcttaaaccctaagtattctctttgatgcttttattattccctttgcccttaggctgtcactaatttatatttaaatattaattatacatacacatatcatatcaacactatacattatttctctaaacaaagtaaggtctattcagtatcagtagtggggaatagtaggtggagaataattaaaagttgttggggtgttaaggaaaaagtaattctttgcccatgataaaccacactgtcaactctggctatttacacatagtcaatcttggttaccatcaaggagttatcatttagaaaatataatagagttgtcatgacacaaattaaacacacactcaatgcatttgagttaatgtgtctgtatccatcattgattgtcgcctctaagttgatgacttccaaattagtagtcctgtcattgacataacttctaagacataaacctgtgttgccactcctactaaatattttcatcaaagagagtcaacatgttcaaaactgagctcctttaaatatcctccacagtgagcttcttaacttcatattttgaatgttatcactaatactggaaacctcagtggcctttctctctatcaataaacacttgcagtgtttcataatgttgtcatttcataaccttgttatgtcttgttttttacaattgaacttcttcagataaagtttattgtacctatttactttaggctttcatcatctccatgatggccttaatgtctttcctgctccatactacgaagtttctccttatgtttcctcctcctctttctcttaatcaatacccctcagctgatgcaagaacttaatatgttctgtggatatgtgagtgaacaaaatagacaaaaactcccgcatttttagaatgtggagctctcattctagtgagaggtgtcaacagtaatcataacaaatgagtaaattgtacagcattttataagctgatatctactgtgaaaaaggtagaacaatgtaagaaagaaaaaaatgttggaagagtttggggtattcactttaagtaggttagtccaagtagtcccaagagaatgaaatttgagcaaaaatttgaaggaagtgaaggattcgctagaaaatagtttgaggaagaacgttccaggtactagaacaacaagtcaaataccccaaggcatcagaatgtcaagtatgtttgagatacagcaagacagaataaataagagaagagacggatttagggaggtaacacggagctgggtaatatggtgtcttccttgtcctataacaggctctaagtcacaccctaagtaagaatgggaaaccattaaatgattgtaaacattggaatgaagttatctaaattgtgttttgcaaagaccagtctggttattaataaagaatatcttattgaagattctgacaatactgctctgctttaaatagttttaaatcttcaggattaaatcttcaggatacattttcagcctcataaaattcattaaatttagtctcctcatctcctaatactatccatcccaagacatccatgaaaaaatcagtccacatatgagattacatatttaagtactaaacctgtgtgctgcagaccaaaattggatggaaatggtaaaataacacaggtagaaatcatcaaggaatactttgtgtaaatgtttgaacatgagcttaattttgaggatagataaaactgattagtcaaagttgagaaaggagaagtttctaatccaagtgaggtgggagtggaggatgttgtataagcaaaggcacagaatgaatgtcaaactgaacagggagatactggcatattggaaagaactggaccagatggaaggcaaacagagagtttagaatttcatgccaacataaaaatgggaaaaatatagatttttaagtaaaagaaaataataaaatcagttttgagagagtagcctggcagatggctctgatttattgagtaaaaacaaacacaaacaattctcatataagtcagaactcgctgtcttccataaggagtgggccttttttatatcttgggtgaaatcagtgactttatgagttatgcttttgaacaaagatggcatgcattattttcctgggatatttatgcccaaccaaaggaaagaaaatgaattaaagacaaagggacttactgctttccgctatgtttaggtgggtgtattgctggtgtgtatgagatcctggacctttcagtgatatttactgtcaaacgtataatattagtgtgtgacaactacagtgaaccaaaaggacattgtaaagtctgatttagataataaagttgatgttttgtttgccaggtaacagaaacacggactggtcctcttggctgcagtaactatgacaacctagattctgtcagttctgttctggttcagagtcctgagaataagattcagttgcaaggtatgttggtaaaatttcattaattctctacaagcctgaatagcaattatccagtcgtgatttcttttccattttttaaagtaaactgcatatacatacaggctattaaaaactctcattaaaggctaatttcataatttaactgatacaagaaaatatgaaattctagaccatatgaataaaatatcaaaaattttcttttcttctcaaattaactaagctatagcaattgaaaatctgtcctaataatatttttcttacgtatagtaatcattgtgtcattatgtagcagtttcttcatatgcttgcctgagctttgactttttacttaaagattcttgtgaaagttgtaaccatatttatgcatggtataaaatgaactgttgacattttatatataacctaatgtggcagtcaagactgtatttttctcctggtaaatagaaatgtacttaaggatatattaacaaaatatttatattcatatgatttccattttaaagatagattttataaaaataatttgctattttctattactacatagtttagatattcaataaagagtattttattcacaagaacttttaaaaatacaataattatgcatacatgctcattcttataggcaggaacaggttatgaatacacacgtttaaacactactagttgaacaagttcagagaagtctttgtgatgacactttctgtcaaaattaagttgactgatcaaagaggtaattttgagttgttattctctagtatgcctttttgaattgcataacttagagctgaatatttacattattcagttttacataaaaatgcttaaaagtttcagaaatgctaccattttttcccttaactttgcaatcttgaaaaatgtatcagtgtccccacgtggtggcttatgcctgcaatcctaaccctttgggaggctgaggcaggaagatcagttgaagccaggagttcaagaccagcctgggcaacatagtgagacctaaaaaacaatattatctgggcgctggtgttgcaggcctgcagtcccagctactcaggaggctgaggcaggaggattgctgcacctaagagttcaaggttgcagtgagctatgaccacaccaccgcactccactgtcactccagcctggacatcgctgtccacaccgcacatcactgtccatgcgacactgcacatcatgttactccagcctgggtgacagtgagaccctgtctctaaaaaattaaaaaaaaattaattaattaaaagaaaaatgtaataacattgaattgtttaaatttatcctaaatagtgaatgaatgccttttattttgagttgtattaaaagtacaaagttcttaaatactttaacaatttaaatgttatccaatttatcaatatcaattatagatttacatttattaaaacattttctctaattgaaataaaaatgttgtccaccaatgtttcttgcaattctctactgcttactcctttttaatgtatggattaaccttccctcagaatatgaattgcaataaaaatgacagcacgtttataccaatttgtatgactacttcaatcagtttattataaaaattatttactaacaagatttattgatttgtgtctgaattactatgttcagttttcaaaatattaaattatttttaaaatccttcagtcccctatctctctggaaaaataattaacacaaggaataaatgaagcaacatttctcttttgtataattatttctattctcttcaactaatgtgcgtaactcagaaacctccatctctttcactttttttctgttttccatgtctgtatttttaattgtctattacaactttatttatacacctatcggtacaaagtcctttctgaaaatactattaggaagtcaatttcaagaccctcaatatttcatgcactctttcttaaatttaattggtatttacaatccaagtataatgttggctaacttttaaacctctccttttgtactacccctcatctaccttataaactaatgggaacaatttgttaattctggatcaatgttaccatggtgcattcctttgaagggtatagatatttctgggtcactgtatgtggcaattgaaaacactggaatcactgaagaatattttactaaggtaacaacagagatcttcatgtcttttggggttagctagttagatatttggtctgataaatggatggatataggtatagatgatagataaatagatatagatagttgcttgtgtgttgtgttttctttctaagtacatgttgaagttttagaatcagagcgtttggcccattttggaatcttctgaatttagatatattattgagagaatcctgaaattatcacagttttttaataaagaacttctgaaactctcctctttcattagaaaaagaaaaattgttcctgaagtggaattgtatctaagcaaagcaaataaagcaccagtaattgttgaagtcaactggattagacaactaattcagaacagaactctaagatttaaccattggtatatgaatcagtattttaaaaaataagatatataaaagatggactttgagatctcgttttgctgataagattacagagcaggcatttttcaaaaattaaaagagccatagctacaacttcaatttattgatgaaaatatatttaaggtagataataaaaagtagttataagaaaatattggcaaatgcatattgaaataatacttcaatttttttcaatgccttctgagtataacacatcaaacaaggtgcctctgagtgaaagtataaccagaataatgaaaagtcatttattaagttttggtagtaattttttggtaaaattggcagaccttgagaaaatgaataatttaaaggactgaattacaagcacttttccatattagctagttcccaatattttatttaaatgaatttgacacaggactaggctattttaaggtggatgattaaatgtaatttttaatgatggttcatgagtgttttggcttataataaaaattgaatgatgctgcttcaaaaaactgtttttgttcctgtttattaatttattgaatcacatgttctcagtgcttacatacttaaaaatgaagacagataataatttatgctgaaggaagggtcactctagacaaaaaaagtcctattaagtccttcaagccatgtgttttcaaaaagctgattatatttgctttaaaaaaatatttcttcatacttataataagtgtacttctattgaactgcatattacatatgatagttataatttgtcagaaatatttttaaaatttttagtatcaagaaatcatatataccatacattatactatatgataattaatattatttaaattttcagtaaatatatgtatacatatttacatttcaagctatttacttttatagaagataagtatgactgtgattaagaaaacacattgattaatcaaatatattatatttgaataaaaatatttagggatagtcgaatgaaataatgacttggaggaaagagatatgtgtgtgcctgtgtgtgtgtgagtgtttgaagaattttatttcaggaacaattctttttccacttgagaagatgtatgaaaaagaaggtcattactaaaaactcataattcacacaaacatatatctatacactcactatacatacatatatactttttttatatttgtatatcttgttcaaattttatttttaaaagatgtattagttaccaaatcaacaggaattatatttcatttgtacatatatagaagcagagtaatatttttattgtaaaatatgcatattaataataccacagtttaccagctttgggcctcttttatgtataacgaaaattttaaacaggagcttactcatgtccaaagtagtgcttatgttttcaaaactatttaaggtagttcatgagcaaaatagcattgaagaacattgaccagctggtcatttttacttagctatttgtcttgccataacatatggtgatatgctgcaaattaatttacaattttttacgttcctcatcaattttctaatattattttatatttgtttaacaaatatcatttatttcctttctttcctctcattctgtgttatatttaaatgtggtttaggcctttccatcataacacaaatcttttatgctattttctgtatttcatatctttttgcccttttattccttttaaacgtattcttctgcaatatttcagttccctaattatctcttaaatgtctatgctgctgttaaagctatccattggttcttaatttcaaattatgcatttttatttgtaaaatagccacttgatttttctttataatttctagttccttgccatattgtctgttttgttattaaatttttgatcatgtgattgaaattaatttatcattcttgtttgacaccctctataccatcccttgtctttttatatgttcatcatattttattgaattctgttttgagtgaaaatttataaaaatattttaaaattattgatggtgcattttccttcagagaagatttagtttcaatgctattttaattaattttgaaatatgccagttggaactatacttcagatctggtgaaagctagtggtttctttgtgtgtgtgtgtgtgtgtgtgtgtgtgtgtgtgtgtgtgtgtgttttgttttgtttttctttactctgggtatgtagctcatctagtaactaaatcctgaggaagttactatctctgtcatggttggtataaatgtcaatttgtactttgttctgggcagaactctaatggaaaagatatgcccaacatattagtctgttcttatgctgctaataaagacatacttgagactgggtaatttctaaagagaataggtttaatttactccagttccacatggccgaggatgcctcacaatcatgacagaggcaaggaggagcaaagtcacatcttatatgggggcagacaagagagagtttgtgcaggggaggtcccatttataaaaccatcacatcttctgagacttattcactatcatgagaaaaccttcctccatgattctattacctcccactgggtccctcccacgacatgtggggattattacagttcaaagtgagattttgtgggggacacagagccaaaccatataacccaatattgggctcactctgcctgtaggattaccttatttccaggttaaccccagaaattctcacttcatttttgtccttgttatctcttcagattatttttaatactttacctagatttcctagttggttccatgagaaggtgggttgaaaacaaactagtcctttcacaccggaaacattcatattttactctgtggttctcagcttgtagcagttgccctcacatcctggcttttacaggaagcacataggctcaaaactaagctttgttaagcattgttccagcactaggtagacctggtctaaatatagtgctgtcagtattcctgctttcctgtttctgtacatagcagaaaaaaaaagaaaattccgtggccagccctgaaccactccgagttgtttgtcagagcaggccaagctatctctctaggaaccaactagttcttatcggtggtctggttataaaattcaagtgttttgagcgctgcgtccctaaacctcttttctcaaaactctttaattttataatggttttacagaatgtgagtttccttcttttagcagtgtatgtatgtatcatcatagcaggagtatttgtgtttctaaagcggaactcaccatttcttgccaccaatcattcctccccaaattacttctcctgccttctctatttctccaaaagcactaccgtcttacagattcaacgttgtaatgcaatgatgtgctttatgactatgaaaatggtacgcgagttctttggtttttttgtgtgtgaaattaagattaaaatggataagtagtttacaagtatctagtccacactcaattactgttaccttaggtcttttaataaatatatactgattcctgagttccttgagcaaagactctgaattattcaaattgtttttagcactttaagttttcagaaaaaaaaaaatcactaggtgtatctgaaatgtgcagtaatttggtaaaccataggactagacgattaagaaaatttctgaatgtatcattttatgcctctaagtattttaacactttttacttgccttagatcaaatacagtactatctagcagattctcactattcctctattaccttaatttctttccctagtgtggattttttcagtcttcttaaagatcttaaatctaatcttaaaaattagtcaactctaatatatttctttaccttctacttccaaatgggtaccactcttagtatcccacatggtaaaattaatttaaatctaaatgaattaattctatattccctgacataggaatcccaacaacatgactcctcatttatgtgtgtaagcacctctttcattgtattcttatagcccatttgcaatgaaacaatattactactttcatttccaaaatatattaatatataacccagctttttatctgtgtgtgatgctgttaatgtatcactcttcagcacagtcactcaatattgaaaactatacatctgtcaaataatgttcaatgcctaactttttaataaaaagtttttttacttttgtgaacttaatataattgtttagccaattaattatatttattgaatcacatgtatcttatatagttgcatcttttatttttcttaaatatactgcagatatctctgtgacaaataaatttctcagtcaccctcatatttgtatcttacctagcaattttattcaaaatgagactgttcaataaatatttattccaggtgaaatgaaaattaatatgaaatcgaatatataagttctaagagtactttttccaacaatttgcaaaggaaattttgcaatttgtcaacatatttgtaaattaatttttttctaaatgttaatcaatgatttttattaaatcaacctctaagataatagtcaagggtcaacattgatttttttgttaaacagaaaacatgtgaaattataaaaattcagttttctggtaagtaacactttgctattaccagatttttccttagctttgtattcatttttacctacttatttgtttaaatatttagtatttaagtattcttaagtagccagacatactgaaaaactacatttttgaaatatcgtaataaatgctacaccctgagaaaagcccaaatcttaattttacaatattttggacagttttttaagagatagcaactttactaaacatgtttctagaaaactaatgagttatatcactaggactgttgacacatggcaaaaaataaactgtgaaataactaaatcagtccatctgattcctgtagttatttttggtactcactcttgaaaaatagaattatataacttatatgttgttaatggcatgagataagccttaccatcaacattcaatatgtattttatcaatggcacaacccattatatgatatttacattgatgtgggctgatagtctgcaaacaaaatgaaaatattgaaaaccatttgaaatcaactggtagaaaataaatgcatatgtgtattttcaaaggtttagaaagataggctccatctatattatgtaaaaataaccaaatattgtgataaattacatcaaatagtctgagttttcaatcatctccatgattaatcatctctatttctgaagtttcatattcatggagtcagaatatgttgaaagagttataaatatttgcagcatatagacttagatatttttctgatagtttaaaaatacataattcaaaatttaatacactaaattatttactgttttgattgaatattataaataagtattttaattttttctttaacaaagtaaatttgttaatttctttgtttgttcttcaagggcttcaagtacttctcccagactatcttcaggaacgttttgtacaagcagctttgagctacattgcttgcaattcagagggagagtttatctgcaaggaaaatgactgctggtgtcactgtggtcccaaatttccagaatgcaactgcccctccatggacattcaagccatggaagagaatcttcttcgaataactgaaacctggaaagcttacaacagtgactttgaggaatcaggtaagacatgtattttaatataacacttttaaatattgacaaaaaatatattgaaatggctaatttgtcctttttcaagaaactattacatagttggaaagattttcatttttttattctttcaaatggacattttcattgcttttactactggttattaactagtgctttgtgtattgctatgtactattggcattagagtttagcctgatcctaagttgatgtattagtcacttaataaataaagttcttgcttttctcagtacaagaaattttaagttatcatctgatacctctgaggtttttctctacttttctagtgtctgcttttctcttgtgcagcaaaatgaagacagcatttgttctatacctttttcaacatgattctcattagtgcttattttcacttcacttatttctacaatgaagttatctaaattttaattttatagtgttttgtgagttttgttatgattgttttatttttacttggttaaaacatacatataaaatttactatctttgcgatttttaagcacacttaataaatacatttttattcttttattttccctgcattttctcccagcccccactacccttcctggcctctggaaaccaccgttctactctctatcttcatgagttctactttttttagcttccacatatgagtgggaacatgtgggttagaatatttgtctttctgtgattgacttatttcacttaatataaaggcctcttgttccatccatgttgttgcagatgacaagatttcattctattttatggctgaataatattccattgtgtatatataacacattctcttaatctattcatccactgatgggcagttaaattgaatccgtatttggttattgggaatagtgctgcaataaataagggagtgcagctatatattcaatatactgatttcctttattttgtatatatattcagtagtgagattaataatatggtacttctactttaggtgtttgagcaaactccatagagttctccttagtggctctactaatctatatttccaccaacagtgtagaagggttcccctttctctgcatcctcaccagcacctgttattgcctgtcttttgatacaacccattttaaattgtagttttgacttgcatttctctgataattagtgatgttgagcattatttcatatatctgtttgccatctttatgtcttcttatgagaaatatgtattcagatattctgcccagtctttaattgggttattagttttggtttttagtattttgttttggttatttagttgtttgagctccttatgtattctggttattaatccctggacagatgaatggtttgtaaatattttctcccattctgtgggttatctcttcactttgctgattgtttactgtacagaggctttttagcttgatataattccatttgtctattttttgctttagttgtctgtaatgttgaggttttacaaacaaaaaaatctttgcccagaccaatgtcctgtagtgtttcctaaataatttcgtttttagttttatatttttaagttttagatttaagtctataatttatttttatttgatttttgtgtatggtgagagataggggtctagattttttctgcataaaattatccattttttccagcaatatttatttaaaagattttcttttccccaacgtatgtgtagtctttgtcaaagttgagttggctgtaaatgtgtggatatatatatggttctctattctattccattggtctatgtgtctgcttttatcccagtactatgctgttttgattgtgatagctttgtagtaaatttgaagtcaggtggtgtgatgattctagctttgttcttttttgctcatgattactttagttatttgggtatcttttgatgtcctgcacatattttataattttttttttctatttctgtgaagaatgccactgttttgatggggattgtgctgaatccgtaaattgctttagtagtattgtcattttaacaacattaaatattccaatccatacatatgaaatatctttacattatttgtgtgttttcttgtactttttgcataagaatttcatagtttttcttatatagatctttccattatttggtttgattgctttgaggtattttatacagttgtagccatagtaaatgaggttgctttcttgttttttcagattatttgttgatttctgtagtttattttgtatcccgcaactttactgaatgtttttatcaattttaacattgtttttattgaggttttttctaggtatgaaattgtgttgtctacaaacaacgctaatttgacttcttctttccagtttttatgctttttatttagttcttttccctacttgttctggagaggactttccatgtcatgttgaataaaagtggtgaaagtaagcattcttatcttgttccagtctttaaagaaaaggcctttctcataagaaaaaattatttttctcattcagcacagtgttaactgtgggtttgtcatacatggcctttataattttgaagtgtattctctctatacccattttgatgagagtttttatcatgaactgttgttcaattttatcaagtgcttttttggcatctattgaaataatgatatgtttattttcttgattctgctaatgtgatgcatcacgtttgttgatttgcatgtgttgaaccatctttgtatccctaggatgaatttcacttgatcatgttaatgtgttgttgaatttggtttgctagtgttttgttgattatctttgcatctctgctcatcagtgatattgatctgtagtgttcttattggtttcttgtcatgtttttgtctggttttagtatcagggtaatgctgacctcatataatgagtttggagtattaccttccttccaaatttttggagaatttgggtagaactgatattggttcttctttaaattttggtagagttagcagtgaagccaatgatcctgagcttcattttgatggaagactttgaattatctctttgatagccatattgatttttggcttgttaattttttttttatttcttcattgttcaatcttggtaagttgtgtgtgtccaggaatttattcatttcttccaagttttccaatttgttggcatgcagttgttcacaatagtctctaacgattctttgtgcttctgggttctcagttgttatgtctcctttttcatttctgattttatttaattaggtcttttttttcttagacaaagaatttgtcagttttgattatcttttcaaaaacccaactttttctatcattgatcttatgtatttttctagtataaatttcatttatttccctttttcatttcttattttatttatttgcctcttcttcctttattcttaatctggctaagggtttgttaatatcttttcaaacatgcagcttttccttttgttgatcttatgtatttttttgtctcaactttattcatatctgctgtgatttttattatttcttctattaatttggggtttggtttattcttgcttttctcgttcgttgaggttcattgttaggttatttgaagtctttatactcttttaatttaggcatttattactataaacatcccgcttgatatagatgttattgtatctcaagttttggtttgttgtatttttgttttcatttgttttttttaattgccttcttatttttttaattgactcattagctgtccagtaggatgttttatttctatgtgtttgtgtattttccaaggttcctcttgttttcaatttgtggtttttattccattgtggtcagaaaagttacttgataagatttttattttttaatttattcagacttttttgttgcttaagatatgacctattctgaagaatgttccatgcactgaaggaaagaatgtatattctgcagcagttgggtgaaatgttttgttaatgtcatctagggcccattagatctagtgcgtagtttaactgtgctctttctttcttgattttctgtctggatgatatgttcattactgatacgagggtgttaaattcccctgctgttattttattatagtcttatatatatttttagctctactaatgtgtgctttatatacttataggaaactctgttgttgggcataaaactattgataattgttatattatcttgctgtattgacccctttatcattttatattgacctcctatgtctttttaaatcttagatttttaatctattttgtctgatataggtatagctactcctgctcctttgttttccagttgcatcgagtatctttttccaccccttcacgctcagtctatgtgtatctttctacattaagtggattttttgaaggcaacatatagttgggtcttacttctttattcattcagccactatacacgttataattggggaagtgagatcatttacattcagtgttattattgataaataagtgcacactactgccattttgtggcttgttttctggttcgttttagtctcttcttctcttcttactgtctttctttgtgattaagtgattttcattggtagtgtgttttaatttgttgcttttcattttccatgaatttatctcaagttatgaggcttacaaaaatcatcttatagatatagtaagttatgctaaagagaagacaacttaccttggataacaaactaagaacagaaacaacaaagacaaaaagcacacaaaaaattttacactttaactccactcacccacatgtttacttttagttgccccagtttactttttttgttgtttgtttgtttgagatggagtctcactctgtcgcctaggctggagtgtagtggtgcgatctcagctcactgcaacctctgcctcccgggttcaagcgattctcttgcttcagccacccaagtagttgggattacaggcatctgccaccatgcccgactaatttttgtgtttgtagtagagacagggtttcaccatgttggccaggctggtctcgaactcctctgtttacagatttttatactatctcttagaaagttgctatagctattactgtttttgacagattttacttttgggcttcatatgaggttacaagagaattgcacaccaaaattaaagtgacagagtattctgagtttgtccttgtacttaattttaccagtgggatttatgccttgaaaacttttttttggcatatttgtatgtttttactttcagactgaagagcttcctttatcatttcttgtaagatgagtctggtggtggtaaattctctccatttttgtttatttgggaaatagtttatctctccttcatgttttaaggatgattttgcctaatacaatatttttgagttgcaattttttttatctttgaacacattgaaaatgccattgagaagtttgtcgccagacaaattgaagctccttttatgtcttttatgttatttgcttcttttttaaaaaaaattatactttaagttctgcgttacatgtgcagaacgtgcagttttgttacataggtatacacgggccatggtggtttgctacacccatcaacccgtcaccaacattaggtatttctcctaatgttaaccctcccctagcccccaacccctgacaggccctgatgtgtgatgttcctctccctgtgtccgtgtgatctcattgttcaactcccacatatgattgagaacatgcagtgtttggttttctgatcttacgatagttagctgagaatgatggtttccagcttcacccatgtccctgtaaaggacatgaactcatcctttttgcttcttttctcttgctgcttttaggattctctctttttcattgatcttagggagtttggttattatatgccttggaggtagtcttatcgggattgaatctgactagtattcccagatcgttctatacctgaatatttctcaagctttgcacagtttttcattatttatttgactaaaatttccactccttgatcttgctcagctcacttttgaataccaataattcttcaatttggtcttttgaggtaattttctgtatcttataggtggtctttgttccttttcatgtttttcatttgtttgcttgtttgtttccctctgactgtgtatttccctttttttaaaatttattattattattattattttaattttttttttggagtctcactctgtcacccaggctggagtgcagtggtgagatcttggctcactgaaacctccacctcccaggttcaagcgattctcctgcctcagcttcctgagtagctgggactacagacatccgccaccacatccagctaatttttgtatttttagtagagacagggtttcaccatgttggccaggatggtctcgatctcttgacctcgtgatccacccacctcggcctcccaaagtgctgggattacaggcgtgagccaccattcctggccctgactatgtattttcaaatagccagtcttttagctcactgattcttttctctgcttggtccattctactgttgagacctctaatgaattgttcagttcaggaaatgtatttctctattccatgatttctgtttgattttttattattttaatatctttgttaaatttctctaataaatttcagaattgcttttctgtgttatcttagagatcactgagtttcctgaaaactgctgttttgaattcttggtcagagagctcacaaatcagcatcttgtttgggtcagtcactcaatttttgttctgtctttttgaggaggtcatggtttcctgtttgctgttgtttcttatgggtaaatgtctgtgaattgcattgaaggattaattattaattccagttttatctgtccaatttttttcatttatagttaaatatgcttgctccgtgattctttactgctaggtctgctttattcttggctcttagttgtgcctgaatcccctatttgcattgccgttgtaaataatgagagcactggcagtcctgaatggagttggtcccaaaggaattatcctagtactgtgtgaaggtgacaaaacatgttccagacaagagaaaacacaatgatggcttcaacaaaatattttgcttttgttgttgttgttggaaataacacaaattacacaatgaaagggtaaatagatttaggaagagttagtaaatgtaggctcccttaagatttatttgatcaaaatagagcattaaaaacaaccaaaataatggaagcagacattggtgaatagaggggacaaggagggtggggggaggtatgaggatgtgatcatcaaatgttgcaaagtttcagttagaccggaaaaataggttttgagatctatagcatagcatgttgacttgttaataaaatgtatgtttcaaaattgccaacagaatatatttctaatatatttcaaatattctcaccataaaaaaataagtatttgaggtggtagatatgttaattagtttgaattactcattcttcattatatacatatataataacatccagtgttacctcataaatgtatacaattataattcttcaaattacaataaaatacacatcaattaaaaatgattttaaaatcatggtatatttacacaatggaattgtataaagcttgaaggaatggactatccaaaatatgaataaatctctgaaatatcacattgaacaaaagaagccaaacttaaaaatacatatatgattccatttatattaagtataaaacaagcaaagcttacctgtactattatgaatcagggcaatgatgcctttgcctaagcaagggctgatgtgatggatgagagtctgggaggctcttttggtaccaaaaatgtattatttctttatctaggagcccggctatatggtgtatatagtttttgaaaattctgagttatacacttacaatatttatatttttctgtattcgtgtaatttaataaaataaaaaattagcactttggcaactaaatactctgaaggacatactgacagaataattgaatagattaatattttcaaagctcactacatgttatgtgtttaaattagtagcaaattggtaaatatttgatctggaacattcattgaccagagattttgaagtactgattagaagccagtcctaacaaaagtcagacttcttaatcttatctcacatttggactgttcatcttaggtttataaccaaaggctcttgccatagtggatgccgttatgtcgatattgggaaaacagtgatctacagaataaatctattttctgatatagtatccctgaaactatttctaatattgaaaattacaacattgaattatttgctgtaatcagtggtcaaatgtatttagctgattcatatttcacttgagaagttgccctactttgctgtaaacttaagaattcatcacagaaaaatatttatattatttttaatttcagggtatagatagctaaataatgaacccaaacattttattcataaattatatcttcagtaaaaccacattcacttttcttggaactaaacaattggtaaaatactgtatttatattggactctttttaaaactagtaagatatatgaaagagcacatgtaatagttttgagaaaagcttttggttaagagaaacattttttttttgcctcataacagataaacaaaatataagaagtaatgaggcagctattacattgggaaaataattctaaaatattatcaccactcacaggctcttgtaagttgatggtctttattctaagtaccatgattgtaaggaaatgcaccagcttatttcatttccctgatggttgggaaagctttggaattatgtgcaagtgcactctttacatgtttctgctgggaattcttcacttttaggtgcaagacatactaatttgtctattcttatctacaggcttgaaattcaaatcctgttatactctacatagacaataaaaattggaatggagttttaggttactttcaaaggctgattcaatgtaatgtgaaaaattaaacaaatgcaagtaaataacttatctaaaagttatttttattaaaacagaaaaaaaatcagtttatgtttgctattttattaaaagagaatattcatttgaatttaggaaatcttccttaaatgtaagtagcaacatgaagtgtgtcagagtgcattccacaataatagagaatgctaataactggtaccatacaaaaagaaggaagtaatttgcatatttcattaggtcaagataacctgtttgtaaatgactttctgttgtgtatgtttcctattttcactgaatataaaattcagtcagtagataggattagcacagaatgctaagccattttatatttgattatatttgattcattttgttctgtaatgggcaagtcctggaaaacccacctgttacagcctgcaaataaaagtgtcagcgaattttaaaatagaaatatttctcttttcatgtcttgcaacctgagaaaatttctcactctaataacaatatttatagaaatcaatttatctctaactttacatttttagaaaataaatttatgttgtttaataagaaatattggtagcatatacataacattaattacaataaaaatagtatagaataaagatatataaaaatatagagggagaaaaaatgaaacacacaaaacctcacaatagtagtaaccacataaaaaccaatttatgtgttacaattaattagacaaagatcacaattttgttggacattacttagacaatgtctacccagatgtggatcaaggattcaaacttaatgagaaagctagaaatacagttttgcatgcatattttaatgattaaaaccaaaagacttgtgcaaataattaccaaaattgccagaaaaaatgaataactactacatagttaaaaataaattatcttttccaaataactttctgagttatccccagttgtttttttttttggataaataaaaaacttcattacttataattatgaaatacagcaatcttcatgcaattaataatcctaaggaaaaataaagagattggtctatataaagaacggatattttacaaatgttttggcatgacattttactctttggaaaaaatgtgttaccacttggcatatagaatatctaaggtgtattgtatgctgtcaacatatgtctttatcagcatcgtgtcctattaaatgtagagacatttatttgatgatctaagaatgacagttggcggccatcttgtattggcaatcatctaggtgtaactgttagagaacactatccattttgacactacatctgaaaatagataatctttctaatgctacaaagccaaataatttgaatactgcagtattgcaaagattgggttagctagatttacaaactgttttgcaagaaaaaataaatttttttaaattttatgtaaactattaattttctttatcaaaaatagtttttctctcagatgatatttgaccatcagtttatggaaagaggacattttctagggaaaataagtatatccaaataaaatatttgaattttaactaacatgctactttacatgttataatctttaataaaatctgctgtcggttgctcaatgttcattctccttctttgacagtaaagtatcccatatttttggggagtaaaacctacatttaagttttagtaatgcacaaagtatgggattgagcttatattgatatccagaattactctctgattaatgtaagacaagcacaataatctgtttccatgtctatgaagatcggttcaagatatataaaaaatcaggtcaatgaggcctagaaatatatttcctaggggtatttgggggagacgcaagatttcatttctttttttttttttttcataatagctacatggattgctattatcttttcttcttaaatggaaaagaagaacatacttataaaagcattaatgagctttcttgcatttatgagagttgtaaggcattcaagatagaaaaatgtttctttggttatgtcagtgagttgttgaatcactcctgcttcaagtttaccttgcctctagagtttcaattacattagacaataaatgtccttcactgttaagtcaatctgagatggtctgtcattaaggacaggctaggtaatcctgcagtagtaaagaattccccaaatccttgagttacagcgtgagttataccattgacttcttcctaatttgttccttgtaagtttgctgtgagttttgctatgtcttcttccaacactcaggctgacagcaacccctaaaggcaaaagtgatcacgatggcagaaggagaaaacaccacaaacaatgcatacactaagtcttaaagtttcagccagaaaaatgacatatgccacacctgccaggattccattggccaaaacaaacaactcatagttaattcaaggagggcttttttccctgaaagaaaacctgaaaatatgtgagaagttccaatgactctacagtgcactgttctaaatcacaagatattcagtttacttctcttcccagatgcaggacgcattcacctcatccccaagataaacagaacaaaactcccatgaataactgagtccagcacaatgagtgaggcttgacggcctcctcatcaaatccagatatagtttcttttgatatcaagtcatgaaccaaaagcaagttatttatcccagacatattatataccaagtgagaatttctcagcttaactataataagcacttccagtcagaagaaagaaaacaggacacacaaaacaaactcaagttggagcagttctgaaattttgaaggcctgaacctgaaggtggggaatgctctttgaagattcctcagtttttatttctgagagtggctctcttgtcttctgtttttcggggactcaagctccaacctatgagtgattctttccatcccattatcctccttagccacatgggagatgagaattggagaatatgcctgggggatagttttctcaggttgctttctgcccaaacactgggactcacacgtcattttaaattttaaacttcattatttttagcagtataactcatgtaaaaattaactgatcttttgactgagtttagtcagtttatgccaatagccacacccacagtctttcctaaatatgttcccccatttgctgtttttccacctattcctccctcctttctctctcatttcaattgtgcaattttattagagttttacttgggctttggagttcaatggagagtcttttctgggtaccacaacttttattggacattatccctaatgtccaacaaattaatttattcatgatcatggcaaggggcatgaaagccaaccacgtaccatccttgctatgagactgaattttaattggccattgtaactcagttcgtaattttattactggcagttgagaagcagttgcctcttttaactctacctgattcatagtctctcaattctcttttattcatgctgtcaaattcagcaattattttctaagtttgaggtcgtatgtcagacaagtaatataggtaattccacagaagcacaccttgaaatattatctttggatgaggacactgaagttcactttgttcatatcacttgtctgttgtgtattggttgtgaaatcttctctatgtgttctcactacaggatgggggctcacggtgcagccatcatctggagctatgtgtcactatgacagagtgcaataccttgccatactttggcataaacagttaccagcaaaagaactagcattcttttttctgacatctgagtgtgttgggtatacagtattatttcctagttactgctggtaacagtttcccagctgtttcctcatggcctaatatggattgttatcattcccatttcagcctcttctaaagggtacttgacaccttcatgatccactgaatccatgccacaactgtagggttttgcttttcttaacactatcccctccctcctttcctgggtccaatttctatataagttaaaatcaatttgcaataataaacaaccataaaatcttaaaataatataatcaaatgtcatttctagctcacattacgtgcccaccacaggttagctggagtctcttctcagcattgacttcactcctggactcaggctgatggaaacatcactatcttgaatgatttggtaatggaggcaatgggaaagcatacagataatcgtcactggctcttatgtaatgtgtgtctagctaattcgcattacttatgatcacattttatggccaaatctaatttgaaaggaaacagagaaatgccacttcacattgcctggaggagaagatgattcagaatatttgcaaacagttagaatgtcagccacagttgacttttcagatacaagaaactgaaaacatcataatctgtatcatctatccatataatctcagatgaggatatataaatttttctcttgctatctcatgttttccagtcttctatacttgcgggaaaatgagatgtatctgtagtttaagtgacctttgaggcattcaatccagggtatgtatcattttttccaaactaaatagctgaaaataagataaaccaagctttactagaaggaagcattgtgatcattagaaagtcatttaatctcttaaaattttggctacttcatttgtcattcagtaactttatttagacttgatgaactggatataaaagtctaattctaaattaacagtcatataattgccttctcatgggtaaaggtttttgacaatcatgcttgtatttataacatagctcttttaaaggaattggtagttggaatataaaagtaaaggaaataaaacaaactttttgtaacaacagtctcaatcttgatttacatgatatcgttatggttttaatttattgtgatgatatgctcattgcactatactgtaatttgtagctatctccagtaccagggagggtatttagctccaagattgttatgcaaaaccagtttgatttctgctgctatttgttttgattggtcaccgtttccattatgacttatcaatgcctgactgtaccagtgtttaaaatattatgaatatcatccttgccattaccaaattttgctctgaacttcaattaatttttaacatcatctgacatagatggctatggagtgccaaacaggtgttttatataatgatttctgatttagatctcaaatgaatttttgccaaatgccttctccctgttccagttggcctgatgttttttctctgtttagatcagtgccatcattccaactatcagaaaagagtttgacattttttgatggcagagaacaacatatttatttgcattgttacataaaagctattgcaatgtgctatatatagaagatacattacctatcatattatatcctgattgagtgatgaatgagataacaaaatatatctgtgtccagacattgtctatacattcgatttgatttacttcattaagtgtctctaagaatgtcattgtaactgtaatcctattcaccttttcaataggcacagtctaaagatcaattttaaaaaacaaaaatactacctgtattatccagggttctctagaggggcagaacttgtaggatatatgaatatattaaaggaaggttttttgtttgtttgcttgcttgtttttgagatggagtcttgctctgtcacccaggatggagtgcagtggcacgatctcagatcactgcaacctccacctcttaaaggcagttttttgaggagaattgactcacatgagcacaaggtaaagtcccacaataggccgtctgcaagtcgaggagctagaaaagcagtggtgggtcagtccgagtccaaaaacctcaaaagtagggaagctgacagtgtagccttcagtgtggccaaaggcccgagagcccctggcaaatcactggtataaatccaagagtccaaaagctgaagaacttggagtctaatattcgagggcagaaagcacccggcacaggagaaagatggaggctggaagactcaacaagcgtagtccttccgcattcttctgcctgctttattctagccatgcagggcagctaattagatggtgcccacccagattgagggtgggtctgcctctcccagtccgctgactcaaatgataatcccctttggcaacactctcacagacatacccaggaacaatactttgccaatcaagttgacaatcagtattaaccatcacactaactcattgttattttaaatttttatacaggtattttgagagcttttgttttgtattattctttgtcattcaggtatgaagaagagcatgaatgactgccctgccatagtcttcataataagatgatagaatatatatttataccggaacacacaaatgctttttctattggtttcaatttatttattgtaaaggattgttttcattataaatgtgcctgtttgtctaatatagtttgtatttatttgaactcataattcactcaaagattcagtttaatctgaaaaacattaaagtctttgattcagcatcataaaatcaaaacaaaaagtgactttgataacttttttgtttgcttttttcatacacatgctatagtgaagagatatcaataaataatacaatatattcagagaatttttacttgatactctattgtcagttttacaaaaatatatgtgatgacttcactaaattgtgtatactttatattactatttggataattttgataaaaatacttattcacatcaaacacaaactcttagaagccatgacaagggttatcaatactgagtacattcataccttttacagtaacctcataatggtcacatagactttgttaaaatcctctaatgttgtatacccagtagtttgtgtattacttcttccatgtgtatataaatttaacttttaagcaatactaccttataatgacaaactaacaagtagttaaagtaccaagtacacattcattttcaaagaaatgtactatttttcaaacttcatttttctactaaagcatacaagtggactattcttataggtgcagaattaatgtgtaatttatataaactgctttgccaattattgcactgaaaaataaagacagcaatctatagaatttggacctaaagttttggatgcatgactgaacttttggattttagaccattagaaattaattcaaagtcaagatatattatgtgaaatattttctatttgattatcagatctctcaaagcagatatttaaagatttaaagtactgagcaaatattttatgaacgtcaaatgaaattgatacataatacaaagttgtcactcatgctcttcagcaaatattactggttctcattcttacagacacataagaaagtcgaccttccagcacatttgaagttaggtatggccatgtgacttgttttgataaaggaagcttgagaaaaaactgtatgtatcactgtctagaggaaggctttatgaacctggcaggcatgatatgcttggtgtacttcctcagccaaagcaactgatgatgttctagatgttgaaaactcactgtttgtgttactgagataggacaaaggaaagcagagccactcagccaaccttaggtagataaataatgtgagttgaaacctagaactttttagttgtggttgaaatcagaaaacactttggttgtgtttgttactttggcaaaactagtctatactgaattatgtataagaagattaagctttctctttcactgtgagtaaaacagattggtgattataatttatttattcagtaaaacagtaacattatgaaaatttaagtttgattttctacaaaaaaatcatagtaaatatttactgtattttccaattgcataatataaggagtttaatgaaactgtaatgaaccacttataatggatcaagtttaaaggacattttaggcattaccccatttatactttaaagtaatccttcaaagtgttaatgttatgattgtatttttttttactttaaagataagaaagctagggctaacacatgttaagtgacttgtacaatagatatattaagtaataaagccaggatttgagctcatacaaaagtaggtggttctgattgggcatggtggctcatgcctgtaattccagcacattgagaggccaaggcggtcagatcaattgagtccaggagttagagtccagcctgggccacatggtgaaatcccgtctctactaaaaatacaaaaattagctgggcatggtggtgtgtgcctgtagtaacagcttctagggaagctgaggatcaagaaacgcttgaaccgggagacagaggttgttgcagtgagctgcgattttgccacagcacttcaacctgggtgacagagcaagagactgtctcaaaaaataaataaataaataaacaaacaaataaataaataaagtacatggttctcacaccatgtggacctctttaataaagtgctattattacataaggaaaacccttacctgctttttatatctcttaatatctctgcatgcattaagtagtggcatgttctgatccagaggttatcattaatgcctcatgataaaaataaatatatgtaggcagtgcacaaaaacacatgatataagagtatgtattacagggccgggcacagtggctcacacctgtaatgccagcactttgggcagccgtgttgggtggatagcttgagtccaggagttcaagaccagggaaacatagtgagtcccctagcctttacaaaaataaaaaaaataaaaaaaaaaattaaccaggtgtagtagtgcttacctgtagtcctagctacttggaaggctaaggtgtgaatatcccttgagcccaggaggcggaggttgcagtgagctgcactccagcttgggtgacacagcgagaccctgtctcaaacaagcaaacaacccaatatgtattacacaatatgtattacacattttacctagagcgagttcaactctatacaagatgccttcagtcacggttaatatttgctatcaacttcttatcaaggctgtgagttacttttaaggatcataatctaggctgtaatactaattttaacaataacatgtctgtatctcttctaaaaatcaatttgttcattatcattatgtaattcaatattttatatgcatttgtaaatggaaactttgtgaagtgtagccacatgactcatagcaattattaaatctgtttgtaaaatatatatttctttttgtttgaacaatgtcctttcgaccttctccattctcttctagtgacacctatatagcatgcacatagcaactgacatgaggctaaatggcctgtcactgagagtctcatttaatttttgttatgttgctagtatgatcttaacagccagctttaaagaaaaaataaccctgctgttggcaaaaatcagtacttcatttaaggaattgacaaagtgctagtgtaaagatctcggagttaattggcagcaaaacaaacgtgtggtgttatgtcaggttgtcaggtagttgtgttgtgtgaactctgaacaagcatcaggctagaaaggttgaccaaatttgtcgcactggctatgcaagttaacacagagaataacaagataaatttccccaaacactattgaagcatgaagtcttgcctcaattgttaaaactgacagacagacaatttagcggtaagcttgtcaaatgttgtacctgatgaagaatcctctcctttatacaatttagtattgattatttaatttctgtttccagtgactaggagctcagtgtatcacaaagttgaagagtgtaagaaataacatctctaatattaacatcactcttacttattttgaatttttttttattttccacttttctgaaaaaaaaaaacaaaaaaacaaaacaaaacaaaaaaaaaacccaaacatgatattgtcttgtgctgaaatatttattctttctctctggaggcctactgcctctactaggtcagccttcaggtatttgcctacaactatcatatcttctttgcttttttatttctgtaaatttaatattctcattttcttagattgtaaataaatatcttagaaatgaaaagatgactctttatttcacaaaatttctaaacccttaaccatttttcatcttctaggaataatctcaatttgtcattggaattcagaactgaacaaaaagccgtattaacagatatggttttattcattaattttacatcctttattctgagcacaatgcaaactaagattcctctaactttctggcaagaatctcacactgttcattaatatcgagttgtgaggaacaattcttaagtattttttcatgaagactgctcttagtaagagtccctctttttttatcatacacatacacgttttttttctaacttaatgctgcactttacttcttaaaaatgtcttgaaatttatatttatatttctaccattgtcacacaccttgagctttttgcagatcctcaatgtattatagattaagtttttccttactgctcattgacatttatttatttatttatttatttagcagaataggacaaatagaaacctgtcataaactactcaagcatttccttggaatctcaagagttccatgtttattttaacaatttatattcacctctcttcctcttccttcatatacctaaactaatatgccatgaagtctgtgttgttacatttaagtcatgtagtaaagcagtgaaccccaagttaaccttaatttggcaacggtgtactggcaagtgtcttttaaacaatggatagtttggctctagaccataggtaagatttccacctaagcagcaatatagtaggatttcttttttaagcctggtaacattccccagtctcttgttctgcacgaggtgattatctaattgtaatttgtcataacataaagttttcctttgggaaaaaaaaataaactctcataacattcctgtcttatttgttcttaaagcatgtgtgactcataatagaggcccatggtacctctattatggggtttatctttgttacgggtttggaaacagagggtaaggaagcaaaatgtttgagagttaaagggagataatgaagaaaaggactatctttgtattattttcttggccttttgtatcattttcttgtaccttcttctgagtgtaggcctggccctaaacatatttggaagtatagtaaacatgaatctgaaattttcttacacattttcttagagtcataagtaaccaacactccagttctggcccaatcatttcttttctctaatgatgagtgtagtctgcttctgacctgcttaatggacagaatttactcaattaatgcaccttttgcccaactcccatattagagcaggttagataactaatgacctcaggagatcatgagttttaaaacatggaaagcttattcatcctctatagtacatggatgttgcagatcaactgttgtctgcctcctacccatctgagatcaaggctgacagaacaaactctcatttgaacatggcaatatttccatgtgtggcgggtagaaaagagaaccatatcaaccgcttactggcttgcgaagattctgctcagaagttgcatacatctaatgacctcaggagatcatgagttttaaaacacggaaagtttattcatcctctatagtacatggatgttgcagatcaactggtgtctgcctcctacccatctgagaccaagactgacagaacaaactctcacttgaacatgggaatatttccatgtgtggcaggtggaaaagagaaccatatcaactgcatactggcttgtgaagattctgctcagaagttacatacatcgtccgggctgatttttttttttttttgccaaaggaaatgatatgttgaatccaaaattcaatagagaggaaatttattcttcttctatttggaagcataacaaagaaggaaccaataatggataaatattcattaaatctatcacatttcctaggaaaattttgattcactaagttcagctgatctcagtatttaagaaaacaactatattgaaccattttatatttaacttgtaatgatagttctcaaacatcgttacaattattatttgagactctgaaatcctctcatagtatcacaatatttaatgttagaaaatatattagagattctatagtctgacctatccatctgatatttgaattcctcctgtataatacttgaagcattgatggatgagctactctggtgatcagattattcatgttttctgaaggcaggacattcaatttttaggtagtattactttttttttcttaattgctaccaatatatatctcctaggtttccatccactcatgtcggctttaacctctgaagctacacataatgaatcctagtttttccatctagtttttaatatatttgaatgagtcaatttatttctatagtcttatttctaccaaaataaatattttttattattaatcctttctttccattttataatttaatatttctgcgtttttctatcaactctatgttccattttcttcttaaggtttcctcttaaagttacttcttaaagtttacagacactccaggtataaccaactatctacagaaagatgaaaatcagctcaggtcttatttattttacaaagtttttctggagtgggtaagtcttgataaggtctctttcatcaaggcaaaatttaaccagctcttattcaagaaaaattggtcatcattactttgccttttatttgaaatcaatacaaaatctgaaatatctatatgcccaaatgttttaatagcttaatttttagaagaattggtatcatataatgaaatttacaactgtaaatatcctcaaggccaatatttgtaacaaattccaatctacaatatatatggtctttctgattgggtgttctttcatttgtgatagatgtttatcattatttcagtttgaaatacatttcaaaagatgcaataataacacaatagataaaatgccaacgtgccctttgttttcatttatatatatatatatatatatatatatatatatatatatatatatatatatatatatatatatattttctttagtgatatcttgctttctgctaaaatgcacacttatattttgaagttctcagaaggtatttactattagggaaatctcctaggggaaactacatctgttcaacaatctttaaaacaatgtttgaactttccagcattttaaaattttgaaacaactttgatgataacattctagaaggtatgtgaaaaaccttcccaggagcatagagggctatagagacatccagtcaattggagttgtaagatatatgtatatatatatatacacacacacacacacacatatatatatacacacacacatacatatatatatatatatacacacacacatacatatatatatttgataagtacttttgcaatgtgcctcttttaaaaatattttgttctcttttcatcccaactgcatctcatggtcctttagaggcatatgttttaaaaacccaatccatttgtgaataaatatagattgttctcaatgaattataaagcctttaaagtactatgttgtcatataatatggaagttataactacacttcatattaacaataaaatctatgtgtcttacttactctttgtgaaagagagtaatacataactttaactaatagaattttacagaaatcatcttggtacagaattgaagaaaattgaatgcaagtcaaaatggtaatacattttccatggattaagcccatttgtaaaaatgacagcttcctaggccatgtttattattacaataacctaaatggagctcaagtataggggatctgttcatgcattctgtatttggtactctgtgctgggcaaatgaccctcatggttaactaatcttctgtattaggccattttcatgctgctgataaagacttacctgaaatgggctatttacaaaagagaggtttaattggacttacagttctacatggctggggaggcctcacaatcatggcggaaggcaaggaggagcaagtaacatcttatatggatgatgacaggcaaaactagacttttttcagacaaactcccattttttaaaaccatcagatctcatgagacccattcactatcacaatagcatgggaaagacctgtcccaatgattcaatcatcccccatgaggtccctcccacagcatgtaggaattatgggagctacaatatgagatttgggtggggacatagagccaacccatatcattccacctcttgcccctcccaaatcgtgtatcttcacattttaaaaccaatcatgccttcccaacagtcctgtaaagtaccaactcatttcagtattaactcaaaagtccacaatacgaagtctcattcaagacaaggcaagacccttctgcctatgatcctgtgaaatcaaaagcaagttagttatttcctagatacaatgggggtacagatattgcataaatacagccattccaaatgggagaaactggccaaaacaaagtagctacaggcctcatgcaagtctgaaatccagtggggaagtcaaatcttaaagctccagaatgatctcctttgacttcatgtctcacatccagatcatgctgatacaagaggaaggtttgcatggtcttgggcagctcttcactgtggctttgaagagtacagtctccctcccacctgtcttcatgggctggcattgagtatctgctacttttccaggcatatggtgcaagctgtcagtggatgtaccattctagggtctggagggtggtggccctcttctcacagctccactaggtgatgcctcagtagggactttgtggtgatcctctgacgccacatttcccttctgcactgccctagcataggctctccatgagggcctcacccctgcaacaaacttctgcctggacatccaggcatttccatgtgtattctgaaatctaggcagaggttcccaaaccccaattcttgacttccgtgcattcacaggccgaaaaccatgggaaagctggcaaggcttgattaaggcttgcaccttttgaagccacgttccgaattctatgttggtctatttcaaccatggctggagcagctgggatgcaggacaccaagtccctaggctacacacagcatgtgaccttgggcccagcccatggaaccacagttttctcctaggtttctgggactgcaataggagaggctgccataaagtcctgtgtcatgccctggagacattttccctattttcttggtgattaacatttggttccatgttacttatgcaaattatgcagccagcttgaatttcttcaactaaaatgggattttcttttctatcgtattgtcaggcagcaaattttccaaatttttatgctctcctttcctgataaaattgaatgcctttaacagtactcaaatcacctcttaaatgctgtgctgcttaggaatttcttctgccagatactttaaatcatctctctcgagctcaaagtttcaaaatctctagggcaggggcaaaatgccagtagtctttttgctaaaacataacaaaacctgcctttgctccaattgtcaacaagttcctcatcttcatctgagaccacctcagcttattgttcatatcactatcagcatttttgtcaaagccattcaacaagtttctaggaagttccaaactttcccacattttttctgtctttttctgagccctccaaactgttccaacctatgcctgttacccagttccaaagttgcttccccatttttgggtatcttttcagcaacaccccactctactggtaccaatttactgttttactccgttttcatgctgctgataaagacatactcaagattgggaaatttacaaaagaaagaggcttttaattggacttataagtccacctgggttgggaggcctcacaatcatggcagaacaagtcacatcttatgtggatggcggcaggcaaaaaaagagcttgtgctgagatactcctgttttttataaccatgatatctcatgaaaccatccactatcctgggaacagcatgggaaagatctgccccatgattcaatcatctcctaccgggcccctcccacaacatgtaggaattatgggagccacaagatgagatttgggtggggacatagagtcaaatcctatcatcttccatcatcacatgactaattgaacaaaatgtgtatttaggatttgggagttatatctgtggctaagctgatatgtttaatttcctaagtctcatatataaaaataaaggttatatgaaattctatgttcctagtgaggttctttgacaccagtcatccatttgtgtagtctgctttctgtgaatagagaataatatatggtctctaagatctattggttcatgttctatatgttctattcccattcaaattctaaattcatctgaagtctaaaattatctcaagatggagctaataatagttttcatagccaggcataagacaatagactttggcataattcacaaatttagctatttattgaggaagaggtgctagtagccataagagttataaaatgatcaagatcgtgtccttgaagaactcaaaatctgtctttccaaacaaattccaatataaataaggcacaggtagactctgagtggtactgttacaaagaagggaaacaaagcttggtgtatcgatgagaaacaataaggaaaagcttctgaaaaggtcaacacttgaactacatctaggagaataattaggcaatagtgaggccagctcctgtcattaccaggactgcagtatcataaactaagagggaaaaatggtagaaaatgagtctggcaattcaggtagttgtcacatagacaaggtgaatattttatattttgttatttttgttttttgccattttaagttttatacttaatgaagtataattttccctagaaaaaagaaaaatggttaggttttttttttgtttgtttttgtttttgtttttttttttttcctatgccttgacaagaatagcagattgcaattgttaggaatgtgtcactttaattattgtaacttttctttgttttgacttctatcttggctaattttctcctaacttgtgacaaagatggcttttggcatcatcagaattgtatccaataaccttagactacacaagaaaatgttttggttttggttttgttttgtttccaaatattacagaaaaataaatagtttggagccttattgctctggtttgggtatctgcataatactaaactaaccattagagccaaagggttgaggttggaggtaaaatgttctggtctatcaaacgttggacatttgtttctcctcttccttagattcagattttgtggtggatgaagtaatatttcagaattattatcaaattcattgtacctccaggaaaaatggaatgagagaataaaatggttatacaaccagggcaaagagatatgtgtttgataattcatatggtttagctctgtccttacgcaaatcttatcttaaattttagctcctataatccccacaagtcatgggagggacccagtgggaggtaattgaatgatggaaatgggtgtttcctgtgctgttctcatgatcatgaataagtctcatgagatctgattgtttcacaaaggggagttcccctacacaagctctcttgcctgccatcatgtaagatgtgtctttgcttctttgacttctgccatgattgtgaggcctccccaggcatgtggaactgtgaatccatcaagcccctttcctttatacattatcctgtctctagtatgtctttattagcagtgtggtaacagagtaacacagtaaattggtgctaagagtagggtgctgctgttaagatatcaaaaaatgtggaagtgactttggaactggttaacagggagaagttggaagagtttggagggatcaaaagacaggaaggtataggaaagtttggaacttcttagagacttgttgattttgtttttaccaaaatgttgatagtgatatgaacaataatatcgagactgaggtggtctcagatggagatgaggctcttgttgggaacttgagcaaaggtgactcttgataaatccttgcaaagagactggcagcattttgctcctgccctagagatttgtgaaactttgaacttgacagagatgatttagggcatctggtgcaagaaacacatctggtgtgtttttaaacagcacagtattcaagaggtgatttgggtgctgttaaaatcattccgttttatgtatatattcacaaatatatggttggaattggaacttatatttaaaagggaaagcagagcataaaagttcagaaaatttgcagcctgatgatgcagtagaaaagaaaatacccatcttctgaggagaaattcaagatggctgcagaaatttgtgtaagttacaaagagccaaatgttaattgccaagacaatgaggaaaatgtctccagggcatgtcagaggtttttcacagcagtctctcctatcacaggcctataggcctaggagaaaaaaatgattttctgggctgggtccagggccttgccactttgtgcagtcttgagacttggttccttatgtcacagacatagcaaaaggggccaacatacagctcagactgtttgcacccttcagagggttggtagcttcaagccttggcagcttacaggtggtgttgggcctgtgggttcacagagtcaagaactgaggtttgggaacctctgtctagatttcagaggatgtatggaaatgcctggatgtccaggttagaggtatgctgcagggatggagccattatggggaccctctgttaaggcagtgtggaagggaaatgtggggtgggagctcccacacagagtccctactggaaaactgcctagtgaatctgtgagaaaagggatacagtcctccagaccccagaatggtagacccaccaacagcttgccctctgcacatggaaaagccacagacacttaatgccagctgtgaaatcagccagaaggagggctgtaccctgcaaagccacagaggtggagctgcccaaggctatgggagcccacctcttgcataagtgtgacctggatgtgagacatggagccaaaagagatcattttggagctgtatgttttgactgccctcctgaagtctagattgcatggggcctgttgccccttcgttttggccaatttccccgatttggaatggctgtatttacccaatgcctgtacccccattgtatctaagaagtaactaacttgcttttgattttacagcctcatagatggaagggaattgccttgcttcaggtgagactttggactatggacttttgagttcatgctgaaattagttatgactttgaggaactcttgggaaggcatgattggctttgaaatgtaaggacatgaaatttggtaggggccaggtgctgaaatggtatggtttggctctgtctctttccaaatctcatcttgaattgtagctcctataatccccacatgtcatgggagggacccaatgggaggtaattgaatctcatcagatctgatggttttataaaggggagttctcctacacaagctctcttgcctgccaccatttaaaatgcacctttgcttctcctttgttttccgccatgattgtgaggcctccccagcctcacaatgtggaactgtgagtccattaaatctccattctttataaattgccaggtcgctcctatgactttattagtggcatgagaacagactaaaacaataatatataatttattatgtattttattatattataaataatttattatttataataacgatgagcttatttcaagtctacccttatttggttggtttgaaggagaaatatcaatgttaaatgtacccatgaaagtttctcagtgactatctggactccactcatagatgacccttattaaatgagacaaacatggatctcagaaaaacagtggctcaaattaaattattgtttctaaaacacaaagggtaatttttcatgaaaattttcttaagagttacatatattcagaacagaaacaaacaaaaaaaaacctatcagttaatgtggccaaccactgtggaaacaggcagcaataatgaccaaagtacctgagttcctgattatgtttacccattgctttattttaatgtctcattattaacgcctagatatgtgcttctctcttggatttctggctgaggaaactgttattataactgtttactttggaatgcaaacacatgtttaaatgttttttggaggaaaaatgtatactacagatctaaggccatatcaaagcacatttgaaatgtccaggaagatagtaaatgtcacattagcagaaccattatctggtgttgaacaagcaatttgactatttgatttatagcacccaagaagtctaaatctatctgccacagctgactaatgattgtactccaaatgcagaaggcagggtgctattggtaggtgagtggaattgtagcagtcctaaaggaactaaatctaatgtacaaagaagcataactgagacctggaagccagggttgggataatatattagtgattgatggcaatgtctgctttatagtgatagaaactgtaacacttataaatcttggttttgaaaatgttacatgagaatcaccacagaaaataggacagcttctatacaatctagctcaaaaagctcatgcttacaacatttgaacaactgccaacagttatcttacatgtaatattttggactgagaaggtgtgccaaatatgaggtttttgataatgtgtagctgaacatgagtttaagaataattgaataattgagtggaaagaaagtggagataacaagcttttttttcaagaactccaattatggatatagttataaatttagaatggtgacttgaagaaaatacagagttcagtaaaaattatttaattagcaagttgctaatcatattttcccactgagaggaagaaaaaaatgaagaagagaatgttaattagttaagataaagccaatttagatcacattagaaaagcttacagctctggacgaaattaggcataggtatgtatgtacctttctatgagagacaagaaaaggaattcttcatacgtataatacataggaaaatttgaaggaaaagtgaataaatgtgtcaatgttaaatcttttttaggtagagtaaaaaaataagattatttagcaagggatatataaaaagtttgctataaaattaaggtacctattaagattacaaaactgcagggctaggattacattttcttcaccaagggagtgccttcagatttttaatctgtaaaataaagtcaaataagacaaactatgtacaaaagtactagcaaactctttttaattataaaaatcggtcttattttatagatgtaatcttttaaattataaaaattggtcttattttatagatgtaatctttttaattataaaaattggtcttactttatagatgtaaccaaaactatacataagtcaacatcaatttagccttaaccacatttacactgatggcatagatatatttacttgtgattgcatatataaaatacatctaatgctcttatgtgatgcattcgatatcataggccgtattgattttagaggactaacccttaaatgcttataatttttttttaaacttcatgttgaaagaaagcatgaaaaggaaataattcttttttctaaagttccaagtaaccttgtaaacatagtttaacatattgtttttcccaaaacaagtgactggagagctcttttgaattatttatgctaaccatctgttccttgcttatcatatcttccagaacagacaaatctcatggccttcagacgttagctactactacttctagatgagcagctgctttcttattaaaaatccatactgaagctgctcattctaaattggtaaatttcattagtatctccagggcttcagttgaattaatctacataaacagcattcttcttaaaaacaggtgctcaagtggcttatcccaattctatcattttaacaatagtaaataggaaaaaaaatcaggtttcttgctaaaacaaaatagtacgattggttttattcactactgcttttcgttttgaaaacaaagtgtagttttcaacatatggtactcttatgatactgccctaatcaaacagtgatctcaatatagaaagtttcaaatggaattaatattttcacagtagtttttctattataatattaagatgatgcactcaaataaaaatgttttctgatcagtctatgtgtcctagggctgttataaaaattgtcacaaagttggttgcttgaaaaaaaatattttttcacaattctgggggccagaggtccaaaatcaaggtgtcagcaggagcactgtcactttgttctacaggagaatactttcttgcttcttccagcttttggtggctttctgcattctgtgattatgcttacagcaatccctgcctttggggtcatgttgcgtcttccttttctctgcatgtacttctccatggactccctgttataagattacttttcatagccttcagggaacatctggataattcaggttaatcactccatgttgtcaaggaaaaaaattgctttgaacaacttagacaaggaaagctttatttaagactattgcaatagggaggagagatttacctcaagtcatttaaacaaaaggtggggtgagttagtggaaaataccggaggataatttaggggaaagttggttagtgttattaggccatctgtgtttgcttcttgttacccacagaagattggctcttaccctgggagataggagccctatattttttacgattacattttaaagagatggctccctggcccttgagaaaaacgtttctgattataaaactgtccagagtctgggagtagatttgcatctcaaaggaacagggaaagagtttacagttgaaagttttctaaagtaaaggctctaattaaagggaggtcaggagtttataatcattcataaatctgtctaaagtttagtcaagctgaggggaagagtaaggcttctaagtcaatgttgagatccttaacttaatcacatctgtaaagatgtgtttgctaattaagttaacatttgcaagttccagggattagtacatgtattttttggggaggggcatttttcagcctaccacaatcaccaaaatagtaaataaaactgataactctctttatactcatggctcttaaaagctcttagcagttgaatacttgagagagtaaaaaaattacgtatactttcacaacagaccaaatcagtttctttatctttcacaaaactgaattgcagaaattcctgcttgggcttcacacattacctctcatctcttctaaaacatcatcttgttctttgtcaatttactactttgtatgactatttttttttaatatcacaaacacctcctcatttcttcctccatattgatagtttcttctaaggaagcccattaagtcattcagtgccactcataaaccattccactcaggattttcagaaagagtaaggaattcacaaatctaaaataatttaaaaataaatcaaattaacaataagaacatttggattgccttggagtcattcatctttactttctgtacaaatattgcacaactgacttctgcataaggcagacatgttttgaggggcataaagtttactatatcactcaccaaatgaaaataaaaatataaaagtttaagcaaaacataaaacaacaaattaaacaatacattattaccccgaatatttccaatctcggcttttggctgttgtaattcagttacatcagttcttcctcatgtgaatcaaagcccaaccagttttattgagcctggtttgcagaaacaaatctctatctctttatttattactatgtatttatcctgttgtcacagtttaatatttttttcttgcatctagaaaatacactgctaatttcatttcacccttttcttcaccttggatcagtgtttttgagggtcatagagaacttcttgcataggtaatagttatctttactgaaagttttcattttgggagactttattatgcttatgccaattgcaaatctaaagagcaggcttccttgaaaaaaaaaactaaactaatatcaaacaggacatgttggcacatgctggttcatggaacatataacaaatgaagaattatttaattttttcgattacattttatttaaagaacaccagtttaatgtttcttgttttactaatagcatttttaatgttccttagtgattcagtacactaatcaacactgtataggtttgttttaaagagtacaagattgatttgatctaaaattatcatttgaaatcaaacatgaagcttaggactttaaagattatttttacttcaaattcactttaaaatattttttaacatgcttaagccttttttaaaagcaaagagataaactgcttatttgctatctactttgtttataaatatgccctgtgaagtattggacagcagatcagattgtaaaagcattcagagcccgtatttttggaactcaacttcagagcatgtttgcaatagcagttgtttgtagctaaattagtgaaataataagtcaatttcagcaaggacagatttttttttaaatcttgaaatgtataaacattaagtatatcatttgatttaactaacatattaattatatgttatacttctatttttaaacctgttttattcccttaatgcagtaacaagaatgtaaaaattgattttaaattggggagcaatgttgaaaactatattttttccgaaacataaatgcttataagaatatgtaagatttcaatgcaaattatgccttaggacactggttctcaaactttacttcatttgcaactcattgagattattaaaaacacaggcacacatacgtttattgcagcactatttacaatagcaaggacatggaaccaacccaaatgcccatcagtgacagactggataaaaaaaaatgtggcacatatacaccatggaatactatgcagtcataaaaaggaatgagatcatgtcctttgcagtgacatggatgaagctggaggccatcatcctcagcaaactaacataagaacagaaaatcaaacaccacttgttcgcactcataagtgggagttgaaaattgagacctcatagacacagagagtggaacaacacacactggggcctgttgaggggtggaggtgaggggagggagcttagaggatgggtcaataggtgcagcaaactaccatggcacacgtatacctgtgtaacaaacctgcacgttatacacatgtatccatttttttcctttagaagcaataaaaaaaatgcctgtattatagctctaaatttaatttgtataggatgaaacctggaaatggggtttttaaagtctccaggtaatgttaatatgtacctaagtctgagaagagaatcattgttatagaaaactatttttcttgttgaaactgaatgattgatgattgttaagttttatctgtcaagtgagggaggttgcctcttagaaactagtgtgtctgctttataaatgcagttaaatgctttagctctgatttccaatgcaattgaccataaaactatcctcattatcgctttgcttacagatcactagttcataatgcctataatatctgctatttgcatttaaaaatcatttttcactgaagttgatatgtaaaagattgtgacataccatcctattctatttggtgaagtgaataaatttgtggaaagaaaaaatatattttagtggaatttgatgatgaccaagtaattttataaatatataggtatgtaatattaaacacaaagttaactgttgagggtgtttttaatcttagagaccccaatacagtaagtattttatttcaaaaaaaaacactttgattttccctatgtcttataatttactttattttcctgattaacatgatattctgaattctgataggcaagaatcagtatgctctacagtagaaatatgtagttattggtgaggagagtatttttttgtattatcaagacttcacagagggagcagagcaaggtggcagagtaggactgtcaagtgattgtaccctgcagaaacatcagtttgaacaactactcatgcacaaatgtacctttaagaagactaagaaaaccaaatgagagatcatagtacctggttgtaggaaagtattaagaaaatatgcatttaagatgggaaaaagaacactttcacattacccacatcacccttcctccaaaaccaagcagtcctgtgtgaaacgggaggctgtctgcttggggaaaagagaagggaaatgagcataggactttgcattgaacccaaatgctggcctgccaaagtaaagcccagcatttgcaaaaacctgatagccccctattccaagccagtaactgtaaactaagtttctgcgccctccctggtgccaggaaagaccaaataatcccaggatgaaggcttgcttggtgaattcagtctccagccttcatcatcaccaactaatatcattcgcccaaggtcccaggcagccttcagcacagacagaactcaatgtccctaagcttctggctctcctcagtgccacaactgttgtaatgtatcccagacttttggcagtgccacactgactgcgatgcatttggcttcttatgtgccccagtactgaaataaatgcagggcttttctagaaaaagctagtctataaagtctaagtacctgtatcttacaataacacaaacattgacaaacaaccgcaaggatcaagaatatccagggaaacatgacatcatgaaatggacaaaataatatggcctaaagaaatggtaattataaattgtctgataaagaattcaaaataactcttttaagcaagatcagtgaattttaagagaatctagataaaaaaaatcaatgggaaaaattaaaaaaagtgagtagaatgagaaatttaatagatttaaattaaaaacaaagttaaacataaatgttgaaactgaaaaaatacaattaacacaatgaaaatgtgaaaaaaagtatcaacagcagaattgaacaggcagaaaaaattgtaaatttaatcacactttatttgaaaatatatagtaagaggagaaaaagaaaaaataatagaagggatgaagaaagcttacataatttttgaaacagcatcaaaagagaaaatgttcaaatcatttatacattagacctactaagactgaataatgaacaaatagaaaatctgaacagacaaataagtaaggaaattgaatcaaaaataaaaagtctcctgtccaagaaaagccctaaacctgatggtttcactgttaagtactgtcaaacttttaaagaacaattaatacaaattcttctcaaacaggtcccaaaaattaaagaatagagaataattccaatcacacttaacaaggccagcatcatccttatagcaaatccaggtaaagacactaaggaaaacaaaattataggccagtatttctgatgaaaacagatgcaaacattctcaacaagataccagctcacgcctgtaatcccagcactttgggaggtcgaggcaggcagatcatgaggtcaggagttcgagaccagtctggccaataaggtgagacccccatctccactaaaaatacaaaaattggcctggcattgtgggaagctcctgtaattggagctactcaggaggctgagacaggagaatcgcttgaacccaggaggcagaggttgcagtgagccgagatcgtgccattgcactccagcctgggcaacaagagcaagactccaccatgtgaaaaaaaaaaaagataccagcaagccaaacatgacagcacattaataagatcatcattcaccatgattaagtgggatttatcccagggatatgagataatccaaacaatacaaagcaataaatgtgatacaatacattagctgaacagaaaagaaaaaaaaatgatgttttcaatagatgcagaaggtgcatttgacaaatttcacatcttctctcagctctcaactaataaggtatagaagaagttaccttagtgaaataaaggctatatatgacaatcccacagctagccttgtattccatggggaaaaattgaaagattttactctaaaaccaagaaaaagacaaaaagactcttgcaacttccattcagcgtattactggagatcttagcaagagcaattaaacaagagaaataaataaaaggtatccaaattataaaggaatatgtgaaattgtccctatttgcagacaacatgatctatgtacagaaaatcctaaggactctaccaaataaatgttaggaataataaacaaaagattaagttgcaggatacaaaatcaaccttcagaaatcagtagcatttctattcaataacagttaattctctaaaaaagaaattttaaaaatcacatttacaataggtacaaaaatgtttaagaataaatttatccaacaatgtgtaatatctctacaatgaaactataaaacactgataaaagaaattgagaaagacagaaataaataaaaaaataccctgtgttcatgagttggaatacttaatattgttaaaatgtccatactacccaaaacaatctatagattaaatccaattcttatcaaaatatcaataagatttttcaaaaaaaatagaaaaaaaaactgaaatttgaacgatactgcaaaagcctctgaatagccaaagcaatcctgagcaaatagaacaaacctggagacatcacactatctgacctcaaaatacactataaagctgtagaaaaaaaagaaaaacacaaaaaacatggcactggcatggaaatagaccaattgaatagaaaagaaagtcctgaaataaatccatgcatttacagtgaactactttttggcaaagatgccaggaacatacaatggagaaaagacagtcttcaataaatagtgttgggaaaactgaacatctgtacagaaaagaataaaattagaaaattttgtcacgccatatacataaatcaagtaaaaatagattaaataattaaatataagacccaaattatgaaactaataggagaaaacacagaaaatacctccatgatgttggtctggtcaatgggtttttgcctatggcttcaaaagcacaggcaacaaaagcaaaagtatactaataggattacataaaaataaaaaaatattctgcacttaaaggaaacaaatcatagaatgaagtgaaaaccagtagaatgggagagaaacatttgccaactatacatctgataaggaggcaatatggaaaatataacagtaactcaaacaacttaatagcaataaaacaaattagccaatttaaaattgggaaaaagggacctaaatgaacatttctcaaaaaaagacttatgaatggccaataggcatatgaattaaatggtcaacatcactgatcatcagggaaatccaaatacatatataatagtacttcacccaggggtttgaaaagcccttgccctaagaatgttggaatctaagttctaacacaaactctgcgttttcactggctgttattctagatcacacagtttaatactggttaattatttgtaaaaggaagatacagatctatttcagagtgtccaaacctaaccagactcatctaggaagtcctttaaaaatatagaatcctggttccctaggcacaataaatcttgaaactgggagaatatgatttttcttaaaaagagttattttttttttctatttaccataccactttaccaagcaccacttctgaatttggagaagttatattcctaacataatgtgagtttctgcccatgaatttttaaatgagtaaactgagtttaattaaccattttatttattgagacgtgaggtgctaaagattaaaatgtgaaataaatagggtttgtgttttggaaaggcactcaggctaagtctggtaaaggaaacagaatgaatgaatactgtgaaagtaccaagaagaacctttatgtttattgaccttttggctcacaaactcagacttcaccatgcactgttgtgaaaagatgtggcctttattttcgtattttaaatccacaatatattttatttcctggatctaggcaaaaaaaggtgttttataaatatacctgaactaattttacttttttgtttgttggtttgtatgtttgttttgagatggagtttcactctcgttgccctggctggagtgcagtggtgccatctcggctcattgcaacctctgccttctgggttcaagcctcagccttccaagtagctgggattacagacacctgccacgatgtctggctaatttttttgtatttttagtagagatggggtttcagcatgttggccaggctgatgttaaactcctgacctcaggtaatccacccgtctcggcctccaaaagtgctgagattacaggcttcagccaccgtgaccagcctttactttaatttaaaaaatatatatataaatgaccaagttgacaaacaataattgtatatatttatgggatacacagggatattttcataaatataatgtatggtgtcagatcagagtaattagcgtattcattatctcaaacaaacctctttcctttttgttgggaacattcagtaatatatagtttcaaatagctagaaggatgatattgaatattcccaacacaaagaaataactgtacttttaaatatccttttaaagtctattccttttgcttgtagactagataattattttatcgttgtacatccctgatagggtaactctattgcctgcagatgttttattcagctattatacatttttagatcaaatatttgtatttgagtactataatctagtagatggcattatatacattcaagatagaaatacatgcaggagacatggatgtctacattatttctactaattttgcacctttgtaatctatgcaattataacttcttagagtcaagtgggtagatttctgtgccagcttagccaattttctatttatgtataatttacaaatatgataatatctaagagattcaatttattcttaaaatgtgggtttgtgacttcttgttctttgttttttggtctgttttcttttttgataatagctatcctgagagatgtgaaatgttatctcattgtggttttgatttgcatttccctgatgaccagggacttgagcattttttataaacctgttggtcatttgtatttcttctttggagaaatatctattcgagtccatttttcaattagattattggtttttgactattgagttgtatgagttccttattgattttggaaataaacccattatcagatataaaatatttgcaaatattttctcccattctatggcttgcattttcagtctgttgattatttcctttgctgtgcaaaagctgtttaatttgatgcagtcctacatgttcattatgttgttgttgttacccaagcttttggtgtcataactacgaaataattggcaaggcaaatgtcatgaagttcttcctctgtcttcttttaagagttttaaagcttcaggacttaagtctttaatccactttgagtttatgtttatgtatggaatatggtagggatttcattttttttctttttaaaaaataatttctacttttactttagattaagagagtgcatgtgcaggtttgttgcatgggtgtattgcttgatgctgaggttagggtatgattgatcccatcacccaggtagtgaatatagtatatgataggtagttttccaaatcttgtctccctccctccttcccacttctagtagtactcactatctatttttgctacgtttatgtacatgagtgcccaaagtttagctcacactatacgtctatacgtgagaagacaaagtattttttttctgtttttgcgttaatttgcttagggtattggcctccagctgcatccacattgctgtaaaggaaatgattttgctatttttatggctgtatagtagaccatcatttatttggaccacattttatttatctaatccatcattaatgggcgcttaggttgattgcatgtctgagctattgtgaaaggtgttgtgatgaacatatgagtgcatgtgtctttttggtataatgagctatttccttttgggtatataaacaataatgggattgctgggtggaatggtagctctgttttaagttctttgagaaatcttcagatggctttccacagtggctgaactaatttatattcccaccaacagtgtacaagcattctcttttctccatatccttgtcagcctccttaaactaaagaattttagctaaaaactattacaatctatgtaaaaatcaacatgagactttaagaagtgcagagacattcacattctggagaaggactataggacatgagaagaaatacagctatcaattctttggagctttgttgttgcttttttaaaatattttttgcctcatatatcatgcactatatatatggtacatgctccagaaacttgaaaataccaatgggaacagacaaaagaaaagtctgctctctctaggcacagaatcaggaaagtggcaacctagcaagatagacaacaattgtcctgctcctgccaaacaccacataaaatgctgcagccctaacctactcctgtcattaaaggtcaagtagggagtctgggtttctgcctttatcaggctatcctgaagtgctccaaaccaccctattgtggtggtatgatagaaagccaagtggggagcctggactttcatccccaccgagtggtaatgattacagccatctacactgtgacaaagaacttctactggaaagtcagaaagtcaggacttttctcacaagctcaaaccccagcagtatcagtggagatatctgcagagcattaatgaggcatccatcccccattatcaggatggtatcagcaaaaacctcatgggaaaactgacctaacacccatccttcccagctgtaatgagaagctctgttccccaggtgtttcaatggaagacaaatttggaacttaaaacttcaatgctaacctgcctttaatctgtcattatctttattccccctttgagcagagtcagacatgagttacaaaaacacatttaaataagacctagtagttcccaaataatacctaaaatttgggaattttaaattcccaaatttaatttttttaaacttaaaatttaaattcccaaatttcaatttaaaattaaattgaaattacttacatgaaataccaaaacatctcaactgagaaaagagcatcaaaagatgccaatgagaaggtaatacagttgctagaattatctgacagagattgaaaaagagccatcaaaaacatgcttccttgaaaattatgaacatgcttgaaaataaagaaaaaatgcaaagtctcaatgtgacaagttagactgattgctaagtcacaggtaacagttctcacagtgtacttctacgctcatttatgacaccaactgcaacttaaggagttttccaaaacccccctcaattttgataatttacttgaaggacccacagacatcactgaaggttatttcacttacagttataagtaattacaagaaattgatacattttaaagtcagccaaaggaagaagtgtatccctcacaaaggcgtaattgattattttactgtccatatgattgatcttagtctccaggtcaatggatactgtgtgaaccaaagctcccacgctacatcacattgtttgtctttctggtaagggttttcctcatgctaaatattatctgatgtgcctagcctcttgcataaataactctgtagactattttgaataactcaaatcttccaacaaaggaaaaacactactatcatgcaagccagagattacctcgctgagctgaacacaaaggccatacctgctgtggacaaggttaatttttttaaaatcaagcagtcaacaaagaaatacatgttataaaataaatgccaaattgagatggtaaaagtaaaaattgtaactaaaacagaacaaaggataagctcaacagaagaattaataagacaaggaaagaaatatttaactggaaggtggaacaatagaaattattcaatctgaacagcagtgagaaaatattctgaaagaaaataaatagagcctggggaacctgcagtactctaacaaaagatccaactttcttgtcatcagaagcctgcaagaagaggaaaatgaagaggctaaaaattagtcaaagacacaatagcagagaattttcaaaatttggcaaataaatacataaacctaaagtttatgaagttgaaagaatcctaaataggataaacacaaagaaatccacaccaagacacacaacagtataatatttgaaaatacaaagaaaataaatcttgtaaacaagggagaaccaacatttacctataggtagaaaataattttaataattttgatcaaatactatgaggatgagaaggaagtgacatttttcaagtgctaatagaaaatgctaactatgattcaatatcaagcaaaaatcttctgaaattgaatggattttagtaggtttccaatgaaggaaaactaagataattttgtcactaaagacctccctaaattaatggctagcaaagttccctaaacagaaagaaataacagaaggttaaaaaaacaaaaatgggtaaataaaatcaactttcattttcatcttgtgttttctaaattacgtttggtggccaaagaaaacattataatatggtctagaatgatcctcaatacatgtagagggaatatttaaggtaattacattataaatgaatgagagtaaaggaacttaaaggggaggtaagttttctacaatttattcaaactggtaaaatacctacactagtccaccatgataagttttgtacgcatagtgtaaaacctcaaacagccatttaaaacaaatacatacaaagggatacattctaaaatactacaggtaaatcaagtaaaattttaagaaaattttatgcatagaaaagcaggacaaaaagaaaacggaaagcaaaaacaaggaatgacaagagaaaaaaataaaatggcagactcaagccttaacatatctaaaattacatgaaatggaaatggtttattttatttacggtagtcaaaaactagaaacaaccaaaatgttcctcattatgtaaattattacacaaagtgtattgcacataccataaatttatattcatcaataacaagaatgaacattttgaatgtatactggtacagacaataactttgatgtatcgtgagggcattatgataagtaaagaaaaaagccaattagagaaaaccatgtattgtctgatttcatgtgtattacactttcaaaattaaaaagttatgaagataaaaacgattgggtagtgtttgccaggggttaggtacagttggaagtggagggattgttgtaactgcaaagaggtggaactgagcatatctttgtagtgatagaatagtactgatcttgactggtatataactatacacataaattatgcctattaatttcctgtttctgatattgtgctttactgatgtaaaatacaatcattagtagaacctggatgaaaggtacagaggattatgtctgtactttttttgtaacttcctaggaattgttgttattttaaaataaaatgttaaataaagacagcttagcaccaaataatgacgtgttatataaagtttttttaatatttaaatactatggctaacacactgacttctaaagtctttgaaaaatccattggagttagaatttgttggtactataattttgagtagctaataatgagtgacttgttaagcaatttatttatcaattcatttaaacatcacaaaccttcttaggtggctactttattacttgtgagagtacatagcttccctcaatttcttcatattcctgtaaaacgtcttacttattatcctaaaaatatatcataagtattatatctacagcattttttccctatattgggaatgaacttttctgatctaaaaggatactaaaacttcttttcaccacactaagtccacatagttgtagctcacactcagtttcatgcttaaaccccaaagtgccagaaagacagtaacagctatatctatagaagtgcacatttgaaggaggaataaagattctgaatttggatacacctctaggttgtgaaactgtaatgtaaaatgtgagacacatggggttatctggttcctagagagagttcattaatataccaaacaggtgaaattaggatttaggcccattagatcctttgaagtaggcagcaggcacgtgctctttcccttttgtgtgcagaacaattattttctcctgtccccaggtcaaaggcatgttgggttatttgcagaagaaaaaacaaacggcatcaacccttcttatgacaccacagcagtaaagattagggaaaaggagggctgacacattatttaccaggaataccacgtgaactcattccagtaaaatgagtagtacaaacccaacattattccactttacagaaaaggaaactatgtcacagataggacaaagaactatctttaaggtcagatggttgctgagtgatagtgcagagactaaagcctaaatggctcagcttgagagtctgttcattgagccactaccccataatggagaaaggggaaaaaataaatttaacagatcacaagctgatagtagataaattgtcctaactatttcccacagcagatgcattttactggaaagactattcactttatatgcaaagcaaattttatcttgttttcattgagagactccttggagaattttaattagactgctgaaaattcagtattcattttaataatttaaaataataaaatagagcattaataattactgctttttgttagggacagacactgggttgacaaaacagtgtagaaaaaatggaaagtcaagacctcggttgacaaaactataaaaagagacttgggaatatcacatttaagattacaaacagtcttttggggttctcaatataattatgttttcttcattatttttcaagagtgttaattgcctactagtaattaacttcccatgtgactgtcaagaaatgtaatcaatagtaaaagcagagggaccaagctgtcattgcttctgtgaccaatatctttttctcacccctggcaaggtgtttctattttaataaaatgaacaggtgcagatgtgggagatttctccagaaagccactagctaaatcagttcatctcatagttctaaaattaaaatgtagccaatcagaactttgaaatataattgcctcattttccaacttaaatatattaagggcctcctgctagtgctgcacctggcaaatctacttattaaagttatgaaggaaagagtttgctgagacgttttaaatattatgctgacattgtaataaaagaaaggagaaaggtaggcgttatctaattctactgatgtctgctcagtttagaatatattgttatttctaccaagctgataatcaaatttcattcatggaaatatttcaaataattctgtataaaataaaacctactgaatttaaatgcattacctcccttatagttcttcaatttctcttgacttttttcattactgagatattgttttatcatttaactcacccaattttttaaatatttcttttttagcaagtctgtttcctttcatctctatagtggttgcctgtatatttataggtacttatgtaagtgatgagtagaggctgtaagaaaaatggaattcaatttctatcactctgctggcaaaacagtcatgtatgctctgagatgtgattaatcttcatcagcaaacaataaatacatagaaccagtattcaggtttttagcatcaacatttttacctaatttcttagatagctttctctactcttctagatcctatacagtaataaaacattgaagttttgactggcaaaaaggtgcatttatttgtgtgtggcattacaaccagcttatacaaaaacaattgcactggttaagtatatttaaactgcaaatgtttataacactaacaataataacaacataaactaatattcagaaagaaaaatcaacatatattgaaagggagatgagttaaaaatataaatataataaatccagagaaacatattgtgtaccaaagcagtcatctatgatatcctatctttctacacgatttagaaattataggtccatagtactacgtacaaaacccttgggaaaaatgtgttacataatttataatatttcatcttttagaatgaaaatatgatacaaatacagtctcttggtatccaggggttccaggaccctgaaaggtaccaaaatacatggatgcttaagtctcttatataaaatggcataatatttgcatatatctgacacaaatcctcttataagctttaaatcatctctagattatttataatacttaatacaacctaatgctatgtaaataattgttatactctattgtataggaataatgacaagaaaaaagtttgtacatgtacagtacagatgcaaccattttttaaattttctattttccacctgtagctggttaaatccacagttgtggaacacagttaagaagggccaactgcagtgcgtgtgaaataacattccaatttgtttgagattgcatcataatgcattaggaaagatttattcccaagagaacttaggtaaaattagccttgattgtcaaattaattataaattttggttctgtttttagagcttatggggtattggtattgtaaatatcggattgtagagtttgctaacaatacatgctctttctttttttcaataatttggtaaactattttaccttatttgtttaaataatgcatttagatttgttatcactacgtaaccttttctttcctgactattacagaaattgtgctagaagtaggtgctcccgggccgggcgtggtgcctcacgcctgtaatcctagcactttgggaggccgaggcgggtggatcacaaggtcaggagatcgagaccatcctggctaacacggtgaaaccccgtctctactaaaaatacaaaaaaaaaaaaaaaaaaaaaattatccaggcatggtaatgggcgcctgtagtcccagctactcaggagactgaggcaggagaatggcgtaaatctgggaggcagagtttgcagtgagtggagaccgcgccactgcactccagcctgggtgacagagtgagactctgtctcaaaaaaaaaaaaaaaaaaaaaaaaaaaaaagaagtgggtgcttccatgacaaaccaacaaacaaaaccatgaagattttggcctagtagtcaattggagatgtagcaaaaaaatatgtcagctcatgttatcctgtggtaatacagtcatctgcaattacttgcaagggaggccatttgccccatgcaattttagctccatagaaagaggttaagaagcaaagcctttgtgttttgggttgatgactaatggctgtgtttggccatgtgttaaaagaagcagatgagctctctttggtacatgaaacaaagtcagagatttcatttctccagagttaaaagagctaactgcttcttgaccccaagcagcaaaagtaagaatgagaaagcctaagggacacatgttctgcaaaggatcacaataagggtgtggtcttcatttaaaaccttgacagctttaacgtagcccgtcccttcaggtttaagagaagcagagatgaaaaaaaggtaaagaaatgtagcagatccaggaactatatctgcaaaataactggaagtggggttattagtaaagggccatgattaaaaagaacctcccagaaagtaaaactacttccaagtgtttttgactgttaaattaattacaaattttggttaaatccacttccaaggtacttttcatgtacctgtcacatagggtttcaggatggctactaatagtgacttcgtatctcccatttgtgtcctttacaaagggttatgtttgttgtggttattctattcctccaacattaatattggtattggaggcaaataactcatcttttaaactttgtattctaatcaacttgcagaccaatgggagccataactgaaattgattaacatactagcccacatctctcaacaaacttggcctttgcagttgatacagttatggtacagttgggtcatctttcctagggaagtgtggagtatgttctttatgtgcaacaatgagaggaaaggaatatttgatatcatcatggtgaaacagaatgcctacaaagtattatactcttttattgttttctagctttcttgttgttatatggtgcaacgtgttaagttctgaaaaataaagggtgaatacaagtaaagggcatcatttacaggctgaggcagtaaaacaaaacaaaacaaaaacacatgttactgtctcttcccaagctgtgaaaaccaggagggccttatgttccagggcatgaagttagaatatagagcctccatgattcaagatcctgcagagctcaacactgatccactaaggcatgtgatgtgagaaagaaataaattgttttaatcacctaaggggtgttttgttactgcagcaaaatgtagcatctcctgaaagtcacaagaaatgtgacagatgttgatatacgatagatagataggtgatacatagatagataggagacagatttctgtttgttatgcttttcatgtcctataaggagtaaaacctatatagtaattaattcttttttaatatacagtaacataaagttttagtttttaatatattaagaatcatttccaaacctattgactgtttatgcttgtacagagaagcagcagcatttctggctaaggtctaacgtttgtatgggctccaatataaataaacacaacattcctggaaattgagagtctagtttttaggatgagttaagtaatatattgtgaactactaaaactcattggaatgtaaaaataactgtattttcattttcgttctttttattgtgccccagtctatgaaagaatatgacttttttaaagtaatatatttttggtaaatcgctattataatgtttgcacaatagtgaagtattattttactgaacatttatttggaagctaaaaatattggttctactctagatcaatccctctgataacaatttcactcgctttgcaatttgctatttcaatttaatattgccagtggtgttagacctgctattacatttattgcctagattactactaaaaatattgttgtgagaaaggagtaatattgccatgattttattattggaacacttttcttatacacaatgccaggagtctgcaaagcatcgggctctcaggccatgcagtatcatttatatcttttatgactggctctcagggttcttcacaaaggatagtaatggtgattttcagagctatggtcagagaagctcacctctacagcagataggataaatatgattcctcaattttaatatgtggtggcatatttcaggggaaaaatcacatgataactgtcaaagttttgtttctctgcctcatgaaattccaagacaatctgtagaaaaaagcaagattattgggaggatctacagctgttaaatatgaactaacatatgattttctctttattatgttaggtggtttgaaaaatgaaacattacatattaaactcttaggaatatcacaaattcctttttctttgattaggtagcatactataaatactatgaaattggtgctgcattttattatattatttcaatgctattatatataaaactacacaggtatttttaaaattagctacatattattacattctaaacaaaatatgtaaacttcgagttttgccgtttatacatatagacaggctaatgtatacaatatctcatatatatatcatatttatgtgtttataatccaatgtacatgtgtgtatgtgtgtacatgtatatgtgtgtatatatacgtatggatctatatactcagaagaactacatttttcagttttatattttttctatccatcctttcaatattactttccacagagaataactacatagtggaaaataagacacattaatgacgaggcagagtaggtaccaacttagatgttggagaaaatgttatcactttgaagctaagttcccttgacaataaaagggagtcaatagagcagagctactcttatttacttcataggactgatgaggattttaactgaagtaacatgtaaattataaagtgacttacaagcatgaaaagtgattattttgttattctttgcagccgtacttctcaaagtgtatcaggagaaatctgctggtccctgagatactttgaggaagtccacaagatcaagcctcttattataataaaatagatatgttgtttcctccaatttttacttttattctctaacaagtgtacagaggacaggtctagaatctacatggtgtgtaatactgtggaaaattgaatacagaagcagatatgagaagccagatgttttcttttattccagacactgaagaggtttgcaaaatttgaaacaatgctaatctcacaaaaaattggggggaaaatagttatattcataaaaatgtgttatttatgtgtatttcattcataaaatatgttacttatatgaaatggtttacattaataaatacgtatttaatatcatacatgcttacaaaatatcttcacaaacaaaagctctttggagtcttcaataatttctaagaatgtaaagggttcttgagataagcaatttaggaattattgctttaaagacttccattcttgctctttatttctcattttcaatgacaactatctgcatataacagcaatgaagtggtagtgccagtgctgcttcaagggcgtgaggagatgaagaccaatgtatctccctttctcttgactttttcctcatggttacagtgtggctgctccagctttgggtctgcattttactccaaaggacacaggaaagctcaataaggaataaggacaagatctaaatcataaactgaaaacattagccatgaatatatcccttcccccacgtacagattcttgcttttgtctcattggccagatggttgctatgtatacaccagatgctgcaagtagttttatatctggatccattgctatccacaacagaatcagtgttccggttgtaatgagtgaagaatgtgtgtaatagaaaactagccgcagctgcattacttgatttgttcatctgtttttaaacaggaaaataaaataaccaaaagtatgatagaaacaagggattttaaatgggaattagtgctcacatgaagatgtagagaagatgaaggaaaggaagaaggtagaaagagaactgaagaaacattcttaatccacttaatctcaaagccctgtcatgaatagaaagcttagtttgcagacaggtccgagaggttgcatgcatctggccattgtgaagttgaaaccttggggaggtatttggaagctgctatttctgggaatgctgccatttctatggaagctgctgtatctgttcgtgggagccaccatatcactgcattttgggaaaggctatgttcgattgtcgtatgttcagttatcataaacttctgaggatgatggcttccacttcctgtcagccttccacgtcccacatgactttctgtcactgataaagtctaaactggaatttcccaaggaggagggtttggggagaaatgtaccagcttcagactaatgacaatggtgccaagttcataataaacaagttagcacagctaccaattatctgtaaattattaatgccacaatctgagatgttttaatttgggaatcaataaactaaacatgaccaattagcagcatcacatgtagtttttattcaataaagtccattttctgacaaatttaagtaacattatgaaaaatgtatgggagagtataacacatagcacatttggttaattcaatccggaggaaaaatgtcttcaacaactaagaaatatggtaaataatttataaacataacatgataaaaataaagagtataatagctcttatgtacataaaagccaatatttaaatatttgagggaaaatttaactcatatataaggagttaggcatttatttgtcacccaaatcactgatattaacttattaaaaatttaatcacattgtttttatttttcatctagtaggcagttccactatatgtaaaactactgcaagaaagaaagacctttttaaatttatttttgatataagatcttgctctgtcaccaagttggagtgcagtggtgcaatcatagctcactgtaaactcgaactcctagggataggcgattctctcacctcagcctcctgagtagttgggactacagccacaactggctaattaaaaaaaaaaaaaattatagagttggggtcttactatgcttcgccggctggtctcaaacttctggtgtcaagcaattctcctgccttggcctcccaaagtgttgggattactggcgtaagccactgtgtgtggcaagaagacaacatttttaaaaatcagattacagctgaatgtcatagagcaaaataactgacaggtttcccattcttcctagttatgtgtagagatactcaatgtggctagtgtataatatattttatgcttgttcttaactttcctaatagttaaataatatgtgaattagtgttattttaataattattatacattttcatttaatatatgtaacacttcagtagcaacataatatgaaagacaaattatggatgaaatttcttaatttaagtactaattcaacttttctgtagatctttattcataaggaaatcactaaacttatttggcctccatttacattgactggtgaaaaggaataaaaactaatgcaaaaattaacaattggcctacaagaggagagtagtggcaagcaagtgtttcctgtttaaaagaaagggtatttttccttgaaggtattattacttgctctttaaagggtgtgaagtgttttccaccaattctctctccattagatgttgatcaacatactgttggctagttagtacaagtaaacaagcaaccaaacaatcaaaaacagcaatatgcttgtgcatgtatgctgatttctttatgtccaataaagaaacagggaactatgggtggcatctcgtcaaccacactgaccgcttaggccagggtaaaaatccctcctctgagattatctctcaccaccttcactttagctctggattcctcatctgccagtgggtacatggcttcaattgagtttcagtctcataggcaaatattgcttgtgtgttcagcaacttttctccaggcattacatagcaggcatcacacttggaaaaatttactcaacatatctaagtcatggttattgtttcagtgcagcagacattacagcaataactaagatagagagttaagagtgttaagggcctataaaaatgcttaagacttaaaaggtactgaatgtaaattttactaatgtagccatgaatatgtactactaattttgcttataactaatgatcacaggttattgcaggatattttgactagtaagtcatcaagctgcaatttacacacattataatttttccacctaaatttcatttgccattttctcatccataagttaagaaatgtatctacatttttatcttgcagttttgctttcaacctgacttctctttattcatattagtattaagtcttagaattgtaaaacatatgttatttcaactgttttttacccacttgagtcattcgtggtcataagatataaaaaaatggcttcacgttttatatgactaagctctaactgcttttccacatgaactagtctgtagatgtttatatttaggttcaatcatttccttctggaacttgttaattggttacgacatttaagaaatatatacttaattcatagtatatgtaatatgctgtcttagggctttggaaagggaaaatacaaagaaaaataaaacattgttctcaccctcagagaaatataaaattctttccttttatatttcctcaggtctattattttcctattttttttctctcataggttggtctgtcaataatcctataattcaaattcatttcacaccacatctcaacaaaaccagactgtcctacctcatggttattatgagattgaatatgataatatttatgaaaagtctaccaaacaaaagcactctttaagtgtagggaataataattttattttcctgtcaactctacaaaaatttatatttattaaggcaggagccttacttttttcagacttcgtttgttctgggctttaattaataactgtgtcactttgaacagcttgctgaaacttgcttagggaaattttctcatcagcaaaatgtagattataatgggacccacctcctaggactgctgtaaggattaaacgggctaatccatgtaaagtgctgagcacagcacatatggaaacactaaataaattataaaagaaaaataataactaacagttatttatgactaattatataaaagacattttattgttttcatagtaattatataatttcatcaacacagaattcctgataaagttgtcattattataacagtaataattattattactgtggttttaacactcaagtagcacagtgattggtacacagtagacattcaacaaatatttgttaaaatcttgttgaactacaaattataattgcccttgaggcctcagttagctgtatcagtcagcattcttgtaagaacagcatctgattgcagcagaaaggaatttatttaaagacatcggattggatagttcacagaatcaacaaaaggattggagatgctggctcagatgctatgccagaaacaagcctcaaatcacaatagcagaagtaatctcttgagggcatcaaggagcaaaagcattgcagctggcacatctgccacaccaatacagatcactgaagtcatcattatcagtaatgtcaccagagaaagcattttatgcaacttccaagatttgtacatctttcttattaaggggatatgaagaagcagttacttgttcttcattttgaagaggatatccaaatgtgcacagaatcaccagactctcaatataaataacgtttattttcagtcctcatgcatacttaaggtataggccagaagctagaatacctgctagtcgtgtttttttacatatttcacatttcatatttttcagagtatgtcattaacaaaatatgtcctgtggcacagtgagatgatctacgtccttgtaaaataaattgtagcacagatgctgagaaattacttaaacccagaatacaatgagaatctttaactcttgtaactgacatatgaaagaaaaattgtgcctgatattctctgtttacagttatagagaaaacaatttatgccagagaggaagcattatccccagtgccaagaatcatgccaatggtaaagctaccacatcaggaatagcagttttaattagaatgactctatgttgaagctttagccaacattttgagttaattggagatggaatatgaatactctcttcacaattttcaagtactgcatgcatcccaaattcctggaattgtgtcaaacatgaaaaacaagcaatgtaactctagatttatactttaagcagaaacaggaagcttcactttgtatttttgtcttaattgatcttactccataatagcttatgaagtcaatgttcttccattacaattttttactcaagtaattggaaactaaacatcttatgggttacagtctttattggcctaatgtgaagagcatataggagaaattgaatttattaccggatttttataagaccacactctgatttccagaatattgtagcataccagggccccagaaattatcactcaccattcgagttgaatatttgccatacttactaacctgtgatacaagagatgtggtctttgaaatgattcaggaatgattcagggctgagaatttgataagacaactttcttctcatgatgactcaaaccaggcctttgttgccagacctatgtcttgctttttatatatatatatatatacaaattaaataggacctcaaggcactggtcatgtatttgtcaatgcgcatgatctgattagtaaactctaaaatttctacaggttaaacatttctaagtagcacattgaactatctgtgtattacaatacctatgttcactgtgactctgatggctaatagttgctactgggcctcagtacagagggtaattatatattcattgaagtcagagctgaactgatttcacaccgattttcactctgatgtccctatcctatagacaaatgccaatacagcactcggagatactagcattccttttacccatgcatttaatgctttttcctccaataaaaaatgagcaaattcttggtagtctgttggaaaattatccttccctttgaatatttttaataagctcccctggggcataatgggcataagaattggcttcacaggggtgggaaagcaaaagtttatgctttagattattttaaatcaattccagtcatcctacatatctacccttcagttccgaggttcccatgcctctccaatcacggttctttgtaactttaacataacagatctgaaaggaatttaaattcaatcctggggtcaaagcttgttttgaagccctacagctgcaagaggtgaaagatttatttagcacaggctttgaaagtctcacattcattctgtactttgaatgggtaggaattggggcactttaagcaaaccatctctattagtagtaaactcacccacagtctttgaatttttcatgctcttcattcaattatatgcaggcatataggtccaaatgccatttctgcaacacacacttcattctaggtgggcagaggtggaatttctaatgtcaaaattctacccttaatgctgtgtaggtttataaagctttttgtcccagccagtaggaaacaaaccacatatgctctcaattttctttggaagcttttaccaaaccacttctggtatctgtacctgtataagcccagattctttgatgtaaataagacaaacaggctctagctcacttaatcggataaattcagggattttggatgacacaaccaaaatccaaaatcggataaagggattctggatggcacatcaaatcgccaagaaaagtagggaaacctactcatgtgctacacaggaaacagtaaaaaaaaatttcataggcccggcgcgatgtctcacgcatgtaatcccaacactttgggaggctgaggcgggcagatcacccgaggtcaggagttcaagtccagcctggccaacatggtgaatccccgtctctactaaaaatataaaaaactagccggaagtagtggtatgcgcctgtaatcccagctacttgggaggctgagggacgagagtcgcttgaaccctgggggtggaggttgtagtgagcagaaatcatcccactggactccagcctgagtgatagagtgagaccccatcttaaaaaaaagaaatgcataagacgtatttagtgaggtcaacactgctaactgcaatgaacaacaccatatggaactaaccaactaaccattaccattactgctgcaaacattatctcctgagaaaatttctctaggcactctctttgtctttgcattaacaacttaagatcaaaatctgggtggtacacctgtttcttctagtttaaatgatacacccaatccctccgtagttgcaaggacactgggagagtgaggacctgggttttccagcttctaagagataaggctgtatttgagtaatttctcaaacagatgaatggggtcataaacagggcaacccagtgagggacagattaattggcttgatgtattgaaatgctttaatataaaacatgatgcatctttcagagaaaaataaaatagtgagaaacagcataccttatttctggcagctactaaggaattagaatctgtttctgatttatacccttatgtacccatcactttgtagcctcataaaattgtccagttcacaagctattgaacaggcttgccatttactttatgcagcattatagtattttgtcagtttccgtataaactctatacccatggcttatagaatggtttgaatagacttacattgatgtgtggctactcaaagtcatatcagtgatttactgtagatattgggaaatttcaaaaccaatacaaatcattgaaatagtcccttagaaccgttaggagaaaaaaagttagcaaaagtaaaaaatctaccagttctactaagggttatagcgagggtcaaaatttgtgtattagtagtgctccctggaggagcaggtgccatttcagcccttggtaactttctgctattcaggacactgtctggaatttctctgtctcaacttttcttgccgtgagtctttcttctcactcacattcccacttctttcatatcttgccaattttgtatcttactgacttaaagctagtatttctgtagtgtcgaggtttttgattaacttatttgctagaattttttttttttttgccactgaaaatcagaagacaaaggaactcatattccaggaaaatgtggttctcaagaaacaagaaatagctttattagagggtgttctggttgagcaataacattgaaaacatagtttcatatttatttgtcagctttggaattagtacttagtattgcgtctaaaccaactgtagactaaacaacagcaaaacacacacacacacacacacacacacacacacacaaaaaaaaaaaaaaaaaacagccaatgaaacagagcatacttgctatgtgttcatgtatggaaagccccaaagttttgcatttagtgtgagaaagtaatactttttttttttagtttattgcttacaaaaaaattgtgttactagaatttgttatgagcacttattattttccaagaaatcctatgttcacaaacataagtagaagaaatggatttaaagtcattggattggtaatataaaatcagaaatgatcattttttgtgtgtaaaaacaaatgtttgcatggattctttatatatatatcagacatatgtttttttctatttctctttttattttatgtgccctgtgatcatcctttatgtatttcgttagatattatgtatttttctatcattgtactgaaactgttgctatgctttcataataaatttattatccatattgcattgtcatttctactgaaatacttgaattataccaatatatacattgatttaaaaaaacacatacataaaatgtgagccagtagagttttacctcatgttaacaagtaattaaataatgtcattttatttaaatgtctgaagccaggcactgtaggtcatacctgaaactccagcgttttgggtcgatgagatgggaggattgcttgagcctgtacaatatggtaagaccccatgtctacaaaaaaaaaaagagataaaagataaaatattagctaggcatgtaatcctacctgctggagtggacgaggccggagaattgcgtgagcccaagagctcaaggttacaatgagctatgatcatgccaccctacttcagcctgggcaatagagtgaaaccttgtctctaaaaaataataaataaaaaatcaatgtctgaaacagaagatatgtacttggtgtattgataattctgtagtattgtgcttatattttatatgtattcacaatattaatataaattgtaatataattagcacaataatatgaattaataacaatcataaaagcaagcacaagtttcctctttcaatactccctatccatagtcctgcttaccaatgacagcagcttctgttttgagttattttagttgatttataactcaagaaattacttacaaataatgaaaaactgattaatgttttacataattcaggaagtaaattatataccctcaaaactctagaaaacttagaatgctttagaatatctttgaaaatatattctaaagcagttctgaatagaggttctgaacatttgaaagtacacaattaactgcattggtcaaagtttttttacgtttattagtaagggcaaaaattccaatcgggggtatgtatctgagtctgattctttaacatccccaaaattttcagttccccactctcatcagtttaattcaattgcaaagcatggaaataaatgccaaagacataaatacataagataatttaatatagtggtgttaataaaactttttgctaacagagttatgaaaccaagtcttacctgtgttttgcatataaaattgctccaataaaatctgcatgaaggattactgggataaataattgaattaatatttatagctattagtttcaaaattagctaattggttatcaagtgttaactagattttctattgacggaaaaaggataaaggcacaacaaaccttgtttaactattttcaaaattactcaatttttaatggagaagtagtagtagtccagagagttaacatcatgcctcattattcatctataatttattagaaagttgtcacccagtctaattctatttatttccacagaattcattaatataatacatttcactacgtattattatttgcttcatgtgaaaagttttaagaagactgtgactgactataaattcctgccagcttagatgatgtttattcccattattattgtttttgcagttggttactttgtttctccattgtcctcaaaattatgccatgaaaagtactcacttgatacatacttaacacagagatatttgtagaataaaatctctctaattaccaatattttagattaactttttctgggtaatttttacatggtattgatttgttttcttttacaggcttatttatgtatccccaaaagtagggctgttgtgtattttccactttaaaagcaaataatactttattttttacatagctttggtaattcctataagataaaatgttatctggcatccctaacaattgtgttttatttctgtagttatgtaaattgttgatttatattataatactaatgcatcattcaaattttatttctgtattctataaatataaattttactaattgccaacaataaaagaaaagatatccacaggaatatttccgggggtcttctaagtagagtgaatttcagatactgaagatgttagttttaacatctgaaaatattgcacatcattagtcatttttttaaataaaaagacaggtttattcatatttgttgtcatagattgaaacatctgtatgtactgtgcacaacaggtgttcagtaaatgttttgggtgacagtggtgactcttaatgatttcataatgaagtaattattcaagtgtcatattaaaaccctatttcttagaaattacatactggcaattttcagctgccatacattgttatactcactttagttcagttaaaatgtatttaaagatactccttatcttcaataaaatttatgaatttaaatcccttcccaatactattataacaaacaatgaacataattaaactatgtatgcctacaatacaataaaggattttcaaaactattcaagtaaagatgacaatgaaatgagtaattagttttgaagatagtggcatctgctatgtaaataatccaagaaatgctttccaatttccatgcattaactctttattcaaaagagggaatttaacaaaagacacaaatgggaccaaataaaatataggatatgatcaaattggaattataggcgaggcagagtggctctactcctgtaatcccagcactttgggaggcagagatggggtttcaccttgttggtcagctaaaaaattacaaaaaagtagctgggcctggtggcacgcactgtaatcacagctactcgggaggctgaggcaggagaattgcttggatgtggaggttgcagtgaaccgagatggcacctttgcactctagcctggataacgagcaaaaccccatctcaaaaaaaaaaaaaatgcatctattatttaaactctgcttacttaaaaaatggtttgaagcatattggacagatacgccctataaaatgttttctcttttcttttttctgtaaaaagtactgttaccttgcttagttttccttcttttttcagataaaagtctattccttcaatgccgtaaagatgccagaactctgtacttatttgatctaggaaaaataaacccaatgttcatgaatataattcactgtgaattgttaaaaagttgcatttcccagcattgatatttcgttaaagggaagtcatacaatatatttttccttttgtgtctggtttatttcactgagtgtaatatcttaaaggtctgtctatgctgtagcatgtgtcagaactttattcattgttatggctgaataatattctattgtatgtatataatacattttgtatatgctcatatttgttgattaaccgtctagttgtttccacctttagaaaattatttcaactatcttttgtgttcagatatttattagctcttctttattattatttattttagtgtagcatcaacttttattcctaatgttggttaaacgagacagttgaaaagacagcacaattattgactcaaaaacaaaagccaatatttcagctttaaattcttttcagtatttttttagcatgtactcatgttttaaatggttagtcataacaaattagaatatagtcagttacaaagagggttaaaaataagatcggttataattagggtgcatagtttaatattataattttatatttaaaatctaaaattttatatttaaaaaggtttttgtttttctttaaaaactgatacaattatttggttttatatattttctattctgatttaataaaaatttctgaaaaggtttttaaatatacaaaggattattaataccattgccaaaaatgaaagtcagattaatgattatgtattgaagaaagtttactgaaagacgtttaaaagaagcacacagaaaaattaagttaaacttaaactttctgcttcaactatttgctttagcacaaattattttagttttcttctttcatgaaagttctattttaaagggaacagcaaagaagataattctaaagcatctaaaaaccccatcttctattaatttgctactcacaaatgaggcactgtatttatttgttcttaatttgacatatatgtgtatatgtatttgttcttaatattgacatacgtgtttgtgaaaaacaaaaaataattgtttcataattaaagtgttgaattttgacatttttcagatgaattcaagttatttatgaaaaggctacctatgaattatttcctcaacacatctactataatgcatttgtggacaatggattctaattttcagcgccgttatgaacaactggagaacagcatgaaacaacttttcctaaaggcgcagaaaattgtacacaagctttttagccttagcaagaggtgtcataaacaacccctcatcagcctgccaagacaaaggtaagacatttgtggtaatgtaagcaattaagtttattgccgaaaaagtgagttctatttatttttctgaatgcaggtgtgttaatatacaaatcatgatctaatttatactattagagataatttgaaaacaatatattgtctcaaataataaattatagttatttctcaaagtaatagtacaatgagaaaaatatatactagcacttatttctttttttcttttcttatcaaaatgaagaaatcattctaatttattatgtgttgtagccaactaataattgcattacagtgagcagaaaagcacaaagccctatggttacattgtgagcctaggaaacaaacaggatgagaaattaaaattcctcaatacataattttcaaataaaataattcaagatgtattttctataaccagtgtatagaaaaccacaaacctaattctacaaaaacttctgaaaattactatgaaagcttctaaaatttaataggaatgatgacaacaattaaattatttgtgtctgaactgacttggggaagcagtgtttgaatttcctgctttaggatgtactgacaagtaagtgtaataaaaagttgtatttatctatttgaggtcagttcgaaaacaaaaagctacgggaaaatataggacactatcacaagaaatatatatttgtatcagtatatcttacataaaatgtttgaattttgacttggtgcttaaatcattaagatgagaactctgtgattatagatttcttttgctggaaaaaaaaccctgaaggttagtacataattttaaacatccatttaaaaagaaaacattggattgtttttgtttgtttggttggttttacaatttattggtgtctagtataaaaaaaaaactatgcaaccatcataatctaaggtgaggtcattttcattgcctcaaaaaggaatggattaccaattagcagtcactcctcataaaccttcacccagtccaaggctgtttctctctataaatttgtctaatctactatttgtctctatagatttgcctattttggacattttctgtaaatgggatcgtacaatatatggccttttgtgactagcttctttcacttagcaaactgctttcaggttcttctatgttgtagcatcagtagtatgggtataccacatattgtttattcgttcatcacttgatgaagatttggcttgttgtacttctaagctattatgaataatgcttctataaacattcatgtacacttttttatgtggacatatgtttcaattttcttgggtatataccaaagtggagaaatgctgagtcatgagacaactgtatttaacattttgagaagctaccaaactgtttttcacagtggctgcaccattttatattttcaccagtcacaaatgacaactccaatctctccacattatcttcaacacttgtgattttgtatcaatttggttatagccatcgaagtgaatatgaaataatatcttttggttttgatttaaatttccctaatgactaacaatattgaacatcttttcatgtgctttgaacatcttttcatgttcattgtatatcttttatggaaaaatgtctattcaaatccttcacagatttcaatatttttttgaaagtgggcattgagttgtaagaggacttcatatgttctgattgcaagttccctatcagttgtatgatatacagataattaattctattctttaaggtgtcttttcagtttcctaggcagtcctttctcttttctttctctctctctctctctctccccctccctgtggtcagtttagctaaaagtttttcaacctcattttcatttttcactaacttttagttttcttgatagtccttattatttttttcatttttagtttatttttcataccaattctattattttttcctctttgctgtgtgtttaatgtcattttctttttctggtttcttggaataaaaacttaagttattaatttgagaattttcaccttttgggaataaaacattctttttaatttttcaacttttattttagattcaggtggtaaatgtacacatttgttttataggtatattgcatgatgctgaggtttgaggtatgattgatcccgtcacccaggtagtgagcatagtacccagtggttttcaataattggccccctcactttctctccactctaatagtctctagtgtctactttagcatgtttatgtccataagtaccaaatgtttagttcttgtattagtccatttttatgctgcagataaagacatatttgagactgggaagaaaaagaggtttaatggacttacagttccacatggctggtggaggcctcacaatcatggcagaagacaaggaggagcaagtcacatcttacatgaatggcagcaggcaaagagagaacttgtgcagggaaactcccatttttaaaactatcaaatctcatgagacttattcactatcacaagaacagcatgggaaagacctgccccatgattcaattacctcccacggggtcccttccacaacatgtggtaattcaagatgagatttgggtgggaacacagccaaactatatcagttcccacttataaataagtacacacattaattggctttctattcttgcattaactcacttaggataatggcctcaagctgcattcatgttactgcaaaggacgtgattttattttttatggctatgtggtattccatggcatgtatgtaccatatttttttatccagtccaccattgttggaaacctaggttgattccttgttattgctttcatctttttaaatacagtcattcacatcaataaagcttcctctaagcactgctataaatcattattttatgcatctcataagttttcttatttcctccacaaataagatatttaatatgtctttttgtgtactcccagggaacattccatgcctggaaaatgtggctgggtgaagatcttgttatttgattataatgagccttatgctttatatatgtaggttaaaagcaatttgaaaaccatgtaatacattattttacccaaaatagaaagtgcaagaagatgaggtgaattaggaagcaaattgatgagtctggttataaagacattgactttagggttctttttaactagtacatctagagctggatatgtatgtctgaagctcagggaagatttggacaatctcagggaatccaatctcaaggaacggcaatcattggttcacaggaatccatgaaatctgaatccagctgacatttgaacaacacgagtttgaactgcgtgggtccagttatatgcagatttctcccaatcaaaaagattttcacacaaccttttccatcaccaagttcctcatcctcaacctggtggatgaaaaatatagtatttatgggatgcgaaacccatgcataaggagggctgatttttgtatcctcagattctgcaaggcttactgtgggtcttgagtatgtgttaatttttttttttaatattgggggaatggaggaattcctggaaccaatcctcttgggatactgagggaagactgtattatcagaaagtgcagatatatgtgaggtgagtgaaaaaacagaaactgcaattgagcagatactagagtaaaatatatcatggaagccacattaatttctagtaaaaataaatgaattataagttgacatacaaaaatgctatacaagttcaagttttgtaatgaaaatgtgggaagctgaaatcccagttcaaactgggagcgtccaacacaaataagtagaataaaatagaagtgtaatatttgcattagaattcaacatagtagagataaatctttgttttccaaaacttctaaattaaataagtcaaatattgccacagaattttcttgacttccttttttttaatttagcgtaattcctaagttgactattagtcaccacacacacaaaaacaatgcagacttcttgctagataaatttgtttattgaagtttgatattttccatccccgtttttcttttactgccaatgtaacattttgtttctatctctctttttttccattttaaaagaataatatgaaatgacatcaggaaaacaaaaaaaaaatatgtactggattctaggagggtagaatatggtagaatgtaaactgaacattgggtatttgtaagttacattttcagaaatttttgaagaagacttagataagccataccagtaattcgctttcattacaaattatatttttttcttgcctttatggaattgttctcagtcattcccttgaacttttctctcaatttatgatctgctaagatcttgaaaaataagcaaaaacaaacaagaccttcaaagtacatctccaccaataagatattttcacatttcctatataatgacagatagattaaagttactctgtatagtgtatagttcttccttttcaataaagcttgacattcagattaatctcaccatttttgctctgaggaattcatgcgacataaaaatcatttttcttacttgagtaaactctaaagcctgcgacaatttggtttccttgaggtagtcaacttttgctcctattctaaaactttgcagctatgtaacaatggcttactaatttcatcacaagatagtgattacagcaattgtattgtctgcttccacactgctataaagaactacctgagacttggtaatttctaaagaaaagaggcttaattgactcacagttcttcctggctggggggactgcaggaaacttagaatcatggaataaggcaaaggggaagcaagacacatcttgcatggcacccagaggagagagagagaaaggaagctaggggggaagtgctatacttttaaaacatcagatcttgtgagaacttactcactcaggagaacagcacaggggaaactgcccctacaattacctcacactaggtccctccctaatgtggggattataattcgaggtgagatttgagtaggggaacagagccaaattatgtcagcaattattgaaaactatcatagtataattcctaaaacgtaactgagctatactatgttgtgctgccattcacagagcagcaaggatccatagaaatactacatttaatgaagtgttggtaaaagtttagcaaacaactctttaggaaaaaggaaagctttgatgaacaatatttaacaatttttgttcactaccacagtcaatatcaatctaccaatgtgatgtcactgaacacagagttgtgaatagaagtacacactcagatcttctgagtcaggacacacaggctgcagcaagcaattaaaacaattgaatatattattattatgaagttattcatattttattaacaaaataaagtgagatgtaatggaatattttaatgccacagagaaaaatgagttgaagtctacctattcattatataagagctatgtcatgcactcctatatatgctctttcaacttatatatgaaaatcttccaaatgctgacatatttcagtaggcaataacaaaagaacttattattaatatcatcattggactcatgagaaaagcctttacattttagaaagctgtcagtcttctagtggcagatacaagttctgtattgttcacttgaatgctttattgttatcattgccgttaaataaatcagttgtttgtcctgaagcaacagcctcatttttttaagttttgataacagatccaccaagtgtccaagtctgaataaccatcatttttctgtcaaactatgtcaagtaaaaatggttttccatgaaaaacgtggctacctcagcctgcaactaaaataatggcaaaagttattttcctcaaatcaactattatagtgctatctgcagcataagtcctttattcatgtgtcttgttttgacatgcagatttatactgaagattaagatgcagtaaactttcttttaaatgcttcaaaatgaacattcttgaaaacatttctttctgttttacaagtatgtatcagtaaggaatatatccccactaggagagcagtttggtggcactaattggtttgtagtaagccttcagcagtagtttactctccattgctttagaactgtcagtggaagtgtcaaaacaatgcaaaagaaaaatgtcttatttatttctatgaaaatagttttgactttgtgcatcttctgataggatcttgccctcttttcccacctacacccagggctatgtggatcactctttaggatagagaatgcctgaaatcaatttcttctcctcctaagtagctaatagacagaagacaaacacttcttcctttgcatcttctcttcctttactagtacaaccctgagtttcatctgagcgcatgctgcatcacacctgtataccttccttgcacctaaggtggatacatgtatataaatgggaggaatgcatgaaactcctaaattggttcttaagggaagaagaatatgtgtcatcttttttatctctttcccctagctaagatgaaaatgtgatgactagaactaaaaatcataactgaaaaaacttgtgaagaactgtagaacccagcatctttgaggccaccatataagtcatggattgtttatgttgtactgttatttgagaggaataaaattccattttgtataagttactgttatttgagttatattactagagccaaacttgcatcccaacaaataaaagtaccttacagaatggcctccaaattatttctttacttattcattttgttgagacagagtcttacactgttgctcaggctgttgtgatcatagctcactgtggccttgacatcctgagctcaagggatcctccaacctcagtctcctgagtagctgggactacaggcatgagccaccatggctgacccaaattctttaatattatagaatctatgatttagttaaaaattgcatttatatattaatgtgagggacttttgctgaaagcaattttatatgaaactgtatggaaattaggatattagttttttcttacacttacatgttataaaatgatcttttattattttatttttctagtttcaggcactccaggatgactcacaagcacatactcagtaataatgaagcagtaaatttacaaacccttacatttatgtattaaatgttgttattgagaaatggaaatatgaagtacccagtgcatgaaaggtgcttagataagtactttccatttcaaaaacagaaaaccccttttcttgtgtgtaggtattttctaatacactcataaattttctgcaaaatgtctttcatgtgtttcatactcaaaataaaattggccataaagataatggtctaaatgcaaacaaactgttacttaagaaagaatgtcttagttgtctgaattccgattcaagggagccaagattagctttttgaggacaacagaagaagaaggaaaaaaaatcgtgcatgtaccccactgttcttgattgggataacttctaaataagtttcaaagtagggaaaattgtcctatcacttatgctacctattttcatctaattcttgatatagcttacatttcagccaccatggctctaaaatggccttggttttatttttgccataatatttctactctaacctactcataaatcttttaattatctttcactttattatatcttagacagttgtgagttgaaattagttttttaaactcatttatatgtattatgtgtatgtataaaaattattggtactctttattatactatttgtcagccatgccagtcactaatttgggcattttaggcagagtacgactataatgataaaataaaattaaagtctgtagaaatatagtgttgtgcttgcttttcttcatctttttctcacggatgaaagattaggacatagacttcggtacctcaacattttgtccagtgaactctgtctgcagcccacagtgtacacaggaaagatgtccagactcaacccaatagaggcactttttttagatagctgattttgacaataataacagagtcaaaaggctttgcttttttggggggcggggggggggttgggggagattctgtggcgatatatatatatatatatatttgtgcatgtatgtaatagttcaaaatgatcatctcattatatttatagagaatcagcatgttgttttttggaccatatcaatttcaatttttacaacaatgagaaagtgtaaactctgagtctgtctgagaaggtaatgaataattatttgcttgagattggtatctagcatgaaagctactagaaagcaactaaagtgttgagataatgactgccatggttggttaacaaaaaatatatttaaaaaggaccaaaaatattctatatctatatatgaattaatttaaaaagaattaattttactgacaacaatctaaaataataaatttatctaagataatgtattttatctcaaataaatacattccttttttaaaagggagtggtggttaaacaaagttggagattcttgaatactacagccctttttggaaagctacaacacatgcatgccaaatactccataaaattttacaattaggaaataaacatgattagactaatttaaacaagggattttcagaattaaatttctacttccttaaatgcctgttaaattgtccaagtatgtgcttggagatcagtgtcacgtcatcttttctccagttttttgattttaggcttgtcttttgttgtaatgtagtaacttcaatcacagtaaaatatttggcaattaccttgtgctgaaaattattttggaagactcttctttgctcacctctttagttgtcttctttgtgctgggtatcaatcactggcaaacaattacttcattaccttctcaaatggactcagagattacaccactatgtccttgtaaaattctaatttgatagggccagcaaataaaatgctgattcatttactaggacatatttttgtcagatttctttcttataacctttatttctgagattttcatctcaatttttattttggcttatatagagagagttactttaagtgagactcttcttttgatattgatacatgaacttacatatgagagaaaaattttatggagtacaaattgataaactgattatttgctgatatcacattaactgtcaatggtttgtagatgagccacatagtgtaaatccatatagatcccaaggtactaatgtttctccagatcttacaatgtttttgaccgtgaaatctttagaatggttgtacttttgctttttaaatataattaagttagggctgaatctctaataggtctcatctatatttgaatcacttctaaacaattttacttgtttttgaataagtggatgccttttaaactgccaaataaataggaatctgaacatcattttttcttttttctttttttttgagactgagtcttgctctgtcacccaggatggagtgcagtggcactatctcggctcactgcaaactccacctcccaggttcaagcgattctatggccttaccctgccaagtggctgatattacacgcacacaccacactcgactatttttttatatttttggtagagacagggtttctattctgaggatgtggtggtcttgttatctcacagtagaatcccatctcgtatatcagaattatttatctttatctatgacctttccttttaaacacttcccattaaaatgttgtggccagggatagacaccatgatattggtgtcatctgactgagattagactagtattttaaaatctcttattctttaaaaatataatcgtgcatgcataaaagaggaataactcaaagtgttttctcaaagtatgagaatcttttttgtcagcttcatacaaataatattggaagcatcaatgcataaaaatgaaattggctatttcaaaattgtcattaggtaaatatgtagatgcttgtcctaaacttctcattctgaatgatagtactaataaataataagatgtcgtactaaacaccagaaatcaggtaaatcttacaaatgatatcatttctgaatcaaacttgctcaatgcagtggggaaaacctaatttgagttgctttaatgatacatttaatctaatgactaatttggtaacaccacttagatgcagtacgcaatctctaatctcaatactatgtgttagaatcctcatgcagaggacaaaatagtccctataaataatcttcctcaccgccttttagcatcattattttctaacatgtatatgtatctatgtatgtacacacacacacacacacacacatagatatgcacatatataccaactcattaaaatggcatatgcacatatataccaactcattaaaatggcatatgactgaaatctggagttcttttccttgagcattaaattaagacactgttttctaaaagtgaaaatggttttataaatcaagagggtgaaaactacatattatgagatgcataccagcacaaatccctaacactgaaaaaaaatgtgaagcacttcattttaggcagcccacacaagttataaagtgagtgaatacatttcaaaaatcaatgccaattgaaataaaaatctcctatctcacaatctaaatgcacttcagacaacaacaaatagaacatcacaaaagaacattgatgtgacaaaagaacactcaagaaaatgaaggtcagtttgctgtggtggttgtattaagctcagcaggaagaattcatgtaggctcctcaaaggaaatacaaaagatcaaatctcaggtagcactttgtattgaactgaaacaaaattagctcatataagcaggaaagttagccataaacaaatataaaacaatgtacattagtaataatataaggaaattctaccaggtctctctctctcacatacacacacacacacacacacacacacacacaactactcaacaatatcctaagtgcacactaacacgcacgcactgagacgtgtatacaaaaacgtacatgctccctcaacaatatatttaatacataaggagagcaatacctgattatgatctaaatacatgatttttcttttataacctcatctaaattcctgttgaactgaacaaaactgtgtcactacctgaaattattaaatcattcatcaatatgcaataatatggagagatattttgaaagataaaccgcagaaagtaaacaggaatgaagctgaagctgaccaaatcacaattcatcacatgtaagtgaaatacctatctaaatagcagaagagacatgcagtggaatccaccaatatctcttgatgaagagccacccacataacgagctaaaagagattatcctggaactgactcactagtgacaactgtcatgtttaactagttattagctaacatgtattaagtacaaacgtgtgtcaaacactgttctaaatgctttaccatttttcatttttaacttaatacaatgttataaggtgggtagtagttttactttaaattcacaattgaggattctgaagttttgataatctaaacaaattaagcaagattactcaactactggtggcagagctagagtccaaactcaggcaatctggctatagaggtcgtcgagtttttcattactctaccatgttatttctcaggtttatcatgtttgttaaagaaggtgtcctagttcttcccaatctgtcatcattgaaaagtttgagaaagtattaaattcatgcaaaaaacattaagtaatagaatggaaaaataggaaaacaagaaaaagtttagaagataaaaatatgattactaaatttaaaactaaaatacagtagactgttaaaagaagagcattagtttattacagtaaaacaagctaatgcagtactataaataaagaatgaggagatagaatttatttatttatttatttatttatttatttatttatttatttatttatttattttgtgacagagtctcaactctgtcgccctggctgtatacagcggcgcgatctcagctcactgcaagctccacttcccaggttcacaccattctcctgcctcagcctctctagtagctgggactacaggcgcccgccaccacgcccggctagtttttttttgtatttttagtagagatggggtttctccgtgttagtcaggatggtttcgatctcctgacctcttgatccgccgcctcggcctcccaaagtgttgggatgacgcgtgagccactgcacccggcaagaatttattttaaaagtgaggttcatgaagagcatgggtgagagtaaaaatatacagcatgcataatagaatttccatagagagaagactgatatttcattgagaagaggcaatgagaaagagagagagagcttttcttgaaattggatgaaaaaagactcagcaccaagcaaaatatataaaatagaattgtattatgtaatggttctaagttaatatcaatcatttttagctactccatttcagtttttcttagttcatcaattagtttaaatatttgacgtattttaaagcctacttattgtgtgtatgggcacaaaggaagagaaaaagtgtgcacaatagcgtgctcatcttacatgtctggctccaagtcaacaattacagcatttgtctatcatacatccaggcctgtttatttctagatggaagtaacctaaggcagacatggccaccggctctttctggaccacagattggcttctcagattcctatctttcttctctcagggagaaccagaggaacaaagcagtttgtcaggatgtcaagtagtacatggttataaaagcaaatatagcagtccaatctaaccatgagagggaaactgacttccagcttgtctttccaagactgtgacagcaaaagaattttgttttgttttgttttcctcactggaaaggtaaccaagtaagaatgaaaacaatttctttaatctaaaacactaattgcaaggtatggtagattaacgcatggtgttttgagaggaaaaaatatgactgaagaattttctgcttagtgaattgatattttatttgagaggaaaacaaaaggactttcatatatataaagtgtctttagatattataaactctagttctgaaaatgttacttattaaacaaattaatagaataatcaactcaagaaggtatataaactttatcctgaaataaattattcttattggatagtataattatgccaaagaaaagatcgtcttctattacttattgtttatccttgtttagtaagtttgccagtaaataaaacttgaatctacataatttgaaaattagaaaatacgcaatattgatatttacaataaaatatgcttgttagttgtggatggcatgcatatttacatggaaagccccatagaatataattttaaaaaactgaaaaaatgtacttaaagaaatttgctagctacagaataaataaaaatgaatagcctaccaatacgcaaacaaaactccttaagaaaatataacagaaaagaatacatccacaaggatatcaaaatatgtaatataagaaaataaatgtaataaaaatcttgtggcaatttaagggaaattttgaatacatggagagcttgctcgttttctgaatggaaaaataattctgtatgtatatattttatccattaatattttccactaaattaatattgcaatataatactaattatcaatttaatacaatattaattgaaatttatgtgggaaaacaagtaagcaaatatagtaaataatattttaaaagagggataatgatagtagactaggattgccaaatattcaaatattttctaaagaaataaaatagtgttccagaagtgctctggctacactgctgagtagccactgaaaattgcttaatctcttttgacttcagtttcctacctataatgaatactttccttaccaaattattatgaaaatgaatctcttttatatgtgtaaagtctcagcatttattaaaactcaaacaatctatttgataatgatgatgatagtaatggtggtgatgatgatatagtaattaaaatagtgaatatttatataactatacagtaattgaaatagtatggaaaatgctacaaagtctacaaatacactcacgtgtatgtagcaatttgatttatgagtgtaacattcaagtgggctacaaaggtatacaaggagaaggtataccaagacactccttttaaggttatattaattccctgatgttaaaagtttaacaaagtccagattaggtcatttattttatcataatctaataaggttaaatattttaagtgaacttttatgctcttttaaaaaattattccaatagttttggggtacaggtggtttctggttacatggataagttctttattgatgatttctgagggtttagagcactcatcacctgagcagtgtacactgtacccaatgtgtggtctttgatccctcactccccttttaactttccctccaagtccccaaagtccattatatcatttttatgcctttaagtccttatagcttaactcccacttataaatgagaacatatgatatttggtttttccattcctgagcaacttcacttagaataatggcctcgagctccaaccaagttgctgcaaaagacattattctattcctttttatggttgagtagtattccatggtatgtgtgtatatatgtatgtatgtgaatgtatacataataacattttctttattcaccctttggttgatgggcagttaggttggtttcatatctttgcagttgcaaattgtgatgctataaaaatgtgtatgcatgtgtctttttcatatgatgacttcttttcctttgggtagatacccagtagtgggattgctggattgaatggtaggtctactttttgttctttaaggaatctccatactggtttccacagtggttgtactaatttacatttaagtgaaattgttgacatgcaatttttaaaaatgaaattcttccctgattggaaattaagaaacccattcctacttaatcctttgttcaaagaaaattcaaagggaaatttcagactctaaagaaagcagttcaaaagagaacactgcatagtgctatgagaacacagtgaattctagactcaaaataaagatcatagttacaaatgccttaattgataaagaagaaggaataaaaaattaaatgggatttagatgaattcagtaaagttgcatgacacaaaatcaacatacaaaaagttaaagttactgagaacttgtaaccattttttatttcattggacaaataaacatttaatgtcatgtatgacacaggacatacatcagcctgtgcaattttatagagagagagattatatataatgtatataaatagcctggaaattatgagttaataatttagtggggtgaaaaaataaagtaaatgggcaaattatatattatttttgaagattatcagtattatggaaaaaataagccagaaaagaaaaaaaggacatgccaggggttaggtatctatgtggttgtcattgtgtttacaattttaaacaagactgtctgcaaagatatgaagaaggtgagaatgcagtatgccatatgtatatctggagaagtgaattacaggccgactgaacagcagcatgttcaaattcctgaggtgcagtggggcttggagtgctccaggaatcatgaggagcccctgtggcttcccatggagagtatagtaatagaaaacatagtcaaagagttattggggatgactgacagatcattgggaaaagtgataaaatacccattttggaaagtatgaagatgagatatgttcatcggtaagatttttctgactttagaaggttagaaatattatttaggttttttccaggcaacaagaaactatggaagccaatcttttataaaaatgatgtaactttaacaaaaattatacaaaaatggaaaaaaagatgaatatacttagttttctaatttaattattaaaatataaagtatcttaatggaaataaatgaccacctagaggaaaggctacagcacaatgggttgaaatttctgtagggtactaacatcccagatgagactacacagttgatgatgccattgtccattaacaagattccagggctatcatgaattcccctgccctaaacttggagtcagatactttccctgaacttccactttgttttagggcaggttagaattagagaatgaaatatggatgctatggatgccattgtattattttatatgagcactgggggaagatactagctatgagccagtttagtgaaagagaggaaataaaaagggggagggggttgcatttcaaaaagacattaattgatactgaaatttcctgtaattttcttggcacattttgtgtctcctatgcctgtacattgtttggtgtttctgcagcctctcttaaagaatcttgtacaacaaatagggaggattttccccttaatactctcctatgcattttcatggacatcaatatccaaacaagccaaccagacatcatgctccttgcataaatttgtgaggaaattagattaatgttttattgatcatattatttgataaaattataaatggtcatggctatgcaattctcataactttcagattaccaatctgtctagggattcataattctaaattttgtagttcagttagcatttgataaagggatgttacctggccaccaccttgaatttggctaaaatgacttaaaatagtcatggcatacctcagtactgacattcagctagagccagaacatagcagtgtaagagttgataccattcttatatgttgggtgttcattctgatgggctggtgttcatgcagtgctagtcattaaatgtttttggattcagcccttactcatctataaaaatatacattgcctagatagaggaataactcagttttgggggtgttgcttgttgaagcatccctctcagaacattctattattatttccatatccacaaaggactattggtcctgcaggtatgagaatggtccctcaatgtcccttaggaaaaggctgttttctatttttaactgaaaggcttgacctttgagtagttccattggtgagctagtttctctttgcattcagaagctggggagaattacattttctgcatctgtttccatgttgtcttcatgattttattatttgtcttggcctaaccaaactgaagtgagtggacacatcttccgaaagccagcagtctccatgtggtagaggtaatctaacttcagtctgagttttgctgttctccataagccaaaaatctttagaaagataatcggacaagtatataggctacttgcattttattttcctccactccaagctgatgtatagttctatgttttgtatattttaaaacattttaattttttgattgaaaacttcttgcaaatcatctttactttaaagaaggaaattgggtagctaggctctcttctcctattttctttcctcagataccacagaaaactcaagccaaaattctaatatctggaaaaggaaaaataaaaactacttacggcctttcaggaaattttttcaataaaagttttccaggcatagttttagtctctccttttatctcagatctctttagtccagaaaggccaactttttttttttccctaaataaaacatattgctgaagcaaaaagtgagctttttgataattagattaacttgtctcaggcatacttcaattccatatttttaatttttttatttgaaagttgtattttttcaagtataaaaatatttctgataggttatactctgaacactattaaaatgaagacaagtatggtgtcaaacacttatagaaaagaaaaaaagaaaattaaattgtaaaaaatgaagacaaaaccccactcaaattagtatccaagataaactatacctttgtacctggcattttctgtaaaaacagagatcaatacacacgtattaaaatagaattacttaaaaaaatagcatgaatcttatcatttccaatgccagcgcaaaagcaaaaacctttctttaactctgttttcagctctagccatatccaaatccttagcagttttccactttctgactagaatgagatttcctttccacataactaattatgattagttatcatttcaggtgcttcttgacctttcatatatcaggttatgtaaaatgtttcttcaattatgttgttcatttttattgagatgtttgtattcccattattagttgaaaataattatttacatattctgaggcaagcactttttttctgacttgtaaatgtggccaaccagaatgtggattgccattaataaagtctaattcatcaattattttcttctataggtagaaaggttgagtccaaagaaatttttgccaatcacaacttgaacagattttctcccatattttcttctggaaaaaagagtctttttattttatatatgttttttcttttcatgtttactttttactttttaaacttttattcatatttttcataatcgatatcttttttgatcctcacattaactacttgggatgtacaaatcagtctttattattttattttacatataggaaaaataatgaggattaaggctaggcgtggtggctcacacctgtgatcccaacacttttggaggccgtggcaggctgatcacaaggtcaggagtttgagaccagcctgaccaacatggtgaaatcctgtctctcctaaaaatacaaaaattagcccagcatgatggcacacgcctgtaacccagctacttaggaggctgaggcaggagaattgcttgaaccaggaggtggaggttgcagtgagcggagatcgtgccacttcacactagcctgggtgacagagcaagactctgtctcaaaaaaaaaaaaaaaaaaaaaaaaggaaagaaagaaagagagagagaaagaaagaaaaagagaaagaaagaggattaaaatattaagtgatattctaaaggttatacagttataaaattgtggtgttaattctggaattgagccccagtctagtgcagtgtcttcttgactacactgcagacaaacaaacatctcaatcaagaatatggatttaaattccaggcataaaattatctttactactgggaaaataacgaagagttatagcaatttagtattgatgaaaaacaggagcttctttttactagcagaacatctataaaatatattatattaatatcttaatggcaaaatttccacaagagatacaaatcaattgacatttgatattttcattagtaaaataaattaggtacagtctgcaagagtataacattcaaattagaaaacctatgaaaaacaggcctcatttaaagaaacatggcattaaaatgctaaagccaagggattctttcaagaatatttataggagagtcagtgtataattctgcacctgttgctaagaggaggtacaactggtcaagttcctatttgaattagcatcaaagattttaaaaaatagcctctctgtttgtaagttttcccgctcttgtgaatagagatttgtcttttgcaagggaggagtggcagactatcattctcttcaggcagcacctgtgaaatttggcaaacttgagtgtcttaagctgctggcatgaatagctttacactatgtgggtaaagaggccaccagtactttctaatgaatgaatccatggaatgctaattttggtatccttgaattatgtgactagttcaatgtttatgtgctgttttgaaatacagttcatctcactaaatttgaaaacaaattctacagctttaattttaacattttattaaagtttgtttgatgttgagcaatgtcaaaattaatttattttttatcctaaaatttatggttttaggaaataaaattaaactgtattaatataaaagtttacttttatgcttgccataagattaataattaatagtaggtttatatgtgtaaatatagttctgtgtggcacattttcatacagtgtggttaagtaaacagatatatcaggtaaattatgttttcatggcaaatgaagtcatttaataaacatataataataatagtatcacatataattgtagattttgcatcttcttatctttctatgaatctttatatttagactaataatacaagtatatttaaaaggataaccaagatggttttgaatgttagtgaaaagtgtttgtatagattcgcttcaacatgaacaatatttgcaagaaataaagtttaagtggagaaatgcttctggtaatgtttcacaaaataaaaaatactcaaattaagtgcagcttagctgttttttcctaaaatatttttaacctatttccactatttgctatagatgttttcaaaacccagttgaaatattatctcctttcttgaaaatttttcttaacccctttctctacaacaaagttagaaattgtcttttggaattcaatatttctcaattttgtcatattacatttttatcgtatttattcgcttacgtttgtattttccaatagaaagcaagccctcagagacaaggattgtggtttactcatggggtagccccttgacttaacataatgagtatccaaaacatgtttaccatagatataatattgggcctacaaacatgagaaaggtaacactaaatgttgcctggagaaaaccttaactatgtagatttatgtcgtatgctatattgtctcaaatctggcttgactgaactctgtatatcattcagcaataaagtcacatttttgctcctttcctacagtgacttgaaaatgtttatttactatttccttcaagcctccctgcccacctttccttctaatgttctttattagcagcagacctagtattttttcacacataaaaattaataaaataattcatattcaatatgattttgcaagtcagacactcaaatgtcagatgacaaagatcattttttttcttttctttctttctttttttttttttttttttgagacagagtctcactctatcacccaggctggagtgcagtggtgagatcttgtctcactgcaacctttgcttcccaggttcaagtgattctcccgcttaagcctcccaggtagctgggattacaggtacctgccaccatgcctggctaatttttgtatttttagtagagacagagggggtttcaccatgttgcccaggctggtctcaaacccctaggctcaagcgatctgcccgcctaggccttccaaaggctgggattacaggtgtgagccacggctccgggccgatcattttttttttttctatgatgcggtcttctgacagtgacccatctattttacctaatgcagaaatggaatctaagcacttttaggtatattctttctaaatccaaagttcaactctggtctgtcatttcattgcattcagttataaaattccctctcaaggctttttctctcctttcttgggttgattctaaacccagcatggattttctaagccccactattgtggaactccagttttgtttgcctgtccctgctgccgccattgagatgtatatgatctggactcaggctctgaaggagacaaagctacacaggctactcagcatcttcctcatttttgtactaagtcattgaggtcctttgtcctttcttggtctggacacaaagaaggacatggccattctaccaacctttctgagacccacctgtctctgttgctggtatctctgcaaagctacacccagcctcagttctgcaactctgcaggtggactgctggctcccttttgccctgatccccaagtttcacagcgttcaattatttctccctcaaacccctgcccaccacatatgccacctataccaaggctcaacacagagggcaaagcacaaaaactaacatctgagctctttgggttttcctacgactctcttgtctgcaatgagctaccaagtcattttctgactcatacctgctttctgatatttcttgtttcatatctggaaggtgattttaaactgagaactgaataatacaaggatttgtttttttaacttatgcaataacttcacctcaaatcatgtgtaactcatgtttagcagtcttcattgaaataaagattctcataacactaataaataaatttgttgggttgctggggatctaccattcaaaaactaggaagtcttggccaggtgtggtggctcacacctgtaatctcagcactttgggaggccaaggtgggcagatcacctgaggtcgggagttcaagaccagactgaccaacatggagaaaccccgtctttactaaaaatacaaaattagccaggcgtgctggtacatgcctgtaatcccagctactcaggaggctgaggcaggagaatcgcttgaacctgggaggcagaggttgcggtgagccgagctcatgccattgtactccagcctgggcaaaaagagcaaaactccatctaaaatacaaacaaaaaaaaaaaactaggaagtcttttcataatttctgtaaagtcaggttgcatcatttgtagaatggaagataagacagttgtcatggttacaagaatcagcatatgtaaagtatctaaaataatttatatttaatcaatataatcaatatgtacttttttctttattctcttttagtttcctctttcttacttatctaatatcatccactctttaaaacattgaagaatggctttcactccaatattactatcttcttccatcagtcttaaaataatgaccatctaattgccagatcaaatggcgtatcacttcttgtcaacctggaaatacttaaaaactgtacgggttttgctctttttaaaaattctctcttttcagtttctatgatctcacatcctcctgatgtgctacttctgtaatcacaccattatcattccagacaattcttgtattgtacttccttcccctccacctcttgtctataatgcgaagcattttttcaggttttttttttttttttaaactttggttccaagtctagaattctcacccgagagaatatttgtatatctagttgggatatagctccctgcctccagtctcagatcatttcaatttttccttcacatggcaatcagagtatttcttttccaaaaataaaaaccggataaactggcatccttatttgctctctttcatctataattcttcatagctcacaaagaaaaaattgtattgccttgggccttcaaaattttactcctgccttttttccccaaacctccttcagtggagtctagagattaaaaacagaatgttttattcgaaaagagtcatgttcaaatcatggttctttcattatttattgtctcttaatgagcaagacacatagctacactataccttagtttatctgtaaattggggaacagtgatacctactcatccagatattgtgagaacttataatagattaatttgattaattaccataccccagcttttaaataagcattttatataaatatatatttaatttatttggggtcaatttaaataaatgactggttgaatttcaagtgtttaataaatatctgttatgtagtaagtgctcaataattggcaaccatgattatcccatatgcacttctcatagctcttctaggtttacatttgcttcctattagtattttggaaaagtctcttcatatttatttatgagtaaaaattaaggtaagaataatggcttccctcaaattacaagacttatgcagactatatgaaaaatttgaattagatgatggaaaaaataaaaatgtttgcgtatgttaaaattgtaagctcatggtaatttaattttcaatgaagaaaataatagctgaagcattgttttaagttaaaaatttggacaaacaagattattcaaagagggaaggcagggaagaaggtgagcagtatactggaataatgtaagcattagagaaaaactgcaattagtgcatagctaatgggaatagaaaagaaggaatccatgtgatgaactgagttcagttgtggtggctaggtacatagcctaagaggtagtgattttgttaaacaaagatccccagcaacccaaatcaacccaatcaatgtgttaaacaatggttgttagatctttaagtgcattgctaattaagtcaacatttttaaaactctaaggatgtattaattatctttttaaaacaaaatataaagaaaattttcaaaaaatgatagcaatatattatattctggagattttgaatatgaatactctcttaatatgattgtactgtattggaatttctctcatgaaatatttttttatctttaacaaaataggaaaccagggcatgtgcctcttgttatggggtgaatagaagacgtttgctacacaaatacactcacacaccttagtcataattgtcttattatttctagacttaattttaagtacatttcatggtaagataattttgttccacaagaagttagctactatagtaatgtgtgcattattttacatatttgtgtcttggtatagagataagagagttagagaaatattcacaaattttaataaaataggaaaaatgatatatgctgtgctgcattctgcctttttacgtatgttgtaggcaacctgcaatattcagataatatgaagaatataaactaatgcagaaataattatttattaatttataatttgtaatctacccctttacaaaatcatgattcaagatgactacatgatgctcaagtttagcctggggctattaccagaaatcagggagtcacatgcaagtatcattggtaattttattaaaaacaaacatatttgtcattggcatgattattgttatctccatggaacatgaaatgtacacaattatgatttctggctacttctacaatattactttaatttccaaaagtggtttctgttgcccatttgtatgcatacacaccaaaattaagtataaccactatattaaaaattataacaaatttctaaatgctttggaaaagaaatgtcatctccacaatactaaagctcatgaactcccaattctactaacaaatggaagaaaatccccaagcataactgaaacagggaatattcccagaaacatttccataaaagagcttttaacaatgtgtataccattaaaatcttattatttaaaaattctatcatggcagcattactagttcttgatttttattgagtatttttaacagcatcttgaaaggattaattcccatatgcatttgttatcacaaatgcagtaatgctttgtgaagattcaaccaggagaattcatctaggtttcttgggaagattatcttcaagaaaggtcagagtcttatcaagccaggcattggcagacacttctgatgctaattgatgtatatacatttactattctagatgctaaaatcatccttaaataacatgtgtacttcagcaggtaactaaatttgtcactaaacctgtagtaaagaggcactgagatacacctctcatctgacttttcccagcctcctctggaggtttcttgccttgtcctaaaagctcatgttccagctctgtaggatcagtgacaccaaatgttgacactttattattactcatatatttaatgtttgcgcattatgcaaatttaatatccctcccaaaagcatgggttaaaatgtaggctatcattttataaatcagatcatgcaattttatttttacccatttgctctggaataaaactgaagtccctcatctaacccacttggtttgtatgactcctgcctgtctctggagactctttagaatctttcaaatgctactgtttccatcactgctcagaataattatatgtcttcctaaaagtataactatagctgtagcatcataactagtctttgtcatttcactcccgcccttcttttgaattcattctccacacagcagttatgatgtttattttgtaaaacctatttttttctaccctgatttccttttcactaatgctaaaatctaaacctgtttcttacgactaacataatcctgctttgtcactctcaatgaactcatgatgttacagcaacattgatctttgttatccctgtcttgccaagccgaggcatctgcactctacctggaacacatatccttttgtacatctttgcacagagaactaattctaatcatttggctttcagttgaaatatcacctccacgaagaggctttcccaagactccctaaccaccgtagacctcatgtattattatgtatcatgtcacacccttaatcatttcacagcacttaacgctttcttaaaattttcctgtttatttattatttcacttatatattgagaatgaaagccccagtgggactatttctctttttcgctgttgtattttaaatcccccaacacaagaaatgtagtaagtggttttggggttttttgtttgttttgcttttatattttgttttatgtgtctggtttgactttttcttttaacttacatacagagatttaagttacatttcatagttaccattttctttctaggccaggaccctgcctcattttatgaatatatgtagtttgcccttttaaatcccttatcctgacttccattcccttccccaaaagacatacccaccgtattgggcttgatatatgtccttaaatatggatgtactattgtaacatgtaatgatgtacaagtatgcatattcaatttgtattaagtgtattatgcatcatgtttttgcatttttacattaagtatgtttttaagatgcatccattcttatctgcctatattgtttgatgtttaattgctgtagaatatatatatttttagcctgcatccattatgcttttcatccatcatactttttttaatccattccctcatgatgtgattccaaattatctataacacctcccactctatactatgccacagtaaatatgctgctgcatgtcctgcctctgatttgtggggattcttctgtaatacatgctcagaagtaaaattcttaagttataatgcatatatttattttcagtaagacagtagatgtttggtaaatatttgttaaattaatcatttaaaaccacataataaactattttacattataattgtatcctatggatgagtatgaatttcccatagatgcagtgttacaagttcttagagaatacaagtatagtcttactataatctataaaatgctagttatctatggctgcaaaacaaatttccctaaaacttagaacatttattatctcatagtttctgggggtcaggatttggggagtagcttagttaagtattctcactcaggatctctcatgaagttgcagtccagctacctgccagactgcagtcatatgtaggcctcactgggcctgggagagatttacttccaagatggctcactagcatgactattggcaggagttgtcagatccttgacaggtggacttgtcaaagtgctttttgagtgtccttatgacgtgttagctggcttccttcaaagttagtgatccaaaagttagagtgagaaggaaaacacaaaaccttttatgacttattctcagaagttacagtcattttcatcagttgctatctgtgagatgcaaatcttttccacactcaaggaaagggtaattaagccccacttcttgatggaaggaatttcaaagaacttgtgaacatattttaaattcaccacaaaatccagaggataaaatggagtacaatattgtgtaagttctgaataaatgcacattcatttattatgttatgtgtctgattctgtaaacattaaatgtcaaccttgtgctaaacattttcctaaataatatgaagaataggatgaatatttaacgtttatgctctgaagaaatttacaattggataagaaaaaatatgatacaaacagcttaaaatgcaatttgataaagatacattgaaatgagttttactacaacccaatataatacaaatatctaagataacacagtcctacatgatgtaatacaatacactacgaaaattgtaatggcataacatgagggcactgttaacataagtgaaatcaacccaattctgtttgggaataaaagtttcacaatgaagttataatgttaggtaagatttaaagaatgattgattaggtagtttctaggtaaattacccatctataggaggctataggcagaagagtatgatatgcaaatctacagaatcatgaacattgcagatatgttcaggaatctataattaaaggtcattggcaaatttgatacataggtcctgagtattccatacattttatactaaagaatattataaattgatgcttagattacagacaattggcaaactttcatttcagtcaagtcctttgcttctacacactagccaggatagacagtttaaaacttcgctgcacattttgcatatgttttcttatccatcctaacagccctatgttgtaggtactattatatccatatatttccaaagtcaccattgcaaatgaccaatacagaatattaaatctgataatgtctggtatctgttatagtttagagtttctagctcataaattcaaagaaaaagatggagtaaatgaaaatgcatttgtagataggagcaagatcatggagagctgggtaagtccacaatgtgaattaactgtgggctgaattgttggagcaggagaatgatactaccagatttacttgttaaatatttcacaatggtgatagtataaaatgtagctaagaaaggttgaaattagaggcaggggacattagactacagatgacaaagtttttcacagaagacgggcataaataaaagatacattgaggaaatacaatagacagaccttgtagactacaaggatgtgtgagaatgtgggagtcagaagcctttagaaaaacatgagtttctaacctggaatctacattgacagagatattatgtaccatgttaggatagctgcagtagtggaatagaaatggttatcgttattattactatgttgggttcttgaaaattatacattactggttaatctcaacattttaactcatgaatatccacccagtgtcgattactgtcaaaacatcctatatccacttaactttgagtgaaggctttgtacacagcttttggtagcacgtttttggagttagcttccctgtccccccaccccccaccccccgccacacacacataaccttttactgtcaaacaagcaacctaaactctcttggtcctagtttcttcatctataaaatgaggataataatatctatctgaatcagttagggcaagctgatagaacaaatagactcacaatgagtaatgaatgaacacaatatggatttgcttttccacgttaaaagaacccaaggtgatagggcatagggagcaggattatactggtgtgagaacttgtactttagctgcagataatcgttcaggaatcccgatgtatggtggcttttcatttttgatgagtggcttccaagtttacttggtacattagcatctggtcagtaaaaggggcaggggcaggagtatgtgggaaagcaccgcctgttttataagggcccaaattagtagttatctctgccattcatactgactgtgtggtcaagaacttgtcacgtggctatacctggatgcaaagctgactgagaaacacaatccctggctgtacagtcacttcttagtgataacttcaaaatgtcatatgaatacttaccgttctttagaaaattaggtaagataatgcatatggcacttttagaacaggatctagaatatgaaaagtgctcagcaaacattaggataaggggaagtgtggtggacaggaggcagaaggactctcttccttgttctgcccaggaccttcatagttagcaaatttttccactcttcagatgattaaaataatgcttaaggttaatgaaatcagcgaaaaagttttaaagatatgaaatctagtttattcactaattataagagtaagtaaaaacattttttgataaaagacttaaattgagtaaaacaaagcagcaaacaaaaaacagcatgaagagtttggcccaaacgtagactcctgatttttcaaagagcagcatgaagacaggccacaagaaacagaggagtttttgtttatttgtcaattaataaaaaggaggcatatagtcaaacagctcaaagatttgggtcaattctcttatttgctcttaaaacttgcaaactagagagataagaaacacatcaaaagtcagacaaatttttttgtagaagccaaattgatatctggacacgatgctagaattttttcctgaatatataaggttctactaaattattttgtctcaactggcaaattatttatttgtaagcacaactacgtagagatatgtattcagaaagtcagactccagaatagatatttgaatcttataggaatgttaaatgttgtctaaagaatggattcgtgttcaccatgttcttgtaaaatgagaattggctgtcttatcgatatatttatcatgattattattctcttattctgtcttgattttagaagtacagcatgcaaatagcattctgtgttaatcattacagtatatagaattgatatacacatttctctagaaattgtcctaaacttttgggagaaaatgctaacggaataataaagactgctaacaaggcaactaaaaacaatcctttgtttgctaacatcatctacagtttaaaagtcctcatcacatcagtaacattctcattcttcacactaagcatgctgctctaaacacagattggcttattgtccttagtgttcagaaactgcacctgttcttttctaatggtatttaaaagaacaatgctgtaattatctactgcatgaattacaagtatccccagaactggtaaataatataacactacaaactgaaattataattcaatgcttatttgcatgtagatgaccaaaaatgtctctccatgcactcttaatctagtagacaataaaattactaccatgtcacttttaaaagataactctgtttctttaaaattactgtctgagctgaatacattttacaattggtttacatagaggaaactattggtaagaggaaaacgactaaaaaaataggatttgtttattagctttctcactctgatgtccctaatcttgatcctttcttagatgacaataactgagtggttttgtgtaaatgggattatcagatgatatcaaatatgatttatttatgctttggaaaaggagatatgtataaataaaaacacagtgaaaattttattctgactgctgtgtatatacatggtagactttgcaaatcaaatcagaactttcaagtatttattcttatgagataataattggacatatctgtaagattttaaaattattttgtatgttctactgtagaaccggtattggtataaagatcttttttgatctagtgtaagtcaagctttgataaataaattgagtcaggaagaattttcaaagcattagctatatttaagatatgttacatccaatatcccttttcatcacatatgtcagacattagtttgcatgatttaatctttctcttgattctctgctacttcgtgcataggtaaaggcaattcatcttttatgtgataaactggtaaatcacagcaaatatcaaataggaattaatcctggaagcataatttattaacaaataatgtgtattgagtgtggaattatatctcattctaccatttttgtcagatattggacagacttctaagaaattaaattctagatcaagttgatatttaagttctgtgaaaccagtggagaatgataacctttattcatcaaccaactcatgtccatttgatgtagacatacatcatcaattgtaaatcaatatatcactgagaagctagcaaaaatagtttgtggatgataaaattgaattgtcagttaaataacacattgtaattgtgtgataaatatttatataacaaattgatgaagttatgtaattacaaaaaatgtaattaaaagtcattttaaagtctgggaaagtagtcctgggacttactatatgataaatcttgcacatatatcatagaatctaaaccttaccacaaccacataaagtggttatttctccatttatctagaggaagaataacgaagttcaaagaagtaacttatgaaattcacataattatgaataagtatgagatagaaatgttgactgactactggggatctttgtatcctcctacctgatttttccaactccattgtatttagatggagacatgatactaattacagccaatgaattgaaagcagcattgatattacttctggaccaagaaatttgactcaatgaatcactctttgtcttttctttccctatcctattgatcctggaatcctcaagttgaaatagtgaactagattacactgctataacatacaaatcctaggttttcagcgatgtaacatgaaaaaagttcatcattcactcactctcccagtccaaaaaaaattagaaaggactcagtttcttgtagtcactcagatagccaggctgatgggtggtccattttgccatatatacccataattgctagggcaggaaatacaaactgaaatgtgcaatctttactaagtctttcttccagaagtgacaacattacttttattttgatttcattgtgaagggaatttacttggccacagtgacggttagtttgatgtgtgagcttagctatgatatagtacttgtttattcaaatagataattgtgggtgtaacaaaaactcatgtaacttttagaaagtctgtatattcagaactgtaaaaagaagaaaagacaggatgaaacctaattatatgttggtagaactgacatttgattaaataccttgaaaaacaactgatcttttacaaaatgttttaaataggccaatatgttgtattttatataaatgaataactataaatactttaaaacactttaatatttcaaattatattattgaccacatttatttctattaggtgtttctcacttaggcagattaataaaggatgtattaacgtgcagtttcaaagataaaatttggaatagctgttcaaatgtataatcatctctttagttcagaaataaaaataaattcagataaaaatataaaatatatcaatttaaataacagtttattagaaaagactcataatgctgcattactaatttatctacagttataattttattccatattgtgtacaatggtgagacacagtaactatgattcgttcacttaagaaataaataaatactgtttgtgatcaaattaaatatttcatttttgtaagagtcacattacccttttaatggttgcatgagtaatcattgttaaatatttgctttcttcactgctctatcagtccaatgaaggtagaaactatatccatgtttgaatttgaagaatcccagcactctttctcctatgtaatgtacattcaaaaaaactgcaaggagaaaacaatcgacaatcaacaaataaatgcatcagataattcctgatattaaaatctatgaaggaaataagcaggttaacatgataatgattgactggggaggagggtgccattttacatagataaatctccctgaagaggcaaaatttgaacaaagacaatgaaagatgtggccagctggccaatgtagatctgaggaaaagaaataaatatcaaatgcaaagacactgagcatcgtcagtgaactgggaattaacagtgctaatactgaggtgtcttgcttcaattaacaataaaaataagtaaatacacaattataataacagggtgtaagtcctatgatacaggtattttaacaggatatacctctggaatatccagaacagcacagaggaaagacagtcaaagcataccatggtggaggtcaagtgggaatgtggaatggatctctctagtattgcagatagttctgcaaattcaaggtgaacatatgggaagtgcagagatacaatgtaataccattatttatgtagaaaagccaatgttctatgaaataaactgttaaatttacttttaatgatttattttttaaattgttcttaggttggaagaatttttatcagcattttgtcaagccaacttgcattttttattccaattgtttaaatattttgcacataaaattatcaatgaatggaaacatctaaattcctagtcaaatcaattccagttaaattagggtacatgttaagttactctgaagtaaaagactcaaatggtagctttcacaggatacgagtatttttcacacttatgttaggaaggccttttatagctggtattcacagtgttagagggctagtttccttttagctgtggttctgtgtgactactgcagctatcactacagtaactccattccagcagcagcgaaggagaaatgaaaaagagagcctgcttcttccctatggaggcatgccttagaagttgaatatatcatatcagtcacaatccagagagcagaacttactcttaagtcactataggtaccaaatgttagaaaatttggcctttgactgactggctatctctgtactcagctaaaaagtttattgctatgcaaaggaaggaagatgactattaacacacaagttatagtctctgctatatcctcccattgtgattttaattttaaagtgttagattcatttctggaagtgtagaaatttctttaagataatcaaatgaaccatgcagaaaatcaattacatattctgaatagctatctcaatctcactgcttatttcttcattattatcaaaaaagtttgcatgttaataattgttgaaataaaatgtacaacatattcttcaaggagaaaaaaatatgttttaaagcattgtaaaagagaagaaagatatatgggcatatctacacattttattcaaaaaatagtatgtatatatataatatatgtgtatatatgtaatatgtatatatataaacctgtaaatatgcatatgtatttttatgctacatatataggcatatatagacatgttcactattacctctttagaaagtacttgatgacagagctctttactctgttttattttttaatgctttagaacagcgtgacctttatttggttgaaactaccctagttaggcatttgaatacttacatttgaggccttgttctgctactaattatctgtgtgaccttggaaaattatccttgtcaatctggtttcaatttcctcatctaccaaatgaaggtgttggacaaggtgatctccaaggtcctatcctgctttaatttccatgattctctgactcatggtacattgcaaatgctgatctaattaattttcttagtcaccttcatgacactctgtggaatatattttctcatgaagtccagaggttgatttgtatctgtaaagattttaggtaaatataaacactaatttttacttccataagtggtgcagagttgtttatgaaaatgtatactacttgtataggacaaccactcttctcccttccctgttctttttacatcaattttgcacatctctgccccttctgataagctttgatatgattcaaaatattttacacccacggtgttacatatgatgttttgtgttcaaaactatttattaaatacataatataaataaatgagtttcctaaaatagttataaactgtttaacctgaaatgattttttaaaataccatcaggtatcactgttgttatttttattaataagtatttgttaagcagcttctacgcattgtacattgtgctggactcttaagaataaaaacataagttattgccatcagctctcaaaagctcaggatcatttagggatataagttgtcttagtctgttttgtgctgctattaacagagttccactgaccaggtaatttataaatgagagaaatttatttctcaccggaagccataaagtccaatatcaaggtgccaccatctggtgagggccgccttgttatgtcattccatagcagaacagaagagggtgagagagcactcacagaaagcaagagagcaataggaggacaaacttattttcaaagcaaacccactttctcaaggatcagacgactcctgtgatgactgtattaatctgtttacaagggcagagccctgtggtctaatcatctcatctcccaacactgttgcactgaagattaagtttccaactcatgtatgttaggaaacaaattcaaatcatagcataagggcatatgccatatataagtatagagatatttcaaatgacttcagaatcactaaggagtagaaactgaagacaattcagataatatacagtttgtctataaaataagggaagaactcgggcaaagtttgatgcaactatctaaataggggaaatcatttaaatgaaattgtgaaagtgagcatatttagctaacaattaaaagagagcgcttaccaatggacagcaaaatacagatttcagcattcacaaaatctaattgtatgggctttgaataattcactggaacttttgcaatgaaaagtctacatagtttttccttttggctgaatgatatggttattcatttaggaaacaatttagaaaacaatcaatattctaattaatagctttagcagtattatgagtagtattaagtagtactaattggtacttggtataactggtattaagtactatctaaatataagtcatagcaagtataacttaatataagttgtactaagtacttacagacattgaaaataatgagacaataaaatttagaacctgaatggatagaaaggaagtctcaaaaactgttcagaattctgagattttaccataccgacgagctaacattttagtgtattgcttttcatagatgtcagcagaagacacagactcctgagtcagagactgaagtcgttattagtaatgacaaagcaagcagtataagcatctgcatatttgccccagttccctttgcctccagttcacacagggttatgtaagtggtccaggtggattctttacatgtgatgggttttcatcactgctgagaaacagagagccaagagtccaatactttttgagcaagcaacaagtattatcataagcagtaagtaagccagttcccctcctcgaggggggcgaacaattatacaggtgtcaccatcaggctatgtgaccagctacagagacttctcagtttgagaagacaggtaaatcttgaagtctggcacactcaagaataatgtgttagaaagttcaagtctggttgcaactgtctgtcccaacagaaggataattcaaaagtgatcccagtttccctagactgtctgctattgagggacatgacctcagattcatgcatctttataatctcagtagccggcacagacaaaacactatctatatctatacctatttctgtattagttgcctaagtttgcagtaacaaattactgcaaactggatggtttaaaacaacagatatttattctttcaaagttctgaaaaatataattctgaaatcaaggtttttttgtattatactttaagttttagggtacatgtgcacaacgtgcaggtttgttacatatgtatacatgtgccatgttggtgtactgcacccattaactggtcatttaacattaggtatatctcctaacgctatccctccccctcccccacccccaccccactttaccctctgaaggttctagggagaaagcctttcatgccggtgattcctggtgttccttggcttgtagctgcattacttcaatctgcctctgatgtcaaatggctttcttccctctatgtttctgtaatctcctattcttataagggcttgaatttagagcccagcctattctgatatgaacttatctaagtttaaccaattatatctgcaaagaccctatttccaaataagatgatgtctgagattctgaatgaacatggatttggggaggacactattcaacccagtataatatttatattcatatctatccagtgagtgtgtgaatgcatcaatacatgaatgtacaaatgaacaaatgtatgaattcaaggctatgtaagtgagttaaacaatggatccgatggcagaaaatgatactaaaaagagagaaggattcaatattatacataccaaattaaagttgatggtatatcttacaagtggagttctcacaggcagttggaatcatgtcagttgaaacatgtcacttcactgctactacccttgtaatataatattcttcacagtaatattgctctattatcctcctccacttattcatattacattacattcattctacaagcctcagttcatttaccatctcatttggttatttcagtccacacgatttttattttttaaaattcctcttgcatttatttacatactcctaatttgctttttttctattttacttcatgtattgattcattccatatatttgaggttctaatgtaataggcagttagaattcataaagaatagctctgctttcttttctattcctcccttttccactttccccacacaatagtatctaaaatgatgctgacagataattagaactcaataagaacttactgcctaaacttttatattaatgcttatgcaaggtttccatatggaaactaatttatatttttgtctgtattttacacatttcaaaataggagaaccaaggtaataatatttttagtgtttatttgtagaaatattatttacttctgcagtaaatacaaacatatcaatagcacattgttagcaaattgatttcataaacatttgatatctgttttgatttttatcactatgtagtctttgttttaagttaccttaatgtgtgctgtttttcttaattgtacaattattgttggtttgtgcttttagttctatcatactgtaatttgtttttgtaaaatcagttttgttttaatatctaatattaatattttatttttcattctcttcatatccccaaataataaaacacattttgttataccgtaccagtacagtacagtacagtacagtagtggcagtctgctcttaaccaagtaaactatagctccggccggttttgtgttagatttagtgggaggttgccttttaaaacttttctgtttttcagctttgccaatatgccttatttattcatgatttcatagataattttattttttggcattttcactttggttgacaacatgttgtgctataccaaaagatatctttcttgtttatattttcccaagtttgatttcaattctacatgatatgtcataatttaactcactgcctttttttgttcttagtctatagacatagatatgcctatctgttggcattgtgaatgcttaattcaaatcgtatgtttaaaagattctctctttagtttacaaacaagcagttttagaaaaattttgcacttaacaaaaaataggtttgggccgggtgccgtggctcacacttgtaataccagcactttgggaggccgaggcggtggatcacgaggtcaggagttcaagaccagcctggccaagatgttgaaattccgtctttactaaaaatacaaaaaaaaaaaaaaattagccgggcgtggtggctggtgcctgtaatcccagctactcaggaggctaaggcagagaattgcttgaacccgggaggcggaggtggcagtgagccaagattgcaccactgcactctagcctgggcaacagagtgagacacaatctcaaaaaaataaattaattaaaattaaataaataaattaaaaagtaggtttgtaaaattgtatttaaatgcttgacattataagaaaacagtagttatatgacaatattaatgtgtcataatcaatgaacctgctgttttcttgttttatatgttgtattttctaatacacatatttaatacaacaaattattttctagtccattttcatggaatagtaaaattttattatgaagtactttactgtgaattggctgcaatgagataaggttgtaacagagaaaaattagtgctgaaggggaataagaaaaacctgggattttcagaattctacattctttgaattcagaatcactagctgctaatgactagcctttggattttttcaaatatgtctttcagaatgcccatagaaagtagttaacctcttcttctgcaaaagagaaaataaattaaaaagtaaaaacaatgctcgtctagcagtttgaaggaaacagagaagtaccatatctacttgctagatgtgatggactcaactacttactttactgaaaaagagttaagctaacaaacagctgctcttcgaggatctgtagatgctgagtatggctctggccacacccctgtgaggagtagcctgcagtccccagtgggagtacaccagcagcacaacagttctccatgttagatgatgcttatttcagaatctgggactcccagcttaaggattttacaacacaaaaagatacatggaaggcattaatcaaccaaaatacaattacatctcatcattgttgcctttcctgttcctcatgatttttctgaataaaatgccttaacagttcactaaaaatttgtctgaaatataaacacctgcactcagtataagtgaaacttattgacaataggtgattaaaaaagtaaaaagagggctgggcacggtagctcacataaggcactccaattcattcatcccagcactttgggaggctgaagagggaggatcacaaggtcagactttcaagaccccccgaccaaaatggtgaaaccccatctctactaaaaatagaaaaattagccgggcatggtggcatgtgcctgtaatcccagctttcaggaggctgaggcaggagaataatttgaacccaggaggcagagtttgcagtgagccgagatcgtgccactgcactccagcctggagacagcgtgagactccatctcaaaataataataataataataaaataaaaataaaatgaaaaataaaacagatggaaaaaatctttcatgtaatgtaatgttttaaagatttggaaactattaagaagtcatgatatgaaaaagaaatggatgtttttatattaattctgataataaaagtacagaattgaatgcaatctttttatttaggtgctaatcagataatcggaaaaatataaatagcaattatcctttgcttcccttattatctagacagactttaaaagtttatattttaactgttattattaatgtaggaacataacttttcccacaattgagcaaaccaggaagaacataaaatggcctgatgagagaaatggaatggatgactatggctaaaattaaaaattctcagctccataaatgttcctcgaatgaattactaaacgaatgaataatttaggttttctctatttccctattgaaaaacaaaaagtctttttccctcagtaccgcttaccactttcatgtatatatggatcttttacaattgattgatgttttaattgcctgaaggaaataccattacctttattatgcctttaagaagaagctggttttgtggaaaggcagtcttaagtagcacagaagagtaccatattgcccttcaaatcccagctcagccatttcaatgttcatgttaaagttactttgctccaggctgtgattcacttttctgtgaaatgaagacattagtacttatctcctaggttcatggtgagttccacgtgagttaataaaggcgagacgtgagttaataaaggcgagatgtttagaaaagtatctggaacatagtaggcacttgataattattagccattctggtaaaagtaagtccttatgaaacatttatttattaaaaattaaagtataagcaccagtcaataagtcaatatcattatctatacagtaaagattttaagagtaaaaattaaagggaacatctttaatttatagttatgctgggactataaacaaagactttctattataataggcactactgctaccatattttcttacctctatttaaaatgcagactattttttgataaatatttttagagaatcacagagctttatttgaaatcagagttgtttatattgtgtgtgtgtgtgtgtatgatttgggaacagaatattaatttaagactaaaacatagtggattcagcatcatttatgagatttatttgtaccctttgcccaaaaacataatgcatttggttctaaccaaacctttggtgacaacttctgctgtgcatgttattaattaaggaggtaagaacaagttaaatgataccacatggaatacatcatcgaatccaaaatgtgagctattttataaaactgatctgctttctacaaaaagtcaatggcatgaggagaaaaaagaaacgactgaaaaagacttaagtgatgtaactacatgatgaaatgagcagaatcttgttgaatcctaatttttaagaattaaaaaattatttttagattatcagggtaatttgaatatgcccaggtgttagttcttgtcaataaattacagctggttttgttatgtgataatgacatttgtgattctgtaagttaatatccttttaatttttaaaatttgaggatatacactgaattgcacaccaaatatttaaaggtgaaattacttgagatctgggagatgctttaaaacattctaaaacacctgcttccccaacctaacaaaaaaatgggaattggtagataaaacatataaaacaatatttgagtaatgtttgaggctagctaaaaaatacctgggtcctcaagtagaatctctactgtttgtgtatgtttgaaattttcataataaatagtgatttaaaataatagttaaaaataatgaagattgaatataggctccttaatattagccattgtgtcttttcaggttttcaacaattatttatagagtaggaagttaataaatacttataaatcttatgtattgttatgtgcacatttctgtttatactgacacaagcttcttatagaaagttaacttaatgttgaaagattgatactacaaccataaagcctttaacaagatgcttcttcttaattgattgtaaataacaatgagacattctctctaacaagaaacaattgcattacaaaaggatttacacttttagttctatattctgcaaaggcattatgctgagaaggtcaactatgttttgtatgaaggaggagattaaatagcaaaagtagcagcaattactcccttttcaccaactgtaacttgatttaaacaagtcataagctttttaagttgagaataactgtaaggaaatgatgtccttatatccaaagccctgtatttgacagtgatgtaaaaaaattgaatttgttttgtatacagaaattctaagtcacataaggcactcaaattcattaagcaaaagagaacatgatagaatcaaaaatatttcacaggcaaatagttaaatacttctgtggctttaattctttcttcaatttatcttcaggtaactattccataaataaaaatttatatttccctcacttgattttggatcagaaaatctattaggaaaagtaatgcaaatgtgttcttttgaaattgtgtttagtccctttagattgttatgtttacaccaaccactgatattggaagaacatttgaggacatgttaccccagggtggagagccagttacatagtagttatgctactttgaatttaattttacaaacaaataacagaaaggacagcaggtgtttttgtctaacaccattggttatgattagagatattacgaaactatgaaaattaatgttgacataccactttgaaagctaattttcttgtgtgtgacatgccatagcatatctaaagtatgtgtattcccacttgccggaataacacattatttgttagagccgttagttctaaaagcagatgttgtctacttcaatcaattttcagctcttaatggtagattttaaccacatttgtgaaaggcagatactttcaattagtatttttcaggaattacatgacatttattttgaggagaaatttaaggctgccagaatctattgtagcataggattatctggataaaaaatatcaagtatagacagtattgtacgcagctttaggaaacaacttcatttttcctctgattttacactacacaggagatgatgaatgtgtctatcgtaagtgatatggaataaaaataggaatagagtgaatgaattagcaaagttaatatgcacaatataactctcccaacgactggcaactttttgaggtaatccatttgctttctttctcaaagaaacatatacactttgaatttcattttcctatgaatgtaaaaagaaagccaaatagaaagataggtagaacctgttcagaaaatcaatttcatccaccatagtctatatgtaatcacatggtagagctgcaataagaaattatgtcaccttcggtttcccacagttattgctgactgctcttctcttatctgtcctaagcaaatacagttttagaacttctccatatctctgtatccaaaaaccactgaggttggtgaggcagagagtcgggatgttcctgtttttattgttgtaattgtttaagcttagtttgtattgctaatggcatgtataggcatggacatttctttttcacattttttaaagataccgtagaaaacctgggacgtagaaatatttgtcaatttatagatgagaaacatcttcaaggactgaaattttgatttgctcttctcatttgctgtattctaaaaatttcccctaaaacaaatttctattctaaatatcacagtggttgagaaaattgaatggagtggatttttggaaactgaagtgtagtgttgggagcaaaaaggagaagaattaggtcataattttcaactacagatgtttctactttgctgagaattgtttttagtatatctaagaaaatcttctctaaattgaatataggcaaattaaacagagtgcttatttgtacctactaactatgcctatcattttacaaattttctaagtaaatttattcatccattctttaccataatttattgagtacatggggactatgaccatgaataagtgagataaaacttcctgccatcattagatgtaaaattctcactaagaaacacatttaaaagcagaaaaatgaaaaataaatgcaacaagaaaataaagtagggaaggatgatcgagagggctacagtggccagatattttatataggatagctatgagaatcctcactaagaaaatattattaatagtttaaagatctgaaagtgattaaggaataaattgtacagatatatgagcaatggggttccagaaatacaaaacagcaaatgtaaatgctcagatagagaagcaaatgtgtattattcaaaatagtgaagagaccagtgaagctgtagtggagtgagaaagtgggaaagaaatccaggtgagcttagagagtagtgggaggcctaattatacagggtcttacgggccactgtaaggattcccatttgtgtactaaatgagatgattgaaggactgtgatttgagccgtgatatgatcctactttggtgtaatataattacaatgtatttagaagagaccagtagaaatgcaaacacacatgcacacacacacacacacacacacacacacacacacagtggcaaacttatttctaaaatatttgaagagaacagaagatagttgttttcctttggataatactactataaagtctgactaacagactttatagttactataatctaatttataggtactgattttttgggggttgtattaggccattcttgcattattataaatacctgagactgggtaaaatataaagaaaagaggtttaattggctcatggttctgcaggctttacaggaagcatagtactggcaactgctctacttctagggaggcctcaggaagctcacaatcgtggcagaaggcagaacagaagcaggcatgccacatggcgaaagcaggagcaagagaggaatgtgtggggaggagatgccatacacttctacagggccagattccatgacaactcactccattcatgagaactctgcccccatgatctgatcaccttcccccaggccccaaccctaacactgaggataacatttcaacatgagatttgggtgggtgcaaatatccaaactatatcactggtataatctaagtatttttattgaagacacataggattcctgagtcttcaggtagaatgtagactgttgaagctggaaagaaatttaaagatattctggtaaaacctagtttgcgttattagtgaaaaaaacgtattccaaaagaagttaatatgtcctcaaatcacacagctttggagtccccaaaccatggattggacaggtctcatttcatatctcaaatccagccattgttctgtcatgtttgcaatatactagaaatatgctccctggttttagttttgccactaattgacggaggacttgagtaatttgctattgttatttcagctttctcatttataaacaagagtatagttctatttaattctgacttattttgactcaactctatttttcagtaattccagatgtttagaaatgggtaaatgtgtagaaacttacttaatgtctccttaaaggagacacatgctgtttgtttaactaattagcataattccgtgaaagattgggattatgttcttctttgtccatgtattttaaatggactgacttttcggcaatggtactgacaagttgtttcagaactttatgttccacaatctccgccctctctaaataaagataataaactgaagtgacattgcataattctccaaagatggttaggaagaagaaggaggagcagcaggagaaggtaagggagagggaggatgaggaggagtgggagaatgataattaatcaattgacttaattattaattaaggatgaggaggagtggaagaagaataattagtacatagggactattaccatgattataataataatcaattgattattgcttttttattatcttaaaatatttaattggtaatatttgtacatattcaaagtgtacaatataattcgatatgcatatacactgtgtagtatcaacagttatcacaatctagttaattaaaacatccttcaccatccatactatacattcaccccccacagtttattttatagctgaaagtttgtaccattcagtaatgctttcatgaagaaaaagaactacatcattttcttttaatatggagccctgtgctttgaatacttaattgaaagtagctttgatttaatcctgggttctttcctggggaatgtaatgtttcagtacaattctcaccaaaacaactttaggcattgatatatgtgtcaattttcttccaatttagaggactagggaaatgctgagcttcagatcatttactggagtgatttatgtgggagtaaactaaaatgaggaataaaatattccttacaagaatccaaatacagttaagaagacactaaagggagacttttgattctttagaaaaggaaaaagtacacattagattaaaaattcagtatgtacttattaattttcaaattgtttttcataatccaagactgtaaatgtatttttctaagcttttcagtgcaaaaacaaaatagcattgtgaaagatagaggctatactacttgcctcctgtggtgccatggtcaaggaattcataatatactaatgcatagaaatattcagtgatttcagtctcatttcagttaatattttattattatttgacattagaatatatcctcataaatcaagcaaatagcatatactctcaacattaatttgacattgttgcaggaacactgtgatatggattgctgaggctgaaaacacatacttaatttttaaaagccttttctttacatgcctccaggttttatcttcaacaagcactaaaaagctttcatgtataaccagtcatgcttcaaacctccacattctctcccatgttgttactactttttttgattgttgtactaagttatatgtttttactctgtttggtgaaagaaaatcacctgtccgtttggtcaataggctcaacttcctctttcagattttcacccttttatctatttattccacaaaagttccaactatatggcctgcttggctttcattttagagttgctaaaaacaagttagtttctgaggtattttcctctaaacacttttttgagactcagtatgcaaatccattcaagttgtttcagccctggaacactcctccagtcctccaatctccattcacagaaggttcttaatttttctttctaatataggaagaaattgcttccaatggtccctgaacttgatttcagggccaattatgattcaccctcctttcccctcaagtttccttatgattgtgactttgaaatggcaagatggctcctgcagcttgagacctcatgtccattttcagggtgagtagcagaaagtagtagagtaagccatgtctgttgactaaaggagtaagaagcaatccaagactctcccacattagacttctgtttgtttcagaactgcgtaacatagctacctctaactctaagggaaactggaaaaattgttttattttggcacattgtgttgaacaaaatcaaggtcctgttaggaagaataatagacctgtgaatattggataggcaccaatgtcaaataaagcacccactcttaaattacataattacatatcacgttgctgtttctcacttacctcctcagattccctttgcccctcacacaaccagataccgtaacacttcaatatatataaagatgacctactaattaaaaaaagaaaagaaatattttgagtaaactgtttaaataaggaggtgattaccatcgggtccaaagtaattcccttcctctgttccaattaaagttctaaagttttttttttttttttttttttttttaatggagtcttgctctgtcgcccaggctcccggctggagtgcagtggcccaatctcggctgactgcaagctccgcctcccgggttcactccattctcctgcctcagcctcctgagtagctgggattacaggcgcccaacaccacgcccggctaatttctttttgtatttttagtagagacggggtttcaccgtgttagccaggatgatctcaatctcctgaccacgtgatccaattaaagttttaataaaatagtgtattctggttcatgatagttttttgacaggtttatcttgtgctagaagaatcatagattgtgattcaaagtgtttacataataataatttaatttccaaaatcaaaggctacttggttttaaccctgtgtccattcagtttttgtaattttttttcatggaatatagatgtaacctaaaaatctattcctaatggccacaaacatcagctgaggtgagttgcccgtttcttagtttttaggctggttgaatagaaggcctgagatatcctgattcaggtcacttcagaattccatttatactacaggactccaacagtcatctggctttaacatactctatgaaatatgtgttttagtagagggtacttggctaaactatagagaaactataaaatatcatgatgatatcaagatgccagtatgagttacatgcccatcttactttgtgttgcttcatccagagaaagtagagcagctcacatttttttccaaagtttatctgggctgcctaaaatgtttcagacaactctcatcttagaaaggtgtgagattataattacctagaaaaatatcttttctcaattttttttcacaatattttatgtgcctttcttgggtgggctagtaacatgatagataatagagtggttgagagcatgagttctacctcattttcctagacagactgtcctgtaacttatgaggtatctggtgtaccttactctccctacttataactggagactattaaagcattcaccacacgtattggttgcaaaggctaagtaagcattaatatacaaaaaatgtgtcatagcccatcgtgtacatagtgagttctctttattgtattagtcagggttctccagagagacagagccaatagaatagatatatacagatatacatacacacatatgaaaggggacttactagaagaatggactcacatgattaaagaggctgaaaagtcccacagttgatcacctgcaagctggagaaccagagaatccagtcatgaggatcagtccaaatctgaaagcctctgaaccagagaagccaatagtgtaactctcagtctgaggctgaaggcctgagaacctgagggactactggtgcaagtcttggagtccaaaggctggagaaactgaaattcagatgcccaagggcagggaaaaaaagagcttgccaactccagaagagagtatgaatgagtttgcttttcctctgacattttgttccatccagatcctcattggactagaaggtgtctgcccacattgggtgagagcacatcttctttattcagtccactgattcaaatggtaatctcttctggaaacaccctcacaggcatacccagaaatgatgcttgtccagctatctgcgtatcccctaatccagtgaagttgacaccaaaacttagccatcacattgtatacttatgattattactttatggtgtatatgaggaatgtgtcaataggttgatggctctgaatactggagagattgtgactcagaactctagtaagtacatactggggatctggtaaactatgtccagaatgacttttgttaatccttggcttgataattatgtatgattttgtaaggtcaaactatttttgtttgaacaggtatttaatctacatatcatatgtaaatatatgaaaaaatgtaacttttcatatcatggttttagcaattatttacatatgatgtggcttctttttatcctccaaagaatcattttaatatcaaaagacaatacatgataaaagcaatacatgaatacagaaataaagataacataactttgtaaacaaaaagaaaacaataatatctgatattcaaatgatttcaaagtggatttactgttcaaaaattacattaaggctgaactagaaacactaaggaaaaaacttacggatcttctccctgctaactgaacagatgaagctcttcaagtaacacaaatttctatcttcctgccagctgataaaaggctctcatttgtattgctgtggtttaccccacaagtaagagagaacagtgtattttgaacacctatttgatttgcgtgattgctgatatcatccaaagagactcattttttttccaatcagatgatattttggttagtgagaagtcttgtcactgaggtgagggagatggtctacattttgtaactttgtctggaaaaccaaggattaaatatttgttttctatgtagatgtgagatagtaatttaagttaattcatcattgtttgtagtctcatctggaaaataatgtggccatagatggttaggcatactagattgcttctgtctttagaacagtcattttatacattctgattttattttctgtaaacataatgtcatattaaattgttagaaaaattaagagataatacctatgtactcttctccctgaaaagcaaagtcatgtgaaacaggaccacattttactgtttctattagtattttaaatgagccgacttttaaagttatgaattgtcattccttaaaccattgtacaaattttataccagcgtgtgcgcacacacacacacacacacgatttgcttatgctcataaaaggtaacatttgtaagggccgtataacctattatttcctggtgattttgtggcatctctattaatgcggttatgattctgagttcagaattttattccaaccactagaaaatgttaatataaagctcttgcattgcgagtgtgacttgggtgacatttttgatcgatgaagttcacctatcaaggattcctagaaggtgatattatcttggtgttttttgttttgttttgttttttaatggcccagtttctgacaactattcagctccagtatctccatctacattagcattttaaagatgaccagttttgaaattacattttagtcaatcaaactcctaaacaataatatagagtctagaaggccatattgttatttgatgacatagcagtcacatgacttacaataccagaaatcagattattattttccagatcataaattcattaaaaaaaattcagtgccataattatttgattttccccagtaaaagagtttttaagagtgttcactgttacattttctcgccaacataagtcgaggtcaattttgatctagcaattttgtttggaggggttgggagaaaaagcactttcttggactctagggattctagtgtaacaatatacattttcttctttcttaggagatcatactccaattaggaaagctaacatatagacaaacacagatactatcaggaatggtatattttagttgaaatcacaagataagaatctattatacaacactatattgttatagtgggcttaattacaaataagtgatatagataataattaacacacttgtccaaaaaagtaagtcattgtaagttagattgttaaggaagatcatttagggtaagaaaaattgaatttaaatcttaaactggctaagcagaggaaaaaggacattcgattctgtaaaagaaaattccacgtagttgaaattgtacatgacatatttaggagggtaacaaggacagatttttaagtgtggaaaatatgttattgagtaatgacagctagatgttgtcagaatgtaaaggcttcgaagaaaatatcttattgagtaatgacaactagatgttgtcagaatgtaaaggcttcaaaataatttatatttttatatgaaaggtattaggatgtcatccaatcagaaattgatcaatttaagtagattagcttggcaatacaaatctaataaaactattttacaaaaactacattcaagattttcagaaaccaaattcttgctttaattgtgacacaaaggaatgagctgatattcagcattgagaacaacaacgatgattgtaaaaagagagtaagtagtgagtccagaaacatttggtttaaagggatgctaaattgtaccacttttggaagcacactaaaatttcattaaattatttaaattatacaatttcatttgttttcaggttttcaatgttcaacaagaaaaatatattgatttgtctttaaactaatgggaaattggtcatgaaacatattttaaagaaaaacagatattatgaaaataagtccaggttttaaaatgtctaccactcactgggtagtaagaaaaaagtattaaatcattgtgcacaggtaccctaaaacttaaagtataataaaaaataataataaataaatatatgtttttaaaaatcctttacaaccaagaacatttctagtttaagtctgcacttgcttttctagcttcctctctatgttgttaattaatgtatttattcataacaaatttatatttagtttcaaatattagggtcacagacgaacagatctatgaaggatgaaatgaaatgaccttttaaaaataatattatacttttaaaatccttaaaatttattgtttagattttcaaatttgaattcataatgcagagattttaagagcaataaaggttttgaaggttgcaatgcaaagatttaaacataaacactgtaaactgacttaggtactttatgataataaaattatgaaataaacatatgttatatatataaaatcattttcattatatatatgtgtatgtatataattgttttatctcacagaatacaaattatgtagctggtttgataacagtgacctggtgtaatgaatattatgggggggtgaataccaagatgttataaaagaacataggagaggcctgatggctcctatttgcagaatagttgcatgtatccatattcctcaatcacactaatcacttaacagcatgaacttgcctataataatactttttaaacctttttattttaatatatatgatttagtgaaaaatatatttcaattgacagtaatctttgatagaaaatcgcatgtgtacgctaatttttaaaatatagttatttttggtaatttttttacttccagaaaagtaattgtgtttatctttgtgtgactcatgtttctcactttaaaagttgatgtgtttctttttatattttatattataagtggaagagagatttatctattgatttttttgaactatattatgctgcatagatgtggacagaaaatttctatagctctttgagaagtaagcacatttttctgtgtacaccacttaaccagattaaataataaattatttgaattacatcagttcatgacgataagaagctgtgattctggagaaatagagaccaggggtaaacctttagctctgacactcactagctgctagatcttggacaggttctagttatttaaacttcttaaaacttgtgtgtttatttatgttaggataacaagcatacttatatcagggagtagtgagagttgtgaaaatgaaataatccttgtaatataactgtgcacatgagaaaagctcaatgaatgttaacatcagctaatattatctttaaaatataacttacacattcaactgcttcacacacttattcattgccttcttgcaagccaaaattattagtagataattgaatttaggttaataaattaaagtgtgtgtgtgtgtatgtgtgtgtgtgtactttcttgagagactcaaagttgagggatctttgaaagtgacatttccctttctcagagtgcaaaagtatttccaagagtgaaactgttgtgtgtcaggagtgtcaacatcagccctaggcaacgctgccaaaactgagatggccagagcaagagtctggagagacagtgacagaattttatttggttttatctgtctgtgactgagctaataatcagcttatgcttgcttaaatggctgtggatgcctaattccaaatttatatttaaagtattcatgtctgagaataacaaatctatgaaggctgaaataaaatagcctaaccataaaaaagtgctaatctttaacttcaaaaagattctgaaattatatagtttaggttttaaagtttgtatccacattgcacagatttggagagcaataaaggattagaaggttggaataagggacctttgaaataagattattactgctcagagcagatttaaccatgagacgaggtaattgtttttctatcaacatatgttctaatacttcagtgaaaagcgttacacatctagaatgtctgtcctgaatttgagcaatattgttttccatatttttgagggtttcaaaaggatcacaaagaagtcatacaagtatatttcaatatagtcttgatcatgttattaaaatggcatctatttttaaaaaggtgaaacacaggtatatagtgtaatactatgcgtgagtgcatgaattgttgaagagaaaacgaaatgttccatcttctgagaaaaaaaaagtggctataataaagaaaatgcctacaatatttctttaaaagatgatagtaggaataacattcataataggaataagagtttacatttatttcctgtttattctgtgcacaggcattcttttaaatgctttacctgcaactgtgctttaattcttagcacaaccctatatttaattcctattttccaggtgaagtaaatgaacaggattcaaagtggacagtctggctcctaagaaaatggtctcaagctaatatagtgtattgtcactcaagaacctaaatgttacatcacaaataaaagttattgtatctttgatgttgtcctgctatggcaataaatgactgttttccctgaggttgttaagtgcttccatctgccccctccctcactccattattctgtgaaacaaaactttcaacacatatttaaaaaataatatttagattttttcctctgagtttgtcttcattctaatgcttaatagatatgtaactaagtcattaaaattgataaggttcaattgtattcaaattttaaaatgggattagcatttacaaactactgaaaggagatgaaattaaaaaaaaaaaaagtgactggccccagaatgagagatgttcaccaaacagttaatattactggaccagaacagaagtgatgtattatgacaggctttagtgtgtggcttattcttcttatgtgtaaaatttctactacagtttataaattttattgtacatagttgccacggagccccaaaatgcatataaattaaaagccatctgctgttgtcctcttctctacagaactttcaacttttccttaccttcttgtagacatattcctccatattgatggttagctggtatttaaggaatccctaataacagttttgggttgttgatttacatacataatggaccttgcaacctctgtgtatacgtaatagttctctgggactgcatattttaacatgagattcctgaatcctactcctagaaattcttatgtctgggatggggcccaggaacttggttcaccaatcatacctaacatctttaatgagagaaataatcatatcttaagttgattttctttaaaacaaaaaaaatgtatagtcaaacatttaattcatgttgtttcattatgagcatttacccagtgtaagactctgtcgtaggtgggttttacctgttatatcctttcatcctggcaacagatcagcaagtgaaatcacagtttaacacattgggactcagaaaactatcgatagtccacagtcatgcagaatcataatttgaacaaatatttgcttgaattccaaagcttctgctgaaggttaaagaagctaagtaactcgtcacagggcacagggtaaagtatggctgtaaagtcagatattcacactcctactctagtcctcttttgacacatgtataatgtgtatcctgtggagaagagcaaatcttaaataaatggaaaatattataggttgaacaaagatgactagaagaaacagctgtctaaacatttcaaactagtatgtcacatgatttctcagtggtataaacattaatggccttttagctaatgattaatttttccagttaaattttaagtgaactccggaagatatttttctgctcataattctttcacctaaaagatttttgaggaattattttcaaaacttaaactcttccttatagataaagattctctatatccttgaattggtcgaaatcatggtatttatcatgtcaattgcttttttaaagtttgcattctagtttccttcttctgttcctccataatctgtagttccttcactataatgtatttatcccctccctttccttagtttctctctgtcttctttctcccttccttttttccttcttttatttagaatgtttactgaagtattattaagcagatgtcagggatattgccacctgtttgataaaaaacaacagaagacctacttgccacccatgtggtcacaattcttagcccaagtagaccgtaaatagtgtgtctaaccaatgtgtatacatgaataaaatgtggcttcttttatttgtgttaatacttaagcataaaaagaaacaaagtggaaatacacttgatacaaactaattttgaattgttaggacatttgtctccaaaattcttttacagttttaagataaagtaaggggaactaaattttaccttgttgggtgggggaaccacctatgtgaaaaattcattatacaattctgcaatttgcttagtctttatttttgactgctgctttcactaagattacacaaggagtaaagaaaagacaggtaactaaatttcttctttcttgaaaaatctatttcctccttgtagaatgtagcaaaatagtcaaaaggtaggtgctagaggaaaaaggacgcaaaggagcaagtaagaaaatctacatactatctccttagtcccagggtaccagagctttggcagtatgctgaattatcagtattcatacatgagagctgaaacccaagaagctgaaatccaacagccgaaacgctttccttccataatgtatttgccagacatgcaaaggattggaaaagacagaaagctgaaaaaagttcttgcttttctaaagtgtccaaatgattctttctacagtgccctacttttgtgagctctatctttgccttaggtctattaatttcattttttgttttcttcttatgatttggaaacatgattagagcttacagtgggagatgagttggctcaaggaattaattctttggtttcagggaagaaaatataattttcatctggataggatgtatattttatgtagtttatattagatatacataaatgagaactgaataaagaagcaaaaacaggagaggacagagaaagagaaaggtagcaatgaaaaaggaagaaagaaaaaggaaggcataaaggaggaaagaatgtgattgagaaaaagaatgaaatggcataaacatgtcagtaactgtaaatgatgaatctgtagtattaacatctgcattgtaagactgaatacagaaatgattaatcaagctattttataaaccagcaataggaagctttttgcacatatattctgtggtgagaaaacaaggaaccacagcaagagtagcagagacactcatatattgatgtaatgtttatgaagtgccaaatagcctcacatttttgttatttcacaacacactgggcatacttttgggagaatttttgagagaatttatcttaaaagtatctggagaaattcagaaataaattatcttagtccacttcatgctgctgtaagagaatatcacagactcggtaattataatgaacagaaatgtattggttcaggtttctggagtctggaaagtcaagatcaaaagactggcatctggtgagggcctttttgctgcatcatctcatggtggaagagcaaagagagggcaagacagagagcaaaaaggagccaaacttgcccaattataagaaactaactcccaagataagggcattaatctgttcatgagggcatttctccaaggacacatcatattccattagataccacctcacaatatcactgcattaacaatcaagttcccagcacatgaactttgggggacatattcaaaccatgaatctaataggtttaaaatttcaatcagtgattttcagtataagaaataattaaaaggaaaatgttttatggttggcttagatttgatttatttttttcttttattctgagtatatacgacacagttgcatttacagaagctggacaagaaaggcttttgcgtgtttttaattgtgcaaatgtcaaataaagtgttgtattactttactacctgctacttcagagctaggattttccaagtgtattaaatattcagtttagggtttaaaattcacttaaaaatacccttcttaagaaaatgttcctttggctaatccatgcattttattcaatattcaataaatattaaaggcttgttatctcctggcattctactgggcacaggttatgtagctatgaaagaaaacatacaagattttggcaaatgggtattatatgtaatgagaaaaacaatataaataagtaaatacacagtaatacaaaatcttaagcagaaaaatgcactatgaaaaacagtaagtagatatttaaaggattgagtacagcatatatattttgcaggaaatccaaaatgtattaaatgtgaacaccaaaaaagcataagaataccaaaaatggaattgttgtgtatctactgtgaaacagacactttgcaatattctaagtacatgcatagagtttgaccttaatttatttctcacaaaatctcaacatggacgatattactattcccatttttcatatgagagaactgtgtgttatagaggctgtgcaacttttcccatgatcatacatgcagtatgagaaagcaacaaactgaaaacaaggaattgtgttattacaaggccattgctcttccctcattattttactggttttaagacaccaaaatagtttaaataatgcgagaaaatcagaaaagtgagatttgaaaaaggaatcatgattaacctgatgagaaaaaaaatgttaatgactcaaatcaaacacattaaactaacacacttaccccttattgaaggagcttgttgattttaatgagatattttcaactattttcttgagcagcctgtaagaataaacatgttttaatatttctttgagtgggtacttgttctttcaatgttgatgacaaccctagcatctaaatacactgattgacaatttagagctgtttttctttcatttttcttttactttctattcatccttcctgcaacactagtggtttataaagctaagagtaaatgaatgaacaatcaccatgtatatgctctaattctcctacagatattttatgataaaatcacttacctttcttcttcttatttcaaaacaataatgacccatttttatttacaatggtcttccatgtgcactaatgagatagcatgcaatgtctttagaagatatcacatatttagaaatgtattgcagttcagaccaagtatagctctaatcttgttttgtgcagtgataaatggaatatacatacacacgtctgtgtgtgtgtgtgtgtgtgtgtgtgtgtgtattatatagtctaattatgagctctatgaatcttttatttcatttaaattactggctggagatgacctgaagaaatgatagcaaagatttctgagctacggtttactgcagtacacagaatatctttgtatttatgtagattcgttctgttttgtatttctagaacctcaacctactggcttactcgcatccagtcttttctctactgcaatgagaacggcctcctaggcagcttttcagaagagacgcactcgtgcacgtgtccgaatgaccaggtggtctgcaccgcgttcctgccctgcacagtgggagacgcctctgcctgcctgacatgcgcaccagacaaccgcacccgctgcggcacctgcaacaccggctacatgctcagccaggggctctgcaagcctgaagtcgccgagtccaccgatcactatattggctttgaaactgacctgcaagatctcgagatgaaatatctgctgcagaaaacggacagacgaatagaagtccatgccatttttatcagcaatgacatgcgcctcaatagctggtttgatccctcctggcgtaagcggatgctcctcaccttgaagagcaataagtacaagtcaagtctggtccatatgattttgggtctctctttacagatttgcttaactaaaaacagcaccttggagccagtgttggctgtttatgtcaatcccttcggaggcagccactctgagagctggtttatgcctgtgaatgaaaacagctttccagactgggagcggactaagttggacctacccctgcagtgttataactggacattaactctggggaacaaatggaagacattttttgagacagtacacatctacctgagaagtcgcatcaagtccaatggtcccaatggtaatgagagcatttactatgaacctctggagtttattgacccttcccggaacctgggctatatgaaaatcaataacattcaagtgtttggctacagcatgcactttgaccctgaagcaattcgggacctgattttgcagctggactacccctatactcagggatcccaggattcagcacttttgcaactactagagatcagagaccgtgtaaataaactctccccacctggtcagcgtcgtctagatcttttctcttgcttgcttcgtcatagactcaagctgtctactagtgaggtggtgaggatccaatctgctctgcaggcgtttaatgccaaattgccaaacacaatggattatgacacgaccaaattatgtagttaaccataaatgtcaagcacaacccaaaatcttgaaggagtttttacagtgcttttgtggaacagtttatgtttggaagagtaaatttaaattgtcttttcaatatctgtcttatatcagtcaataacattggatggcaatttacacacatgaacttgctgacaatgaatatattatacagcagttttggtttatgaatgacataaatactgacaccagtctagaagacattctactttttacaataaatttcatttgtaattttatatgttccgtggcaatgcttttgtgcattacatcctctagagggaacataaaaagataccaataaaattttgtagctgaacagttatt

SEQ ID NO: 6 - DNA, 3404 bp, Homo sapiens
ctttgccctcttctctctgacccaaccttcaaccactggggcagtaggttatgcattgcctagaaggcaactgtaagattcaggggctgctatggatgcattacccaggagataagggcaacctcaggtgggccggggccctcacagcaaccttacgagaggggttgtatcatgcccatttgatggaagagaaaactaagattccattagaattgatgtgacgtatcctaaatcacacagctgcagcaggactaggatttgaatgcgggtcaatctgcctccaacactactgccttttcctccatgctggattaggctattggcttctgaaagcacagacaggtgagatgggtcaaacatggcctgaagcacccaggcacaggtgggagatggcaagcagaggcaggttcaaaacgtggggccaggactggtctgaaagatagtcgttaaatagcactgaggagagggagtgagagagatgtgggtcttgggggagtggggtcttgagaaccctgaaatcagcagtgtctgcccactttgccctggaccagcctctctgtctgtatccttcccccagagaaaggaccatgggctgacctgggccaaggacacctggctggagccccttctctgacattaactagctccgtgacctggggaaagccaccctccctcctgagcctcacttttcctgtctgtaaaatggcctccccgtcatcacacccacacaggtgtcttgaggagtgaatgatggtgtgctccaaggcccccatggagagcccggcacatggcaggcactcggtgttcaagcactgtgttcccatagactctgggctcctgccctcctcgcccccaacccccttcctaggaaccagccccggcttgtcagagagccagctagctgtcaaccccaccccagctggccagttaatgagtgaccaggactcctgagcctgacctataaggaggtgctaggcagggacacagatgggagacggtggacagcggcagggggaacccagggagcgcgatgggctgcagggctgcatcagggctcctgccaggagtggccgtggtcctcctgctgctgctgcagagcacacagtcagtctacatccaggtgagtcccttggccagcgttccctttgcctgaagggccccatggtgggaggctaggctggagagggtgtactgggaattcagaggggcaccgggggagcacggggcccggggctcagcccaacacccatcacagcccagagaccaaggcagctggtgggtgggggcagccagatgttgatggcagtgatgatggcaatgacaacaccaaactgattcagcgctgctcccctcaaaggcccgtgctggtcacagaggtcagggtgtggaacagaaggctcctccttgcatgggaggaggccagaaagggaaggagacaccctgttatgctcccacagttccgtatattcacccacatgtaggtggaggaggacaggctccagaaaaattttcctgagaagtaacccttgagctggcattgcaagatgaacaggaggttgccagacacagatgatggggaaactgttccaggccaaggggcacagcatgtgcaaagaccagatagaagactatgggggttccagtgcccttccagggggcatgggagagtggcagtagtcgtcacagcagggcctgtctgccacgtcacaggggatgctgctggcctcgcccagcatagcagagacgtctgtggccctgggtgtcacatccctgactctgggcatggtctccttgggaagaacaaagtgggtcccagagaggggtgcaggagacttggcctccccaacagccctggcctcagagaccagctacttggggctgccatcactctgccatgtgagctcaggcaggcgtactcagttagtgattgtgccctggtaccaggcccccacgggagatgtcagatgagggaactgaggctgagtggggaacagacaggcagccggtcatgggcagaggtgggatttgaaccagggcttgtctgtctctaaagcctcgaaccactgtgctccacagccccgctgcttcttcctcacacctctcaccgcagcggctctttccagtgtggccctggacttcccatagagacggggaaggctctggaggatctgcagggtttgagcaaccctgggtgtcatggcagtgcctgcccctggaccaggtcttgacctgctcctatctcctctcccctgtctgtagtaccaaggcttccgggtccagctggaatccatgaagaagctgagtgacctggaggcacagtgggcacccagcccccgcctgcaggcccagagcctcctgcccgccgtgtgccaccaccctgctctgcctcaggaccttcagcctgtctgcgcctcgcaggaggcttccagcatcttcaagaccctgagtaagtgcccccgctccctgcagaacctcgctctgtctcctcccacgcccaggctcctccacctgggttgtttctcttaagcacccagcggctgaggatggggagattcaagtaactcaggccctgtcccactggctcccaggactccccggtttgggcactgtgagtcaggcatgcctggaacctgcttcgtccccttagtccacgccaggcacagacccatcaacagacaatggctgcgtggagcagagaggagagctggctgacatctgcgatgggacaggggtgtgaaaggcttccaagaggaggtgtcagccaagctgaaacctgagggatcgtgcagagccaggcacgagaatgtagcaactagctagcacttactgagcacctactgtgtgccgggacttgtcggtcctgcattatctcctcacagtgaccctgtccatttagcaaacaagaaatctcaggcacagggagtgtgagtgacttgcccagtggccgctaggaaggagagcatctgggacttgaacccaagccctcactccacctctagacgttcctgctcccagtctgtggaagatgccgcccattcccaagcagacctcttctgctgcctggccacagagggcccaggttcaggtcaactgaccagttctctccctgcccagggaccatcgctaacgacgactgtgagctgtgtgtgaacgttgcgtgtaccggctgcctctgagatagccctgggtaccctgagcccaccagggacacctcgcccttcagcccaccaccctggcaggcttccatccccgtccatgctcaagatgggtccctggccaccatggtcatcaccacccttccagggcctgagcagctggatctggtacaaagcaatcggacatagagttggagggggaggcccctgaggcagcccagctcctgaataaagattctacaacacacg

SEQ ID NO: 7 - DNA, 10370 bp, Homo sapiens
acaaagagaatgcgtgacttgaccaaggtcacacagctggtcaataacagcaaaactaaaatcaaattatgccaacactacttcttatgctgtctttccagattatttaccatttttctatttctctacagtgaccagaatcatttctgctaaatgtcacagatcattaaagcctgtgtgtccagtcacaaaactcaggaaacgtgaaaatatgcatctcatctcaacagttttcctcatatctcattcttttgtaacttagtaccccactctcttatcagtaaaattagattttaaatatatattagaaggaaaaaaataccagataatttcctgttagcatcagctatcttggatgtttaatcttcattttgctccatcctttctgcctgaattccatttattaaaacagaacacataggggtttaatcaatatccttaaattttccacaaacataacataaataaactccacgttgtgaggaagagaggatttttaatacatatgtgttgaatgaatgatcattatttagataaatgaatgactgaagtgattgttatattcaggtaaattcatcatggctaggtagcaaaccaaagacttgtaagaacctcaaatgaggacatgcacaaaacagggatggccatgggctacgtaatttcaaggtcttttgtcttcaacgtcaaaattcactttagagaacttaagtgattttcatgcgtgattgaaagtagaaggtggatttccaagctgctctctccattcccaaccaaaaaaaaaaaaaaaagatacaagagtgcataaaaagtttccaggtctctaaggtctctcacccaatataagcatagaatgcagatgagcaaagtgagtgggagagggaagtcatttgtaacaaaaactcattatttacagatgagaaatttatattgtcagcgtaatatctgtgaggctaaacagagctggagagtatataaaagcagtgcgccttggtgcagaagtacagagcttaggacacagagcacatcaaaagttcccaaagagggcttgctctctcttcacctgctctgttctacagcacactaccagaaggtaagatgattataaaattgtaaatcctgtttggcggacagtgaagtatttttaagggatcaaaatattataaattaaaatgttgttctttcatcttagactttattactaatagtacacagagaggaactgagatggaaaaggttatatcaaatgcatttacgtgtactttaatatagcgaagccgcaaagcgagttggaaaaataattatatgcaaaaatataaaacagaaaaaaaacaaagattcaaatcaatgcacttgttataatacttaactgttatgagagttgtattttaaaataattggtaacattttgaagaataaatatttttcttggacttgatagatctgtatactactttgaacagaaggcgtcttttaaagtaagcagaaatgtgtccattagggagcctataacagaaattgctttttaccaattaaaatctctggttttccaaaagagcaaattaaataacatctttcaaatattcaaatttcagacatctatcaaaaaatcaaagtccattaaagcaactctttgtaaataaaacatagcgtacttggtgcagagaacaagtgtcatctatttggggggttttctttggatgcatctgagtgaagccatacattaataactatttactatgtattgaggataaatagtaataaaatctaaaatagctaccctctgcaataaaattttaatttgtctttttagattaggctcctagagacaaaaaacaaatttacaaagatctttgatggagtaaatgattaagtggtgtatttttccatacatactgaagacctattacataaaatgagctaaccagtttgaaaaaggatttatatggactacaatgccaacacatttggggatagaacataatgtcttcttttttaggtctaaggttaatctttctgtaagacttcctacttattattgttaccatactttcctttaaattttagtggaaatttgtagttcttacaaaactgcaggctctctttagactacctaaagaggggggaaattaactggaaattattttcttattgaataagattttaatactaaaataacataaatctctactttctcagcaattgtattcaaacaattaactctattcttttttttttcacaattcgatagactttcacaaacaaataagtgagatttttaaagccagttctttcttcagaagaagtcatttattgttggtaatattattagatacggaacgctcacttctttatgtggtttatggttgttctttcttccatcagctcctgaagtggcaggatacctcctgctctaaatcctcctcaatggaacataataggagatattgcaaaacgcttaggactttgggtggaatgaatttttttttcagtcttgtgaaagactaaaagcttttacaagaaacttttcaacagtggtataatttttaaaagaagtgcttactttaatatttaaatattcctgcaagcacggatataacaattgagagttataatcagtagatactacctaaatatatggcaaggtttccaaagtctgccaaccggttaaactgaagcatagcaaaatgtcaaattggtaatttgatgttgatgaatgaagaaaggtgaatatatcattcctattatgttcctttgtctaatcatccattcaatgtacaaaaaacttaatatttcaaagaaaaaagttactgctgcaggtattacagtgtctatgttttagtgccagagatagtaaatacagctaatatattaaggaaaagattgatagtttaaaaatgataatatttgtgaaatccttattccaaaccaaatgtcatttgctaaaaatattcattcaaattatttgtggataagcatagtcaaacttggattgaaatgcccgcttctcaaaggaaacaccattgggtttcaaagtagccgagatccatgacaaagacggacttgacgttcccattcagaaaatagaagcgcttgctctgtggggacattctgtcccacattcatgttggtcccagtccccgtcgacactgcatcatcacatccttaacatactatggcttcgcagggcatctgcttgtgacacagggacaagcaatcaggtgtatcctataaccaagtctatggtgtcaccagcagtgaatgacatgtcctcatctaagtccaattagaaaacaacctggggacttttatgactttagaagcaagctctaatttttttttacatagtaatctcttagttttttagttgtgattgttcacgttgccagaagcattagttcttgttgcaaattgcttgtctttaaaatgattttttccctttaatttagaacaggtcaaagcaccctaaaatacctcaaatctgttggccgctttataattacaaagtctagaccaagttacactatttaaaatataaatgaataatacatctgaaccgacagctggtatgccaagttgtagcctgaggctgctttaagatggttgaaatgcagtataatgtaaatgcttggaagtgaaggactattaattgaaagccagactgatagtgaggggggtggcatgatggataaggtgccattcaggctaaccatatgtagcatatcatctacagtgggtattttaaatgttgattgtggacattttaatttccagtctggaaatgagccttctaattattaaacagaagtgtccctacattaatgaaaaagcttaatggtggaacacatcttttgtgtccttttttgcctccaaaaaatctggggaaataatataacccactatttaaaattaagctgaaaatataatcagaataaaagtgataacactagctttttccttctacttatgatatttatctagtcaaatctaattaatttagcctgacatgtttaaaaatccttgcctgcccccctcaccctacccccattctgtgttctgacagacagcagaaatgaaaagcatttactttgtggctggattatttgtaatgctggtacaaggcagctggcaacgttcccttcaagacacagaggagaaatccaggtattaaatccgtagtctcgaactaacatatcaatatggttggaataaagcctgtgaaaactatgattagtgaataaggtctcagtaatttagaataaatattctgcacaatgatcaaatgtttaaagtatccttgtgataaaagcagactttgttggagtgtagatcagagtttgtgttttttataataaaaggggagagaaatgttgaaaaacatgttacaggggaaattatagctccttgaaatctacagatgatcctatctatcaattcattactcacacactgcataatagattacttcaattattcgcaccaactcttttctcttttttcctcctttaaaaaatagcattatttcttcctaaatgtaaaagccatacatgttcatgatggaaagtatgaaaaatatgcaaaaaatattaagtactcaaaattcctctgtccaaagaaagctattcaaagtaaacaaatttggtgtattactttcctgtgttttacgtaaactgtacataaatatctcttggctcattatatggctttgtatcatgcttaatatcttaacattgtattattatacacttttattatattattaaaaatatttgttaaacatgatatttaatggcagcatactgtttcatctcataaatgtacaatatttgtttagctacttatttgggaagcttaagaggtcttaaaatttattccacaaagaatgttgcaaacaacattttatatacacactttcctacatttcttactatttttttgcacataggtttctagttgtagaaatactgtgtcaaagggcctgaatgagtttaaaccttttttaatatcttgccaacttgctttccagaaagttcatacacatgcacactctcatcagcagtatagaaatactcctcataatatcctcctcagcattcaagctttgctaatttcataggtaaaaatagtatctcatttctgagtattaattacattgactattttcccatgtatttaccatgccaaccaactgttgattagtggcatagggattattcctgatacagtttcaaattagcaagtatcctttttcttgcctttctttgaacttctagttgtcttccttccactgctagccaccatataactagataattgtgctgttttcatattaatatatgcaaaacaaaattgggagcttaaatctgctgcccaaagaaatgatttgggattcttcactcttttaaaatattcaagtcactactctcttctgtcactattagcataatcatgagtagattaattagtagaaaaagatttgtttaatcctatttcagaaaaaaagaagtcagttgagaaacatgtttctagaattcagaataatagcgtatgcaactatactaaaacgaagggattctcatgacaagctaaggaagatctttctaaactacctattgaaatactctagatgcctgccttactgttttatatggtcttgtattttgtagtgaagatgcttctcaagtgagtctactcttgaggagagatttatgttgtaccaatcactgttcttcacagatcattctcagcttcccaggcagacccactcagtgatcctgatcagatgaacgaggacaagcgccattcacagggcacattcaccagtgactacagcaagtatctggactccaggcgtgcccaagattttgtgcagtggttgatgaataccaagaggaacaggtaagagtctaagcctggctcaaaacttgcttataaatgtattaaataggtctaaaatttctcttgacattattaagttcttatgctcgtcaaatagtgcccataagccctgatcattttgaagatgtttagggttggggatgctctccttagtattatgcccccgaatgtcttaacccgcacccctctaaaccacttacccaacctccagtgtgacatagcctttaaattattttcccagtggtagtcctagcaatatttacttgcttactcattttcccttaaagtgaaagtttacttttgtggacctacgaggttaccaatctaatttctaccaaaagatagagcaaatataacattctttcgtggggttcaaacccaacattaaaattatcccccagccaagggtaaggaatggaaacagatgcattccttttcttgtagaataaaatccaagacatgcatttaaaattacagcctagctgcacagcatagagagagaaggcagcaaataagaacacaagcctatcgtaaggcatacattttaatgttggattttctttgacgagtgttgggttttttgctgcatctaggctactggaggaaattatccgcaagggtttcacagagatggtggaatttcacaatttttttggagggtggcccacaagaggaagggagttatgcatagaaagtagctgaagaaatcaaaaaatcaggaaaaggacatagatttgtctggatagactggagaagagagagagtgagagtaagaaaggagagagagagagagagagagagagagagagagagaacaagcaagcaggaggaataggagaaacagagttgctaatcaaaggttcttaaagtagagggtacagccacaggaagatggctatcatggtcagagcagacactgggagaggtccctcttaaggactacagtgaaaggtgagaaatcacaaatttataaaaatgcaaacaactgtcctcattttctagaatgggaatgccacaacttggtaaatggatgtaaagcaatcctcacactcaagcagtgttgcctatgtgtttaaaatgaggtgatatggggtaatatgtgccagggagactgacagcagctgatggctcacctccacggtgctctgcacacacttgatgttgatatggggtcatcttctttgctttccttgttactagcagatcacacattttctttaatccattatcaagtggtccttttggtaacaattcaagatggtcctttgctttccctcaaatcaattaactaactctgaccccatacttactaataacaaacagctgccttgcttgcaagtcacatagtgcagtggatagcctgtatccattgagactgaagtcaaaggtaaggcagctttaataaccaatgacatacataagcaggggattgcagatgggtatgctgggaagggagggggagctttagcccaccgattgttattagctctcttccaccagtttcaatccagaacattaatgtagcttcacgacaaatcccctagcaaccctcatctcctaaactccctaagccccttctacatagaatcctgaacccaaagttgccactgcttataggtgagaaccatattgccaaagagacagatcttcaatttaactttcacatttctttcaggaataacattgccaaacgtcacgatgaatttgagagacatgctgaagggacctttaccagtgatgtaagttcttatttggaaggccaagctgccaaggaattcattgcttggctggtgaaaggccgaggaaggcgagagtaagtctgtacattcttatttgacattttttgccttgatgcagaaaatttaagactacagttatctatatatggatctggattacagaagcaattagtagtcttgcaaagtaaggaaataattcctattgatgaaaaacagtatataaaagttaaacccattttgtttttggtactaagtattaataatagagccaaacaggttacatttgtatccccttatagttgcattataattaggtattaaatctttggccaaaccaggccacctctgagagtaaataggatgtttttaataactacgctgagacaaatttaaactaggactgttctaggggagctagagataaggaaaaagaagaaacagtgctgaaaacttcaaatatgtaaagaaaacatataatatttaaagcttaactttaaacatttacatatgtgatcaacatatatttatatattaataaatattcagataaaaatgtgatgaagactgaaagtgaccaaacctaagatgttgataaaatgatattcaaagtacaaataggtaaaaacatccatatatttaactacatatccaattttgtatggggctgtcatatagatatctactaaataatctaagttgaaaaacaaccaagaccatcaattacttgcttagatcttaacacagccaaacagacccctgaaccatctcattttcttccgattttttttggagagatgaaatatgagagacggagaatttatgttcaactctgatttttaaattagatttaaaacaagcttactgaaatttaaagagatctcaagatgaaagagaactagaataatggttggtttttaaaacattaataattaaacttataaaaccaatggtaaaatagtttctcactcttgacgatattttgcagtgttttaaagggataccaaaaattctgcaatagtaaaccagtgaaagagaaaaatctaatatagatgaagctttaacctcttaatactgcattttgcaaggctgttcctgcaagctctggttttataggatatgatatatttagttgaattacagactaataatctcaacaatagtttctgtattgtcaatatactaaaatcttcaaaacagcctagaagattgaaaagggcatgaaattatgcaggcttggtattagatcccagctctgctactttctctttccagtagtcactggtccacatgggtttttatcaggtatttcacagtacaccctttaaaaacagaatcctttactgtttcctcaagacacttgtgcatgttaccagtggtagacaatctgtgatcatttattgaaaatatctaatcaaacgctaattttaacacttattttcttagtttcccagaagaggtcgccattgttgaagaacttggccgcagacatgctgatggttctttctctgatgagatgaacaccattcttgataatcttgccgccagggactttataaactggttgattcagaccaaaatcactgacaggtgactgctttttagttaattctgaaaaccatcaaattctcataagtactgattgtcatactgctgcaagctgttccccatgtagggggaaagtctataatctcttattatataggaaataattatgcatgtttaagtcatataagagtacatcattatgtttgttttgtatcattacagtttgtatctatttattcatttattccagaaacatttactgagtgtctattagagtcaagaagctagaaacacagatagaaatgaaacatgggaaatgttacatcattcacatattgtcacattaaaaattgctatgttgaaatttcagcacaaaggtgaaatgcagcatatacaatattacatacttaatttaataagaagagtagtgagaactggacaccgaaaaatacttatcttgatgaattttgattttttaataattattcataattgtttgatagcattgatgagcagactttaggataaataatctttaaatgaaaatattttaagagtccaaaggatggagggatttatggacaaagggattaataaacaacttttatcaaaataaatcattgaaatattttctggataagttaatgatatcatcttattataattatgttaaatcattttctttttttaatctctaggaaataactatatcactattcaagatcatcttcacaacatcacctgctagccacgtgggatgtttgaaatgttaagtcctgtaaatttaagaggtgtattctgaggccacattgctttgcatgccaataaataaattttcttttagtgttgtgtagccaaaaattacaaatggaataaagttttatcaaaatattgctaaaatatcagctttaaaatatgaaagtgctagattctgttattttcttcttattttggatgaagtaccccaacctgtttacatttagcgataaaattatttttctatgatataatttgtaaatgtaaattattccgatctgacatatctgcattataataataggagaatagaagaactggtagccacagtggtgaaattggaaagagaactttcttcctgaaacctttgtcttaaaaatactcagctttcaatgtatcaaagatacaattaaataaaattttcaagcttcttta

SEQ ID NO: 8 - DNA, 50886 bp, Homo sapiens
cctacccagccaaatgtcattgatgtgccacatttgtacctataatactgggactcaccactgctctgggacttgctgcgatggccacaaggaccattgctttagcccaacagtcaaaaataattgatgctaccctacaaatgtccaaaactctagtatatcatatttctaagttacagcaaatattagtcctgctaaaccagggagctttggcaaaaatgttttttgacagtaaatttgtccttgattatatattaactagtcaaagaggtgtttgtaacattattagagcttcttgttgtaggtgggttaacaccaccaatcaagaggtcattctaacagaaagcctggatcagaaaaccatcaccctaaaaaaacatgccttacatatttaacacactctgaaatccagtcaaaatatgactaaaggcccttgccatgactgatgtattctcctggccaacgccaaacaaatgggagcctggttacgagtcagccttcagggacttgtcacatttctacttggtttcttccttgttattgtcataataaaatgttttctatgctgtttagtgcaacttaggccctattctgtagaagtctcctctactattcaggccactcaaacaccccaaataattgagttcaaaatcgacatcaagatataaaggaatcagtgactaaatatatttcatatatggtatttttattgattattgtgctgtcttgacctagtatggaggccttggctagaggctggtcagtttcctctcttgagcagctgattaaatccacaccccaaccacttcccttatcaggttctcacactctggggccactatgtacccactctaatcaccacagggccagacatcagacaattaaggacagcgcccatgccccaaagcccgccaaaattatgcaaattattcaaaattattcaacctagctaaccccaccctttttgctgtacataagctgcccattccccctccagcctgtggtacccagtcctcaggtgcaaccccctgcgtggtcctctgtggcagccttctctcattcagagctgtaagtaacaaagacttctgcctttcatctagctgagcattgaagtgttttatccgactgccaaaagaatctttaaatcttgtaaaatacagtcctacctacatcttaattactattcaatgaatgaaagctgcaaagcttaaaaaacctttatagtttttctaaaccttttatatttatcaagcagatctctgtaaatctgtaaatctgaaaaggataatataaattaccttttttttttttgagacagagtctcacttggcagcctaggctggagtgcagtggcaccatctctgctaactgcaacctctgcctcccaggttcaagtgattctcctgcctcagcctcccgagtagctgggattacaggcacatgccaccacacctggctaattactgtatttttagtagaggggatttcaccatgtttgcaaggctggtctcgaactactgacctcaggtgatctgccctcctcagcctcccaaagtgctgggactagaggcgtgagccactgtgcccagccaatataaattaccatttaaaattattccatgactaatgttcaatttgacgttaattcccctaaacaaataatgcaattgatagacttggttaattaagttcctttaaatattatatattatatcaattacaaatttagtctacctgaatctctcaagcatttcaaatgcctgacacattagtatcttttatacatcttgcaagtttataaaaggagggagggggctctaataattaaagcaattccagtaaaagtaataaaccaaatttatgcagtagtaagttatgttctcttaaacattcaaacactgtgtatagactgaagaaaatgctcttgtactttaaaattgaaattatatggttcatatatctgattttctaatatatcaggttatattaaatgcttcaagtaacttaacaaacaatctttcataggttatctcaaggattaaataattaaatttctaaagttaatacaaatgtgttaatattgtggatttgactaacttcaacattcttatagttatttctctcttctcccagtattgtaaatccacttatgcaaataaagagaatagatagatgtatgatctgattgggctgaggatactgtatcagagaatcaaggccagggttgaagtgtcagttaaagaatttgagagagggtcagggacctaattaggtaccacacatgcccagggtgcctctacacgacccgaaagtcaatctgctgggcatctccttgaggtaacagagctttccaaattcacactgtttcatgcagtctagtatatcatgtgtacccttacctagttttatttatttatttatttatttatttatttatttatttatttatttatttttgagacaatttctctgtcaccaggctggagtgcagtggtgtgatctcagctcactgtaacctctgcctcctgggttcaagcaattctcttgcctcagtctccggagtacctgggactacaggcatgtgccaccacgcccgtctaatttttgtatttttagtagagacagggtttcaccatgttggccaggattgtctcaatctcttgacctctgatgatccgcctacctcggcctcccaaagtgctgggattataggtgtgaggcaccgtgcccggcccccttacccaatttttaaagttacctcttttataacttttttgtttttttgagacagaatctcactctgtcacccaggctggagtgtagtggcatgatctctgctcactgcaacctctgcctcccggttcaagcaattctcgtgtctcagcctcccgagtagctgggattacaagtatgcgctaccacacccggccaatttttgtatttttagtagagatggggtttcgccatgttggccaggctggtcctgaactcctaacctcaagcgatccaccagcttggaccttccaaagtactgggattaaaggcatgagccaccatgcccagcttcttttataacttataactgtgtaatttgatagttgaaattccctctataggatattattcactactcgactgaattcaatctctttattgcctgattggagtcaacttgctttttacatgttttatatccagttcaatatcaagaatccttttgtcattttattgaccattccctacgtgattaacactatctactgaatactgtatctcagaatattacctacatttgcatcaagctcatgatctatagctcacctacatccaccattctatttttgaaatttgggatagcatgtgccaggatacagttgttctgcctgagtcttcactgcacctcgagttattttgaggttcatccatcttatctgaactttctccgtgctctggattttattcctctccaagagacacaaactcatttagagcatgtagatcttcccttgggatgtttctgcctattttattccttgtttctatcatgccaacatttgttctaatctttctatttgttctaatcttttttttttttcaaaagaaaaggaaaaaaacaggtattttatggcaccactggtcagtgtagggcgggtgggtggcacatggcattagatgtgctagttgggcagagctgtgctgttaattttctgaaagtggtaacaaaatacataaaataaaacagtgcaatgccaggacaggccagcatgcgataggtgagttcttccctccgaagccttctttccaggctgtttcatgtgtctttctttagtgtgtccttcctgtctaattaggtttctctcattgcccttgtcctaatgttttacaattatctaaggtggaatagcacagtggagagaagcaaaaatgttggagtgagacagacttaggcagaggtggcaatattgtaaaaataatgatgcttaagctgtaagaccattcattgcttgatttacttccaagatcccagaagggcacaagaaatgtgttcacacaatcatatgttttatataaaatttgcaaaagatatttaaccacaatcagtcaaccccattatcattttactctgactgtacggcatcatatttcctgtatcaggtggtattggaggggctgtgggcatttttgagacccaaatggggaaagttgagttgagaataattttagtttggctttagtgggtcatatttatgtgggtatcagtcatttctgtatattgataatttattgctagccattcagggtagcatccactatgccaaaacaaatatgcagggccagaagtcatattgaaaagtgaaagtgtgcttcctaatggctcccaggttcagaaatttgtaggttattgaagagaaacagatggtgaaatgcacagagacagagctaatcgagggaaaataatttcaatcatccagtgtgtaaagctgcaggcagagaatttggttttagaatttgaccagaaaacctagttaagacaggttctctcaggaatgtatctgataatgtcttacgtacgattaaaaccacatcatatgttacaaaatttttttgatgaaaatagtacaaaattaaagaatcctgtgtattaagacacaaacctatagcagtacttcaaatgtgtgtgaagttttatgaatcccagtattaataagaacaaacaaaaattttaatcaaccatgcttgaaataagactgaaatatctttctattctctctacagaaaataatataaaatttttgctatatgaagagataatccagaattatgaaattaaaatatagataaaagctcttagaggattgtgtctggcagtggctgaatatgaaatattgttttttagattttgtgatatttttgatatttaactttgtaaaatatttgatttattataaatcattttcttgttctaaatagatattcacttttgtcactaattttattattaattttgtattctttttgtggtaaaattaaatttactactttaaacattttaaggtatacaggtctgtggcattaagtacattgacgttgctgtgcaacccccatcgcgcatcatctccagaactttttcatctttccaaactgaaactccatattcattaaacaataactccccactccttcctcccccgagctctggcagcaattactctattttctagctctataaatttgactattctagttatcccatataagtggaatcacacagtatttgtccctttgtatatggcttatttcacttagcatagtgtcttcaatcttcctccatattgtagcatgtatcatttctttttaaggctgaataatattcccttgtatatacagtagtcccccttatctgtgaggatacgttacaagacaatacctgaaaccatggctagtaccgaaccctataaacactatgtttttttccttatacaaacacatctatgataaagtttaaattataaattaggaataggaagagattaacaacaataactaataataaaatagaacaactataacaatatatcataataaaagttatgtgaatgtagtctctctctctctctcaaaatattgcattgtactgtactcacctttcttgtcatgggagatgctgtgatgcctctgtgatgagatgacaagaggtgaatgatgtaagcattgtgatgtagccataggctgctactgaccttctgtatttctgaatcagtgtaaccagccctttgcggcgtggtgtcaactcatttcttgcttgctgaagtcttcgcagatgctcagtgctttctggtgcaactggtggttatcaaaacatgttttctattcatgtcttccacccacccatttaatgtcttttccgtcttaacgaaacacccatcttgcactgtagctgtaacttttacagtttgagttgcaacaccaacactagcacgaatttctttttcctccttcacaattacctggatagaagatttgttcttaccgtagatcttagcaacctcagtatatgacttttttcctctccttattaagccaagagctttcaaattttcacttaaaggaaggactgatggcttctctttggcatatccaaattaccagcatcacaagtcttgggctttggggccattatgaagtaaaataagggttacttgaacacaagcactgcaacatggcaacagaaaatctgataactgagaagactactaagtgactaaggggagggcagcatgtacagaggcgatatgatggacaaagggaagattcacggccccatcaggatggagtgggatgctgtgagatgtcatcacactactcagaatggcatgcaattgaaaacgtattgtttatttctagaagtttccatttaataattttggactgtggtggatcatacataactgaaacagaggaaagcaaagctttggttaagggggaaactactgtatatatagtaccacattttgtttattcattcatctgacaataaacactgggtttgtttccacctttggaatattgtgaataacactgctatgaatacaggtgtacaaatatctgtagaatcccctgttctcacttctttcagatatatactcagaagtggaatgctggaccataaggtagttctgtgtttaattctttgaggaatcaccatactgctttccacaatggtgacagctctttacattcccaccagaaatgcacaagggttctcatttctccacatcatcgccaacacttgttttctgctgtatttttgtctggttggttttctttttgtttcatagtagccgtctgatgagtacaaagtgcattcttttttaaagagggcctcccaaaaacctgggtcttctctgtgctcgcgtctgaactttagttctaccatggcatatggtccatcgtccatgattttgtttcctcgcttgtaaaatgaggataaaaataaacatgactctaggattgttttaaagatttggtgaaataatatatgtgaaaccattagcacgtagtctgcacttaaaaagtggcaatccctttcattattatttacttatatgtctttctcctgtacaacattatgagctcctcactcatcttctgtcctcaacacccagcataggacctgacatatacttggtgtttaatggatgtttgatggttgagcttaaaatcatccatagaagacaggccacaattcttttagccacaatgcatgtagaagttcaaaagttcctcagtgaagaggaactgaaagtaaatatcagaaccttgctgctctgtaattcactgagtgcaatccagtctttatcaacacagtaaaatctttactgttctcattctctaaagtagcttcactcacgctcagcaaattattttatttttctcattaagttgtaaatcatattacctctccaggtattgctttagacaaatatttgtattgggtggaccctacctgactactgctgacaagattctggtgcaccaaagggcaaggatgctgccccagctgggctgatttctgcttgggtgtactacacatggcattaaagcctgcaatattcagagaccccgttctttgggggttgccttaggattcatgaaagcccagaaactgtattcaaaattgtatgtgtgtatacgcacacacacctgagaatatgtgcactttcaaaggaaacaaacctaacttttatcataatttcaaaggaatgcatgaccaaaagaattaagattaacagacctagaaagcctagggcgccagaatcattatcaagccagaggcttacctttaggaaaagaaacagatcttgaaacaatttgtggtatgagttcagatctttaggggagctagaacccccagttactaggaccaaggcacagaatcagctaaccaaactccaaggatgaagagtcattggagttggcagggtaatttaaatctcctttaaactccctctaactgcacataagttagatccagaatctgtggatccatcctaaagatggcagtagtcactatagctgggagctattcagagaggcattcagatatcacactgtgtcatatgttaaatgcagacaaccaaaggtgatagaagaattatgacatcaaatttaaaattcctagaagtatccagaatagtatgcaaatgtaaatttaacacttctaagatccatttaaacacaataatggcaaattatattttaacctattttgtgtcttaatctgataagaagaaatttgaaattgtgcatcttttaatacaggactgattaaaataatttctgagaaaagtcaataaaaataaatattagcgagaaaagaaaatctaagacataaatttaaagtagtgtatctgtacatacttatactacaggttgtcatacattttgacagcacttgtcatttttagaaaattgaaattactttctatttactctctgtaaataaaaagcatctctactgagacatggttactgagttccatatttacagaaatgagctagaatgttttaatctctaactacaataaaatcatccaaggtgatcataaagttcccatatctctttctaaaaaataaaaataaaatagaacaaagccagaagattttaaaagttttttttaaaaaactccaaggttttagtactattaaaaaatgcctaagtttagagggttttgattcaatttcctctgaatttcactcttcccatgataaccagtcactaccatttgtatccccagaggtttgaatgaagtctgaacaaagtttacttcaattgatttcctgccaatctgagataggctgagactgtcaaagtgaaggaaaaacagtacaaataaacatataaaatacaagaagcataaatctttatgggcttataaattacaggtattaatatacaacaaacactagttctctagaacagtcctaacctattctatggctgtgccatctagcccttaatgacggggttcagcttcaaagacagctggttcaacttcccccccatttcagttcctggcctgattctgaaaggtttggtgtcatgttatttctcactacagaggaaatagtttgctagacacattaaaccctaggtagccaaattccagggatcttagttggtcatatattacttggctacttgttgaactgtaatcctatcctctacatacaagtccaggactataacagtttcttaatcataagtaaaagtaatttccaattagtaagaaacagactaacatgggtaacaggcgtaagggatgagtggagaacatcaagattaacccaccatagtgccagggttcccattcatttccccttaaggtagctatttggagtatgcttttaaaagagaaccctgttcccatgctttctcttaagtacaacttttgcatcaaccaaagatggactagctattatgatgcaaaggaccacgggaagctgctctggctaaacatctccttcttgttggccctaccagtccacggcatttcattgttcaaaatgcatgtctttacttaagatctttggagtttcaaatcactatgtaaagcaaagatgtgactagaagttaccacattaagctattttctgtcattaatgctttgatatgaatgtgtttcaagatggttaactagccaaggttaggcattgaaagttggagagatgcatcctaggcaagccggggtaatctccaaagtggggtaaccaagagcattaggaaactgaatttggaaaagagagggtagcatgaaagatgaaatctgatataaataagggggtagcagggcaaagccatttcacagatctgtaaacaaactgcaatgctgacctctggtttccctaactaagagctttcacaaagtaaacatgttatttaaaaataatatctcaaatagccatgcagttatgatgcgcagtttaactgaggtgggggagattctcagagggaagaacccagagatcagggttcaaggctgggagagaaatggctacttccttggaaatgttcctaggtgtcctgatctgccactgagctacagccttcaaactcaaactgcaagggaagcttttttcgagcctccctggaaaaaacccatgaccccaaaatccttccctcgaagctctatccagaggcttggtactgcttcaagtagaaaatctgatttggtttctgggaaggaggacctgttggaaagttacaagattgacgtgacagtgacaagtctggaacctcctggctctgatgcacagtgcttgaactcccttagaaatgaagcattgcccccaagatagtataaagttacagttatctaaagttttctctcttttttttacctgtttctctttctccaaaaaaaagtttaattttaagaacaatgaaaaatcaatcttgaacaattatagggaaactcaaaagagcacactgtgcatttcagctacttcagtcacaatgaaacaatcattaaaaagatattatgtttgtttcacacaaagaaaatgtgaaaaaaaaaacacctccatattgttaaagcaacatgtaccacaactaaacacaggtagaatttttaaattttaaatttggccaggtgtggtggctcacacctgtaatctcagcactttgggaggcagagaagggcagatcatgaggtcaggagttcaagaccagcctagccaacatggtgaaacctcatctctactaaaaatacaaaaaaattacccgggcatggtggcacactcctctagtcccatctactcaggagactgaggcaagagaatcacttgaacctgggagacagagtttgtggtgagccaagattgcgccactgcactccagcctggcaacagagtgagactctgcctcaaaataataataattattattattactattttaaatttaatttaattttttaattttaaaattacaagcgattcataaacattctgtcctctcttctttcaatattttgtttttatttattgtctaatatgtataagtagctggaaaattgtacagctcatattcttttataagcaatgaaaagaaaataagtgagatttaatacatataaataattttctattattctttaatactttcaatttatttaatgcttttgttttatacaacatacaaaatactaccgcagcacatgtaatgtaatagcttagtcgtagtcttacttttcaaaaaattgtatataatacataatctcaaccccagtatcagatatcacttgtgtacatcttgcctttattcctattcttgcttctggaaaccttagctatttctgacaaagggtatacaaggaatatttctaaagcagtggctctctaagtgtggtcctcagagcagcagtatcagcatcacctgggacttgctagaaatgcaaattctcagcttccatcccagacctactgaatcagaaactctgaaggtgaggctgggcaatctgtattttaacaaagccctctgatgcacagaaatgtttgagaaccactcgcttaaaggaaccacaaagcaaagattttttacatgcttcagaacttatccctagctttgcttttctctttccaatcatttaatttaaatgttttctcttatgccacagagttgagtgaaattcccctgactcccttggtttttttcaaacaagtacatttcttttcctcttaggagtataatcatcatgtagattgtacaaaataaaataacttctccatgtgttcatctggttaggagatttccaattttataaggcaataaaatagtattcaaaagggggcacaatagctatattgacatgccagtagacatgtagaaactatagaaatcgttcttttcctcttataaactttttttattggttaaaacaagattttattaaaatattggcttattcttaaggcaagaataattttaatttttaaaaaattttaatttttaaattctataatctgtctctgaaattcttcagattaatatctcaaaatcttataaacttttaaatatgaggttaagaaaaaatttaaataattttattataaaaatgatatatgttctttgcagctatcaaacaatacagatgtaaatcaagtaaaaattaacaatctgtcatcttttagagtcatattctctttaaggcaacaaatgttaccagattggtatttctttctaatctctcttcactgactacataagtgtgcagatgcaaaaaaattttatatgcaaaatcaggatcatattatgccattgctcttcaattcactttttacacttaaagtatcacaaatgcacttgtctagtatcactatttaattccattcccgtttaggttattttgaaatgcctgctcttataaacattgattcagttagcatccttgcacatttatttccaattactcttgttaatttttcaatttcacagactcctaaaagtggaatatttgaatctaactctatgtccatttataatttaattaagggctgcaaatgaattattggagtacttcgtgcttccgcaggaatattatcagtcttttgaattttgcctcccattcccatggtctctcattgttttgatctatgtttttctaaacagtggtcacatagatgatcttttctcacactgttggccattggctattttgtgagcaaaagatcaaaagtcttccttggaggctaagggagaaaagtgaccttttgaagctcaaggtgagaaacagcatgatgggtagcacacagtaactcacacctgtaatcctaacactttgggaggccgaagagggaggatcacttgagctcaggagttcaaaaccagcctgggcaacatagtgggacctcatctctacaaaaacttaaaaaaaaaaaaaaaaaaaaggggaagaaagagcatggtggggcttctcccctccttaactgtgtggattaacaatagttctgctcaaagttgcagttcctctccagggctgctagagttggcctgcagaagcaagctgtacataggacattggcaaaggcaacttttctccaaagactgagagacatctactgggtttcattgattgcacccactcagggagccaagggttctgagttccttatcccagggcaaaacatcaaccctgtacctagaggagccactgccctctgcctgggtctataaaagccttcattattttggaggtccctaggccttccttattctactgattgactctcacctgcagggcactagcaagaaggagggtgatggatatgcaatgaaattgtcatctgtcccaatattttgtattttcttcatgtgtatggccacagttgttctccccgaacttaaaaataaattaacaagcccaggctatattgaaggtgaagagaagatgattttaaaataagatttaaaaggaatcaaccatttataaatttatttagaatataacacaagcaaagtgcataaaatgatttaccagttcttccaaatgctcattttaaagcaaaagctctgtgacgaacgggtgcagaacactgtggcacaaagtccatatttggcttccccagcctgcaatgtgagaaattccttttaccataataatattagggaggctctgtccagccaagcagtgctcactttcttaagtcatagaggtttatcatgtcaggcaaagttcagaatcatttaatctcacctttcatcatccattatggtagagacggagctacctacttctagatttatgtgcctgtaattttttcatgttgttctgaaatgaagcgcctgttaagtttactccccagataatcctttgtttctggaagttcatagaagtcaccctttgtcatcattaatgtaatatcgtctcacaagcaggtattataactcaattctgagattccctcacccttttatataccggtgatgccataactaattgctctgcttcatacagctcagctgtatctccaaccagggcctgaggcctcctcttaagcccctgccccatctgaccacccacctccccatctcatcctggacctcttgcccacagagggagagcagagggctgcctccagagccaagcggcagctgttgctgccagtaccgtctagaagctgagcacccacacccaccctcagcacctttctctccacgtgcccctcagctggcactgcagggtggataatgctcaagttaatttgatactcccagccctgtcagagttatgagctattaaaaattgaaacttatttattctccagttaggtttcacatttctggtactaagacgaggtcatatcttagggaaagaaatggtatctctttcctgaaaatagtgtactaagattctggcaccttttccagcataagatttttcatagctcagtgtgtattatagcagtgtagctgattaaaaattctgttactttagttccagatggtttttattttggatgtgctcaaagtgtttgttcaccacatcactaatgttctgtagaaataaatcgacaaaataagtcacttgcttattcattccaatatttaacaaaagtgtttgattatctactgaagagaatggaagactcctaggactgataaaattcggactctgattttaagagtcttactacccatctggtggagagacaagtatacacataaatataactacggtttgaatgtgagtgctgtcataagaaagatgtaaaacaaactctatggcaatgcaaagatgaaagactttattcaagaaatacctatcatctgagatgtacttttgatgataggttagattttcacaagtggatatgtgtgtttgggacaagagttgggcatttcacattaaagagcagcacatcgcaaagtctgaaggtaaagagagaaagacacagaataaatttggggttaatagccaggtgcagtggctcacgcctgtaactccagcattttgggaggccaaggtgggcagatcgcttgagcccaggagctcaagaccagcctgggcaacatggtgagaccctgtctctatttaaaaaaaaataaaataaaaaagaaaagaaaggaaaggaaagaaaagaaatttggggacaacatatagtcctgctttacaaaataaacagtataaaggaaactattgaaataaaaatctggaaaagtagatctgaggcccttgcctgctaggtggtggtgtttgccttttatgcaaagcaatgggaagctgttgaaaattccctgaccatgaatgagctgactggaacagggcttcagggctatcattcttgcagtagatctttagctggatatgagggagcaaaggcttaggcaatgaggtcagttaggatgtgatttgatgtcagcaggtaagaggcaatggtgatgaaaggagaagaaaggaaagaacaccagaggggttgtgaagatagaattggcagcatttaccacaagagcctaaggaaagggaaggagacacagataactccaagctggtgggcctggacccttacctttgataaggatggcaacagtaaccaacacactggaggcaggaagggaacaatcaccaattcatttggaggcaagaagagctcagagtgtgggcaagtcactcaggtggtgctcactttagcagaaaggctgtgtagatgagtgtttagttaaagaactgacattttcacggatatgccttgaaagtatgtaaatctgtatttcttaaatggttagcaagcggagccctcaacagcatttatcacctgcatgaacagaattatttattgtgctgtgctcctgtgaatggtattccaggaattggaaagatgcgggcaaagttttgttttaaaattaactcttaaagaactggaatttctctcattagtagtaaaagcaacaagaggttgccaaaagcaaaagtgttgagaaagaaacatgttccctttactttttctttaaattataagtgaatgggcatgacacaaaacagcgaccatgatgactaagcaaacctatgtagacttaacagcccttataaaataaaactcacattaccctgactttctttcgtgctattgtgccacaagggaactgaaggtaagcagttcacacagatgactatattgataatcattctgccaaactacacatctttagtttttttaattgcttcttctcaggtatctattgctaatatcagcattgatattttcatcaaaataatataagttatctgcctaaaaatttcaatagaatcaatagaatcaatggatgactcttttctgctacatcaactacagccaattgaatgatatccatcaatatccagagaatgatatgctttagtaatgaaactattcgtacattgtattatttcaaccatcactaactccccttgctcttcccctacgcaccacaattatactcccaattttgctttttagaaagcaaaatccctgaatctttttcagctctcagtgaagctaatttccttgaatcccatcccctcaaaatatgccaattcaattacacccagggccaaaaatcatcttttatttccagtttggcctgtttcctcctcaataccccagccaccaccaccttcaaacgccaccatcactaaatgagtccttgagaagttttcccttgcttcctacctgtagtaggctaaataattggccccaacaatgtccatatcttaatccccagaatctttgaaaatgtcttacacaacacaagggacttcacagatgtgattaaatgaaggatcctgagatgggagattattctgattcatccagatgggcctgatataatcacaaagattcttataagaaggaggaagaaaagaggagggagagaagattttatactgctcgctttgaggatggagaagggatcataagccaaggaatgtaggaggcacatagaaactggaaaagacaacaaaacaaattcttcccagagactgagaaggaatgcaaccctgccaaccccttgattttagccccaaaaacgtattttggatttgtgactgccagaagtgtcaggagaataaatttgtattgtaagaggctaaacttttgatgatttgtttcagcagcagtagaaaactactatattacctctctgtatggtctgccataaactcaataccataaagatgtggattgcctgcccagagaaggtaacttgcatgatcaatgggtaccttcagatgatagtagctggtgaattggtgctaatagcgctggtccagtgaagaaaggatgaggtgcaatccacatggagtttccacatagtaagccccactgagtgttagacatcaagctcaatacttcatgtctgttattttattttattttattttttgacagagtcttgctctgtcacctagagggcatctcacattgcacccagggaatgcagtggtgtgatggctcactgcaacctccaccccctgggttcaagtgattctcctgtctcggcctcccaagtaggtgggattacaggtggctgccaccatgcccggctaacttgtgtatttttagtagacagagggtttcgacatgttggccaggctggtctcaaacttccggcatcaagcaatcatcccgcttcggcttcccaaagtgctgagattacaggtgtgagccatggtgcctggccacatctgatatctctttaacattttcttctttattatctttttaaacgtatttgacacatacagtgcttaccttcttgggtatctggtggtcttcatgaactcattatttgatgatttggaggagtcctaaatccctaaactggacaatctttccttaaagagatcgatagccaggggtcatcagcaaccatgaaccagttcagctcccttgagagtgtctgagcagaagagtcacagattcagatttcccctcccagtggcctgagcctcagagttattactggcatccactctcaggatgggacaacatgtgcctctaaggtccagttctcagttttggggagttttgctttgtgtttagagggaaaaggtgcatttcctgaagggatcagttacttcttgcagaacccacattccctacaggagcgtggtctccccagggcctggtggttctgcaagagagaaatggtgatggcagatggtggtgcacaagtagatgatttaaattatgtttaggaggaagaagctattaaacttgctgctgatttgataaatagattttgtgaaaggaaatattcaaagaggactcctagatttcttccttaagaaacagggatggtgtaatgccatttacagttaccggagatgagaaacaagagttatgcttgtatcatttttaattgtttatttatatatttatttatttagagacagggggtgtcgcccaggctggagtgcagtgctgcaaacacagcttactgcagctttgacctcccaggctcaagcaatccttctgcctcggtcccccaagtagctgggactacaggcacatgccaccacgcctggctaatttttgtgttttttagtagagatggggttttgccatgttgcccgggctggtctggaattcctgagctcaagtgatactcctgccttgaccacccaaagtgctgggattatgggcctgagccactacacccagccaacgcttgtattgttttctaaaaaggctttactgttgagtgcccaggccattttaaaaattttttaccttttagattgacaggaaaaggtcagcagtgcctttaattttacatttaggcctactttcagggaaaattggtatttcatcttcttataaataaaatctggctggcttgatttttctatttaaggtatgaaaaattactagatatttcaagcaagttagggttagaggaggtaaaaggctacaaaatctcatattttatctttctagaaggatttatggaagaagggctatggaatttgttcccaaagactggctaacaaagattcaatgggacttgaaccgttctttctatatgtccatagcttgctttttcagtgtctgctttttaaccaaatgctacaaccagaaaacgtaatttgtctagaacataagcacatgttttccatggttttagtctccttattggtaaggaatttagtctccttattggtaaatcatacacaataccagtaagtgggttttaagccctgggactcaggtttcagggtatctggatgtcccagggtatatcaaagaggccagtgcacagagataagatacatgcccacatttttaggggcattagtggaataagcctttgttataatacctaccaagttatcaacaatatgtgaaagactgttgtgagcagcttcttctgtgctcttgcacaaacaaagataaacagaaaataaccgtttatgaaattggtcttttgtttctccagctgccctgtcctgtctcacgtcatttccatgcagggcttccttttcattcgaggttcagtgtctcttcttccaaaccctctccaccaattaatacaagaagggtcctgatatcatcatttacaagtggttgaatcttatttttcattcgttagcaattccacgtctttctatttttaagagttacttgaatttccctaggactcatccaccgaatgaagtcactgactcatagatctggcctgcaggaatagattctccccatactccactccaatcaaaacccaccatgttaattcttggatgtttcatgtgctcagaaacaagtctgctcatgttcttccatctggccttccagttacggcctttcttgcctcaaaagctatttttaaaaggcacttcctctctaccttggcttctgaaaaccattaagagaatatggctttgctgagtagggtacagtgagtagggtacagtaataagtcttcccttccttcaaacctgttaatttccattgtgtttaacatacagtaacttgacttgtgtaaggttctgaatgattgttttcctttctaaaccatctcacactaccttcacctgctcactatgcctcggctctgtttcaggttttttgcacatagaagaccacccaaaaactcagtggcttagagtgacaacttttttttcttctcactgttatggggttgatgggtggatatttctgttggttttacctggacttactcactgagtgaatttcagctgggtggctgaatttcagctgggacagctggaatgccagcaccttgctctccaagcagtatttcctcttgagggagaccagaccaggcaggactttctcacatggctcatctgtgttctaaacaagcacttatcaagccttcgctcgtgttgttcgctgatgtcccattggccaaataagtcatgtggccatgccctgagtcagtaagggaggagactacaaaagggtatggataccagaaggcaggattcattggaggccattagcatcaacaagacccaaatgccttgttttatttactagaatgcatcgggctcttttttgctttaaggtctttgcatagtcttccttttaatcattcaacaaatatttaggcaccctcagacactggacaaaatcctcagagatctcaagaatctttccttctaaagaggggaagcatataataaatacatgcaaaactagaaaagataatttcagacggttataaaagctccgaaaaaataaactgggataatgggtagaaagtgattggccaaagtggagagtgaaatgaagtttagcgaggtcaagaaggccttctgaggggatggcactccatctaaaagctggtgatgagaaagcacagcagcgaggtgtcacagaggaggagtgttctggccatacctcaaccttggtcatggctgtcctgtctcctcttgccttcctccttgtaagtagcccattcctgcccttaccactgcccacctagtttatccctttagaaaattcaccacaattttgggtgatttgctgttgatccttgtttaagtccctcataaactataatgctaatgaagatagagttgtttctgtatgtttcttggatattttcatagatctatgcttagttgacattcaaaaacaattgctaaatgaataaataaatgaattcacacagtcactcgtgcaggttgaaagcatgaccacagatgctcagagtgagacaagttcctatgtccaattcctcatgggcccagactacatttgcctgtctctcagttgggaccaacccactatgcaagttctttctaccctcctgggggtttcatttcaggggttctttggactctttggaacttccctgactctgagctgagaatagttgctatcccgtccagcctaataggtttcaataaatgttaagtcccagagacaaagctttggggccttgccccttttccctttaggaagtctgctggaattcatatacaaaatttctaccccttttccctgctaccttcaaatttgaaataataaaaaaagagattttattctatttcattagataccacctctcatgaacaatgatagcagctatcaatcatactgtaagtaccaggtaactagacacctggcctatattatcattaaccctcgccacaatcctgcaaggtaggattcttttccccattttcagataaggaaacagaggcttatagaggtgaaataatttccacaataaatccgaggattaaaaggtagatcaggtgttcaggcctacttgagtctggatctgatgatcttcctaccagacacgttgcctttgtgttgacccgctccacattggggataaaaatacagctccactgtctcttatctccagctctgaaatccaaaaatttctgaaaaccaaaactgttcctgaaaacacatgacctgatgtgacctgaactcacctgtgggcctaacctgacctgacacgaagctatttatagtctttatttattccatgtactatgactattcatacatttgctccaaaaatagtaatgtgttcaattacaaggtactcccccagaccctgataagggcattcatatataatatttgtgttgtattgctttccaaaaatctgagaaattctgaattctgaaacacatgtggccccagggttttcaggtgtgcaactgggattctgtaataataaattatgtttgtcaatggttttagagctcacaaagtttttaagggttgaggaaattttattttgttttcctctagtacacaaagaataatttaggagattcatctgcaccttattttcttactcttccataaagcagctttatttctgatttcaggctattaatcatacttgatcccaacagaagtctcgagttatctcttcttgcagaaagacatttagttttaagattaagtaaaatgaaaaaaaaggaaagcacttttcagaagcgttggtattcacttcagttaaactaattttaaatttttaatttcctaaaataatggcttagaatagcactaaagtgaatatactaaatggatccaaccattaaaacgtattctaaaattagtgaataaatatttttaaatgtaagaaaataattataataagagtaccttgcatttatcaatttgcaatttataaaacattttcacctacctgatctcctatataataataattattatcattataggaaagttgccattcactgagtgctatcttttcatgagacactttatatatactatttactcatcctcacaactgtgtaaggttgttattgttatttctgcctcacaaacaaaaaaactgaagctcaatgaggctgatatatttgcttccaattgtgcaaatagaaggttagagtgagtacatgagaaaagctgtgtgtagaaggcattttctttttggtattttattcttaccaacatatgacaacattcaatgtgtttttaatctcaaggttcctgattgtcatagaaaaaactcttgggctggaggtacaaaaagtaggatcaaatatcaacactgccaccctgacatgggacttctggcaagtgacaaaatatttcaatttcaatctcctcatttgtgaaatgaaggacgttatattcagtccacacgttgtcatgggaattatgtcaaatactagaaggattaaatgctagtaaaggaagccaagaaagtcatggcaggctgaggttcttgatctttcaataagaagaagaaaaaaaaactagacctgccatttatcactgatcaaaatggcttggttcacataataagtttagcttcaagttacattaaaacaaaataaataaaatgcacttaatcacttttttaaaataaaaaatatatacttttaaaagtaaaaatttaaatctgggccaggcacggtggctcatgcctataatgcccctactttgagaggccaagacaagaggatccctggagcccaggagttcaagaccagcctgagcaaaatagcaagactctgtctctactgaaagtaaaaaaaaaaaaaaaaaaaaaaaaaggaactagacatagtggcgtgcacctgtagtcccagctgcttgggaggctgaggtgggaggatcgctagagcccaggacctggatgctgcagtgatctgcacccagcctgggtgacagagaaagaccctgtcttttaaaaatttgtttttaatttttaaataaaaaataagtgcataggtacatttggttgctttctcactaagctttaaagtttctttctttgtatattcaccttcatacttcagttagagaaaaacaattttggggtgatgtttctcagtgttcgtgtataccagttcttcctttgcagctacagtttttctcgcacagcagtcagtgatctcagtgccctgactggctgcatttctctcaacctctggttcaagcagtcacttgaccctgaactcaactagtggtcagtatcaggccatgaaacagggtgagataagagggtactggagtagaagctgggctgagctggcaggaaggggatgggcagagcagggacatacatcctgacacaggcagcagtcattggctgttacataagaccaaccacaggtcaaaggcaacgtcacagtctagattggaagactggggctaaggtccagaaagctgagttgctccagatggcacaagacagaatggaaagcaggcatacaggtataggttggacattcaagctaacctaaatctagcttccagaaaagacaggttcatacatgtctattccaggatgtaactaaggtatgctcccttggttttaagactgtgctcacaaacttgttttctctctttatatcaaacacaaaagttgtcctggagagctatttataaagacaatgagactgctcctgcctcgccaccaccacacacacccttcagtcagaagctggttccccgccttgaaagatctctcttctctgttgtctcagtgacttccactggtgactccaccttgaatctgctatcaatcatgtaaaagtcgtccttgttctataagctatttgctttcctttactttgtatatgtgtgaggaaacagatattttttagagaactctaaaaacagatcatcccaacaagattttgtcttagcactttttctggaaggaagaatggacttctctgctaaaaggtggtactctggggtgtatctaagagattaatttccttccattcaactttccctttaaagaaagctgtcacctttgcctctctctagatatgtttttccttatgttaaaaaaaaaagaaaaaaaagaaagaaaaatgggccaggcacagtagctcacacctataatcccagcactgtgggaggccaaggtgggtggatcacttgaggtcaggagtttgagaccagcctggccaacatggtgaaaccgcattcctactaaaaatacaaaaaaaaaaaaaaaattagctgggtgtggtggcacaggcctgtaatcccagctactcgggaggctgagctgggaggatctcttgaacccaggaggcagaggttgcagtgagccgagatccacatcactgcactccagcatgggtgacagtgagactctgtctcaaaaaaagaaaagaaaaaaaaaagtatgtattacctttccctccctgtcaggatagttattagaatctaagcagtgagaagtcattgagaagaacaaaaatctatgtatttatttacaaggtattcatattactagaccccttttcctgtatccagtagcagtcctctccatatacaaggaaatgtaccattcatttcaactttgtttataacaatgagaaataacctaaatgcccattgattgaggaatggctaaataaacaatggcaagccataaaaaagaacgttgcaaagccaaaaaaaaaatactctttgtataatggccaaattccaagaaaatgaattaaggaaaaaaagtaaaacaaaacatgtaaaacaaaaagaaaaaaattactctttgtatagtaatagggccaaattctaatgtattaaggggaaaaagtaagggacaaaaaaagcgtatacagtatgtattatttgtatttttttcgaaagagcaaaataatacgtgcagttatacccatgtatatgcatcaaatatctctttaaatatatgaaataaattgataactttggttttctctgggacagaaaatgggagaagattgttttttactttgtacccttttatacctttgaatttgaaaccacatgaacatagtacccgtccaacaaaattaaattaagatcataaataaaaatatccctgggtgatttttcacaatgtgtgagaaactcaagatgcaaatgctacccaagtgagctgaattgcaagtctatagcgtcatgttagttattagtgtggcacaagattaatggctcatgttcttcttgctttcacttttctcccgcttaagccagatatttctcctcaaatttttgaccactggagagcacacagtgccctttggttctggctcaaagcagcctgtactctcccctctgggacttgggtccttcagcaatattcttcccaggcctaaactctcagcctctggtctaagcagtcacttgagcctgaactcaactagtggtcagcatcagatcatggaataggatggtgtaagaggtcctggattagaagctaggctgagtttgtgaccagtctgtccaacttggcaaaaccccatctctattaaaaatacaaaaattagccaagcatggtggcacatgtctgtagtcccagctacttgcaggctgaggcacgagaatcacttgaatctgggaggcagaggttgcagtgagctgagatcacaccactgcactccagcctgggcaacagagtgagactatgtctcaaaaaaaaaaaaaaaaaatggagctgagggctgagctggcaggaaggggctgggcagagcaggggcatgcatcctgacataggcagcagtcagtggctgtgaaataagaccaaccacaggtcaaaggcaaggtcacagtctagattggaaaactggggctaaggtccagagagctgagttgctccagatggcacaggacagaatggaaagcaggcataccggtattggttggacattcaagctaacctaaatctagcttccagaaaagacaggttcacacatgtctattcaggatgttactaaggtatgccccctcaaatggttttaagcacttttcctgctgaggaagtagagagagggagccaggattctgcaagtgccacttgtaacatgtagcggggccaaatgtgattctctcccctcccacactcagtgctgtctagcccaaattttacaccctaagaagccatggatcattgagttcaaaacatactttctccatccaccccttgaggttaggttgaatgatttggatgcagacctggtgtttcaggagacaggttggtgacattaatggtaatatgcaactatgagttacaaaatcaacccatagctaatttcaacaaccagaagttgtggtgcctgagacagtgcccaactgccatggtaccgtttgttttgttccttgttcatattatgatgaagggattaagttgtgttggaattagcttcatctagacactgcagttcaagtctttcatcagtagctgcattttaatcctactgggtttaataacagtactaaaaatctttatggtatgtcatttaatcatcgacctttgcattacttcaacagcagccttacaagtaacaaagaataaatcctgtgcttgcctctaggttttccacagaggtagtgaaaagaactggattttcaagttcactttgcaagaggcaagtaggaaggagactgaaagctgctcgtaaatcagtaaatcagttgctttaggccggacacctgccctgtcagtctcagctacatccaaatggaaaaatgggtgatctaggattaccctcaggcgatgccaatggccaaggcactaaaaggtcacatctattattgctggcatttctttccccactgggctgttttttgagtggatgtcatactcatctcatacagaaggcatgtccatcatgctagagcagtgctgtcaatattagatctaatgaaatacaccctatttttcttttctgcaaacttcattatacctagctgccgctaaaagatgattccttttttccttactactccaacattacattttagggacatgaatccttaagcaaagtttcattcgccacctctgattttaaagttaaaatgagtcttttaaaaacattaaccaaaataaatggcacagtgagtgccatacccagaagtggctacataaagccactacataaacagtcaatgctcccttggaagaagtcactggcctttactaataatatcatgttcatcagcaaacaatttggcaagtgtgtagtatcagaagttgggggaggactagaaacacaatcttaacacacaaaaataaatgtggataaaaaagtgtagcaacagctgttgccagctgcaagcaaccacgcagtaaaatcctgtccaactctgcaggggactgtatgaggactcttggagcctgagacaggagtgacaaaagatcgcattgtaagaacatcgaacgtgaaccctggctagcaagcacccctaggaattaccaataggaggaattgagaacattgccaagaattcatcttccccagatcgaatcactgcataaaatcagccctatttgttctaagaagtccacattcataagcttcattctaactgagcttggttcttagcctataaggcccataagaactcctttggactctgtggatctccattttaaaagcgttattgactcgaacctggggaggtgtttttcctggagttctttctcaccagactagttctggctgcctcctgggtgatgatggaaaactgaggcacttgccaacatgtcatcccctcattttgcaaccctcaggcagttgcacaaaggctatgtggaactttaccaactagttaaaggcagagtccgggacagtcttaaaggaattaggactattacaatgtccaagtgttgcatattaaggaactccatcacagggccagataaactaggtgcaaggcgatgcaattaagagcctttcattcaacacctcttcactcataaccctggggttttgaaatgcagcgcctttcaagtcacacttgaaaactgttgcctaagcagcctctccagaattttctgattccagaagctaaaagagccctaagaaaccacaggagaagctgccctgcactccttctgtgggagtcactgaggacagaagagttacgtgatatcaaacatctttaagaggcctgaaaattcttcacttacttagagctaaacccatcttagaaatctgcttattgtatatgtttaggtaactctcatttgcctggagcaacttgaaaaaaaattttttagaaagtaaaacaggaaattcagaataagacatggccttgaccagctaaattaattgcccaagtaaccttttgcataaaggaaacaggatcaggaaggatttccattcaaaccttgctattttgccttcaggtaagaggacaggattcttttctaaaattttgctgtgaagaccctaataaataattttgcttttttctcctccctattctagaaatagaagggaggaggacctattttgttccatcctgtaggctgatcctttacacctaggactggaagaaataaggtagatttttgtggaaatgtagaatatgcattcaccagctacactggaatcaggaagcataaatcacaagtagcttggtctctccacagaaatgtggaaatggtaggccctgaaagagcctcagtagggatgcatgtgatagcttcatgagctgggcaggctagctgtggagatgcaaaaaccacagcatgcagcatgcattctctccaaagataatggtggtccataccccatctccagcacccatggacaaaatcaagccaaagttatagggtctgttttagggaaactacaatgactgttgtgaggtaatagtttcccacacgactaaactcttttgtgataataaagtaaaaagtaatgaaaaaaagttactgttagtttgattttataatttatcatagtgggaagaattcttgacccagagtttaaagacttgacattccacttttaacactttcatctgactttggacaagtggcttaattttctcatctgtgaaagcctctttcttccttttgaaatggaaatactgatatttgtttttctcagcctccgaacttcttaaaagttacaaattaagatcatgtgagtaaaaaaagtacaggagtaaaatggtctcattctattgggctattctaaaagaaactatttctatttctttctttaaaagcacctgttgtgtccttagtgtagaggctaaaaataaaaagattttttaaaaatcagaaagcacttgtaatcattccatttattccttccccatttattagaaaaaccccggggtgagggggtcagattatgtcccttgatttcaaggctgatcagctaatgtacatcatcaaatccttagaagctcagacatagccttgtgtcctccttaacacctggctgcattaaagtttcaaccatagcccacaaagttttctattagtagtagcacactcagtaaaaaataaaagccatcttttactgtgcatctgctatgtgtattaatcgttaatcctcatttagaaaatatttttaggtattttatacttattaacccagttttatcataaagaaacagcattactcaaagaaattgggttagacagatttaaaaaattttactgttaatgctaattcttaaaaataactgtgaaacaaaagacagtctagagactaaaggaacgttgtagatactacttcatcctcgttacatgtctttgtttactcttttaagatcagtaaagaggacctctataatgtactttttctgtgaaacctgcccttgagtaatgagtcgttctgcaaatcattaattcaaatagtgctcttgccacttttctttgatagatctactaagacaaagatcagagtaaattaaaatgacaatctcctgcaggcaacaactggtattgccagtactagaaggcatttagttattgtacctgtctttacttaatcatggctctgacttgagcatttgatttaaaaactactgcagagcaagtcaccaccctgtatttagcatactgacttaataattaaaagggtatcacaaaaaatgaatgaaaaaaaatttattcactggagttaggtactagtaaaagcattaaaaattcaagaaatcttatgggggaaatctaatttagaaaaacagtgagtagtttttgaagtggctgttgaagtgaatattaattcagtattcttcctaaaggagaaagcatgtcaagaaaatagcatttaggatttttaaaaatgtttgtaaaagtctacaaatatgtttttaatatattacctggaaatgtttgttaaaaacatagattcccaggtcttgcatgcagagattttgattcagtagtgttataattatacatcacttcagtataaataacttttgttcatataatccaatgcctaataggaatgcttgatagtgtcctaatcaggacccgccctcttcagaggtggctacttagctatttgtagtgaaatcaacacctaaagttttgttatttactataaaagatgtcagaaagaattttgtacaattagtggtatcaagagtagtaactgagaaggaaaaattttctggacccagaaaatgtcttgtatgaacaagacataggagtggagaagcccagcactcaaatgtcattgatggagtatgtgaggtctaagccccactgaactcagctgcctgacccaaaagaggtcttgatgtcattgatgtctgtttggagtgaacttttcatgcaaggtgctggttggtgagcctcacttgcggccagcccacctgaaattacaggcaaggcatatgactattttctggctgtttgtttataacacatgtacacttgggaaatttgattgttgaagacttgctttcactgaaatacacctcttggtaattagattgtgagggtggagtcatctaactcccagatacctctaacaaagctaccaatacttactaaaagagcttatttgttgatcatctaaactggccaagaccattcacaaaaataaaggattggttgagacacacacattgtattttaatatcacttcaggtgacactgaagcaggtgatttacaaaccatacattgggaaccactggattaagaaaagacatgtcattacaaatgtattttagaaatctaatctttgataaaaggatttaagagctaaaaaagctgatttcaggagtaagaagacatgtttttttaaccttaaaatgattttaggtagctagaacccccaaacagatgaatgaaggatgttactacaaggtaattaatagaactgaccttcacctcccttaatatttacacttgagaacttatctcttttcatatttacatataggatttagtttaatctacagcaaacatgtatctatgaagcaagtgtttgaatttcaggccacatgcaatattttcactgttttgttttatatcatcatctatttgcctgagagttaaaatcaaactcttttttttttgaggcttatgttgatcatttatatttgtgcagaattttattatttatttatttattttgagacggagtttcactcttgttgcccaggctggcgtgcagcagtgcagtctcagctcactgcaacctctggctcccgggttcaagcgattctcctgcctcagcctcccgagtagctaggattacaggtgcctaccatcacgcctggctaattttttctattttagtagagacggggtttcatgatgttggccaggctggtctcaaattcctgaactcaggtgatccaccggtctcagcttcccaaggtgctgggattacaggcatgagccaccatgcctagcagaattttatgctttataaatcattaatgcatgttattttctttttaggtgaaaaatgttacttaatagtgtcattatctgttctataagactcattaatttcccaaacagttatagaagataagatacaaatagtatgttctcaattttaaaaataaatacggggatagtactattaacttgcccaagttatccattcatgcagtagaagagattcctaattattagcataaaagttcactagatattctctgaatatcagtgtgtctttctagccagtaatttcaattagcatgacagtcaatgagatatacttaaaatttaatattttcaaaagcctgaaattgtaagacactgcgaatgtctttatgctgtgtattaaaatgattacatataaagagttgacttggttgttaataaaaaacacccattagcagatttaacaactgtgttaaaaataaaatgttccaagacaggaaataaaaggttgaaacttttctttagttacagcaataaaagccataaaagtgatggatttttgaaatttatatgtcaaaagttcaaactatatttgaagagttagattttgacacttacaaagtgtcaaaaatttgacacttacaaagatcagtgttctcattctcccagtaatgactgacagacacagacgggtcacttcattcctcccattaatagaactgagaggggaaaggctttttccttaatccaaaaacaaacatgagtatagcaaagctcattcacatgcccaaatatcaatgtaccacacaacctgagttcagatcagtgcacttgggtaagcatagtccctgataacattctgctcttctacatctttaaaaatatacaatagtttaaatttaaaatgaccatttaattattctctctataagtgtctattgagcaccactgttttccaggcatattatagatgaagagaacatggtggtgaaaaaaatgatcaaggttttatcatatcatagagatgccattttagagatggttatagacattaagcaagtaaattaatttcacaatacaagcaagatgtgacaaatgctatgaaagaaataagacagaatgatataatggagtgactgggaaaaggaggacatgtgaatttggagttcaggaaagtcatttctaagcaggagatatttgaggctatacaaaggtctgggtacagagcaatctggacagcaggacagcaagcacaaaggtcctaaaatgggaacaagctcggtatggatggagacaaatacaaacattggaaggaataaagttaccaacacagctttgttacaggtgatgagaaagcccaactgagagaaaatgatagctgtgaaatccagataacccatcctgccacttcagttgattaatcagaatttctagttgtctcaatgcagaaatgtccaggctaatatcaccattttccatgacccacttctccactggaaataagatttatcttgccaccccaaatgataccatctctagaggggcagggaatttaggaggcaatgtgagagtcaggccaaatttaatagtcaacaatgacattattttcacaatatatatttcctcattttagggaaaatatgaatcccaggaaagccacttattgttgtggaactctaagcattgtagagcagctctggctttttggaatttggtcctgccaaggtgtggatttttcctttcagtggcatttagcagatctcgtccataactaggcacggatggcactctttttcactttttgttccttttatagcagagagttattttctaagtacaaatttaaatttgaaactcaccataatttatttgcttccagaagagttcatgtttttgattttaaaatattaaaataaaaattagatgaaaagtatcaaaggaactagaagaacaaaagttaaaataagaaatactaaggctcttaaatataatttaaaactgatttaaatagatacttaaaaacactgaagaaatgcttttttgaaaaacattttagggtactaaaaaatatttagtaccctaaatttagtaccatttaatttagaaattaattggtgttaataaataaatgtaataatctaatatacataatatatgtataaattcaaattatatattatatactgtataatatataattatattatatactgtatataatatataattatatattatatactgtatataatatataattatatattatatactgtatataatataattatattatatactgtataatatataattatatattatatacagtatataatatacagtatataatatataattatatatataaatttaaattttatatatataaaatttaaaagtatatatatatatatatacttttagtttagaagagcagagtctgtgtagattaaactccttcttggtaggcaaaagtaacccaaagatcatcctggaaaagtatactgggaggaaactgttggtgaaagtgaagtgaatacaaaactaaacatcttgaatttggcatagattcagctgagagaagcaaaatttgtaagcagaaaaagaaggataaaggtaaatgggaagggtgtttggacttataaaggctcattaaactttatatcctttctctatataattttctgccagtacaataacacaccctgggtacataatgaaataaaaggtgataatagttagggtccagtgtcattctgtgcctaaaactttaaataaattgccattccatatggatgttaaagcattcatgtgacaaatcatcacatagtcgtgtaatgaaagggggttgctgtttttcaaatttgttgattaatagagtagttcaagctaaagttgctttttacaaagtatacaatattaggaggcaaattacctggcagggggtagcctgctcctgtcactccatgagcttccggagtgaagtaagcccaaggatgaagcctgactcttggtcatcttgagccaaaccaagctacatcacctaatccaatcctccagaaaatagaatcaactggaggtcagtggacaattgttgacagtggaaggctaagcaaatgtattagctttggaattacacagatctaggtttaaaccctaggcttatgggatataagcagccacttgcaagttttgtaactctgaggaggtgtcttcacctctgtaagcctcaatatttttttaatgtaaaacacaatttttttctttttccagaaacagagtatcactatgtggcccaagctggtctggacctcctaggtgcaagagatcctcccacctcagcctaaaacacagattttaatgcccaattttgttataataagaattaaataagttaatgtacgtaaagtttttagcacagcagttgatccctgttgggccttcaataaacagtactttggaaaaaaaaaaagaattctcttttaagcaatatcttcttatgcttactaaagccatagaatgggagcttgggcctcttcccactctgtgaatgttcatgaccacagcccactctgcatatgagacaacgaaccatcactaactgcaaaggagcaaacaacgtgtctccagtcagccttagtgaaaattgctcctgatccctctcttctttcaggggttgcagcagctcagacaatccttaccatgtgaaaggaggaatgactgtcatggcatgaaaaaagcatcactatggtagcttatttttccggttttcttttctttgagcatgtttagagctttgaacatgtagaactggccagagtctggcacatcctaatcagttttctttgccatcctgaaaagtcctgtgtaccttctcatcattcagttggcatcagttctcatcttggtccaggcttaacttgcacttaagagtattgtgagcataggaggggaattagtgtggcatttggtggaggtacagtgaagaagggaactggattaggaggctgaagtcttggcttcttggcttgttgccagttgtggcaaagtacctcaacatctctcaattacaaatgctaattcttactatatagcatttgtatgtatgtgtgatggtgaaataaaataataagaaactggtttataaattatatagagctattaaaaaataagacctttattcttgtagacctatttgatgtataaaataaatattgtgttatatttaactttaatattaataaaatcttctccatttatgaattccaatattgctccaaaatggactttattcttaccctgtatatctataaaatgtatcattataaataacatatattacaaatgattagtaatttaattatctgattttaaattaacattaagatactagttcagatcagcctgtaaacacacaaattattttcctgataaattacttttgcatatattgcttaggtaactaacaaaggtagagttggaaatcttgagtgtacaaagtatttttcatttagaaaatctaaagaattacatattataatattaagccatatcttctactaacatgagtgaaacaggacttggctttataaaatctaggatctgataattctcttttacaatataagaaaattaagcaattgaaactaacatagcccttgtagaattttttacaacaccttttttttagatatgtgtacttcctgataagcagagatgatgaaataatggcctattaaaagcaagtaagtttctataaaaacgcccaagcagggatttaaggcatctcctgcatgcacagttgcagttagttattccaggtattatttttgttttcagaaaaagaaaactcagtagaagataatggcaagtccagactggggatatgatgacaaaaatggtaagagttctcctgtttatatagatcaaaatgataacttgttcccatttccaacagaaaagatattaagtatttaaaataattgtacagctataggttaattgttgaactgtctgctttaaataattatactatctttgcatgtattcttagcattgtcttttggggcatggctgactacaaaatatgtttgatatatatatatacaggcatacctcagagatactgaaggttcagtttcagacccctatcattaagcaaatatcacaagaaagcaagtcacataaaatttggagttttccatggcatttacaagttatgtttacactatgctgttgtctattaagtgtgcaatagcatgtttaaaaaatctacataccttaattaaaaatactttattgctaaagtatgctagtgatcacctgagccttcagaagtattaatttttttttctttgacacagagtcctctctgtcgcccagctagagtgcaatggcatgatctaggctcactgcaatctctgcctcccaggttcaagtgattctcctgcctcagcctcccgagtagctgggactacaggtgcccaccaccacgcctagctaatttttttgtatttttagtagagatggggttccaccgtgttagccaggatggtcttgatctcccaacctcatgatctgccctccttggcctcccaacgtgctgggattacaggcatgagccaccacgcccagccaagtattaatctttttgatggtggagggtcttgcctcagtgtggatgactgctgactgatcaggatagtggttgctgaaggttgggaaggctcaaagttatccatgactttggaattaacttctttcaaactcctgttaatgttgataacttgaccttctcccatgaattacaaatgttcatgcagaatggtgaatcctttccagacaacttccatttcctttactcagatccatcataaaaaaaattattatctatgggaactacagccttacaaagtgtattcttaaataagatttgaaagttgaaattactccttgatccatagactgcagaatagatgctgtgttagcaggcataagcataacatcaatctccttgtacatctccatcagagctcctgggtgaccaggtgcactgtcaatgagcagtgatattttgaaaggaatcttcttttactgaggagtagagctcaacagtgggcttgaaaatagtcagtaaaccaggctgtaaatagatgtgctgtcattcaggctttgttgttccttttacagagcacaggcagagtagattgagtataattcttaagggtcctaggattttcagaatgttaaatgagtgttggcttcaacttaaagtcaacagttgcatttgaccctaacaaaagagtcaggctgtttttaaaactttgaaaccatgcattgacttctcctctctagctatgaaagtcctagatgctatctccttccaaaagaaggctgttttgtctgctctgaaaatctgttgtttagtgtagtcaccttcattggttatcttagctagatcttctgtataactgtctgcggcttctgtatcagcacttgccacatcacctcacactttcatgttatggagatggcatctttctttaaatctcataaaccaacctcgactagcttctaacttttcttctgcagcttctttgcctttctcaggcttcacagaattaaaaagagctatagccttgctctcattaggattcggcttaagggaatgtggttgttggtttttgatcttctatccagactatgcaaactttctccatatcagcaataatgctgctttgctttcttatcatttgtgtgtgcactggtgtagcacctttaattttctccaagaacttttcttttgcattcacggcttgactaactggcacaagaggtctagtttttggcctgtctcaactcttgacatgccttcttcactgagcttaatcatttctagcttttgatttaaagtgagaaacatgtgactcttcctctcactggagtacttacaggtcattgtagggttattaaacagattaatttcaatattcttgtctcagggaataggcagacttacagagagggagatagatggggaatagccagtcagtaaagtagttaaaacacacacaacatttacagattaagttcatcatcttacttggacatggtttatggtgccacaacactattataatagtaacatcaaagatctccatgatagatatatgaacaattaaaaagtttaaaatattgtgagaattaccaaaatgtgacacagagacgtgaaataaacacatgctgttgaaaatatgcccctaataagcttgcttgatgcaaggttgctacaaatcttcagtttgtaaaaaatgcaatatctgcaaagaacaataaagtgaagcgcaataaaatgagttaagcttgtattagaaatctattgctaataataaaatatgtatggtctgattctatagactatgagtatagatctatattagtagtattgacaaatacactattttatagtacaatatagaaaaggggccgggtgcagtggctcatgcttgtaatcccagcactttgggagaccaaggcaggtggatcacttgaagtcaggagttcgagacaagcctggacaacatgatgaaaccccatctctactaaaaatacaaaaaaattggccaggcatggtggcatgctcctgtaatcccagctacttgggaagctcacgcatgagaatcgcttgagcttgggaggcagaggttgcagtgagccaagagcgcatcactgcactccagcctgggtgacagagcaagactctgtcaaaaaaaaaaaaaaaaagagagagaaagaaagagagagagagaaagaaggaaagaaagaaagaaagaaagaaagaaagaaagaaagaaagaaagaaagaaaaagaaggaaagaaagaaagaaaagggacatcttcaaacacagaatttctattaatcttaagagaatatcatttaatacactgaaataaaccctaatctaataagcaaacaggtaactatactcctaaaacttggaatcaagcatttgataagacattgattttacacgtgtttgtcctggtaggtcctgaacaatggagcaagctgtatcccattgccaatggaaataaccagtcccctgttgatattaaaaccagtgaaaccaaacatgacacctctctgaaacctattagtgtctcctacaacccagccacagccaaagaaattatcaatgtggggcattccttccatgtaaattttgaggacaacgataaccgatcaggtgagctgaaagacccttctgatatttttttcttacagtctactgggaaaatttaaaaaatagtgctcgagaaatatgacacccattctaagtcttttgtgcttgtgtgcagcattgctgtaatctagtgaggcatcttggacttctggaaaacgcccaggtggtaaagacaatttttggaactcccagctctctattttcagtcttgcttctcaaagtcaccatcacgtctcttctcgtcattccagtatctgtatgctcacttcactgtctctgaataaacagcatttatccagaaaggtctagtgaaccagtcattacaaatataacaactaaaaagaaaaatattttctaattgggatgagtatgaatgagcacagtagaaaagaaaaacaaagcagtgactgaattatccttatactccagaatctagaacaaattttgctacagagttagcttttcatgaaggtttattgaatattttattaaatgacaattccataaaacagttctactgatttaaaatgctaaatttgtttatgagtttctgaggcctaaattttaggcaccttgggactatgtccattattaatattagattaggtctggtattatatgcatttaactaatattatcattggataggctctccaaacaaagttttataagtgccccactgccccactggtactctctcttggtccctggccagggattctcaacaaagctgtcaagatatacttttgtgtcttcatcagttacacagtaggtgatgaatggttcattactcaaaataaactactaaagatttttgatgcatactgtctttgttgaaagaatgaaggaataaacttgcaaattaaaggagattcaaggacagccctgtaatgatataattcactcacattgcaatatgctttctaggagttagaaataggtaaaattgtagctcgtgtggctgggaaatgtgtataattcatggaatagctcatcaatgccacagtcaggggtgcaccatacatatgactgtcatcctcatggatgtgggggaaaacaagatgaaagtttaggcactaatgtttgttttcacttctactcaatacaatttagtgttggtttatattaaatgcaaagataagctagagtttgtggagcatcaggctaacaatcggttcccttttcttccagtgctgaaaggtggtcctttctctgacagctacaggctctttcagttccattttcactggggcagtacaaatgagcatggttcagaacatacagtggatggagtcaaatattctgccgaggtaatgtaatttagtaagtgagagataattaccctgagagtactcccagaagcagcttctcccttcttttctaagacaacatcataatgactccaaaggaatgggtattccagtaaggaactcccagtttccattaaaatcaagcacagacacataatgtttggcaagagagagaaaattttcatgtggaaagaggcagctaaactcctgagcccaagattcacctttccctgagaatgcctcaaaagctgttaccttgatatcaaagctagcttcaaaggatgacactgctcctcctttaaagctgtaaccccaaatggaacacaccatcatttcctctttatttaaacgttcaagtttggatacaccagcagtatcgttgtggccaagccaggacaattcaatgagactctactaagagctcgaatttaaccacagcaatggtcacagaacagcatacacctagatgagggtctaaccttccctggctcttaacctgctctcacatggaagtttgtgacttatttcaggacattattatctgtatatccaaagaaaaatggagacatgtacaccaaactctcagcagagggtctgggagattaaaatgtgagaaattttgctctttattttaggtgtatgaattatataatacatgtgtacccatatatgcaggttgactttttaattttactttcatcaaatgaattctataatatatataattttgcaacctgctttttttctatttacccacttatcatgacaatttttaaaaatcagaagattgaattccaccttttttactgtcagcatagtatttcatttgggtgaatgcatcagaatttatttaactgccttctattgatgaacaatcacaacatatgatttttgttatattggtttcttttgcttttattaaaaaatgcttcagtgaatatatctgtacatatatcttgtgcactagtgaaagtaattatgtacgatagatttttccagggcagactgctacgttacaaagtatatgtatcttctattctgatagaacatcagcagattgtatacaaataaaacttgctttaccttgtgttgtaaagcatgactaacacctttcaatgctgcagaaatctgttaattgggttttcccctccataaaattgaaggtagattaaaattaaatggactaagagcctaaattagtattatctttttggaaggatagttggtagtatccaagaaaactaaattagtgactctctcatctaaattgagaaaaatcaatataatccatgctagatattgagagacacttagccacaaagtttagcatatgattaaattcagttcaataaaccttcttgagatacctataagacaataggtttgagaggcaatgcagcctgttgcttaagaatgcaagtacccagctgactgccagggtttgaatcaaagctcgaccacttactagctgtacaaattcaaacaaatcactctacgctccagtattcctatatagagaatctagataatatagcattagtatctatcttaataattgttgacagcatgaaaagagttaacccatacagagcacacttagaccagcacctttcatgttgcatgtgctgaataatgttacttaacatttccgtagagacacaagcaaacatttttcaagcagggaagtataggcataaattattgtgattaaataaatatagtagcaaatggcagtatgactattcacaaagaagcataggaatacagatgtaagaataattaattacaagtagggacagaatctacactggcatggtcagaggaaattgcaataagtgatccctcttaatatactgtcttaatcattcttttttcattcaacaaatattcactggacacctacaatatgccagatactgtctttattttttgtcgttatttatttatttatttttgagaaagagtcttgctctgttgcccaggctggagtccagaggcacgatctcggcttactgcaacctcctcctctcaggttcaagtgattctcctgccccggcctcctgagtagctgggattacaggcatgtgccaccacacccggctaattttgtatttttagtagagatggagttttaccacgttggtcaggctgatctcgaactcctgacctcgtgatccgcccgcctcggcctcccaaagtgctggaattacaggcgtgagatactgtttttaaaaagtacttgctatcagaacttgcatttgatagggaaaataaaaatttcagaggaaggaaggcaggaaagaagggagggaggaaggaaggaagggagggaggaaggaagggagggagggaggaagggagggaggagaataggaagaagagagattaaataagtgatatggatagaactgttttgatttgtggtggttactttatattggatgatcaggaaagaattatttaaggagtggcatttgagttcaaccctaattcaagacaaaagtctgccatttgaagatcatggggaaggaaattccagagaaaattagaagctaatgcaaaggctcaaagttgtgaacatgtgacgaagtataacctgtaagatgtgaatgttgataggtggggaaagcaagaaatgaatgatagttgttgtacttattgattgagcatttaaaaaccttatcctaagaaggtaaaattaagcaggtttggcaagaaggaaatctagagttctattttggccagattaagtctgaaacatctattagacatccatgtagagatatcaagaatatatcaagaatacatatatacatacttggatgtacaaatctagagtttgcagagacgttaagctggagatatttatttgagagatgtttggaaagggcacgaacgtgcctgaaagaatctgttcttggccaagactcccaggaactccaggaaccctttctcataaatttactataaagtacctcatgtgagagaaaattacttcaattattttcccaaaaactagttagtcatatttcctgatcttttcaaaacaaagagagatacatttaaaggagtaatattaaataacaatatcgtaggaaaggacattttgcttactggttccaggttttgtaatctctacctggcacacagataacccttcctacgagtgagaatgtaactcttctaatccactggataaaggttcacataagttttatgtatctaagccaagatacatcatcatatggtaacaagttaacttataacttatcttttttcatcacactggtataaataattaattaaccatagtatcatttttagcttcacgtagctcactggaattctgcaaagtactccagccttgctgaagctgcctcaaaggctgatggtttggcagttattggtgttttgatgaaggtgagttacagataattacacagctctgcttccactgtcttaccaattagacctcaaaatagaaggaaataaggcaacatatattttagaatttcttattttaaagtttccatttaaccgatgactacaggtgaacaaatagttccctagtattttattgcttggttttatctctgcttttccctcttaaagagagaaatgagtttcaggtggaggtgagatagaaatgtgttcacagggaaaaaggaatttctattttccagctcttccaaattccctttcctctaaatttcctacatcatagattctgaaatttattaatttaatgtctcatcaggaaagaaatattattaaatattaataaggaaacctgaaatcatagattcagaaatttatcaatttaatatctcattaggaaagaaatagtaagagaattttttcttacaaagaatattcaattgattttttaaatgggagatgttgctcaaatcctctatagaagaatccctgaaaagttctatgaaaaagttattattaaattgggtatgcccgggtaaccaagtaactcttgaaattatagcacttctacttaacctttactgagcacttacaatatgccaaatactgtagtaatgaaaactaatataacagaccaaaataagagatttgtttttgtgtcagttttgataaattactagattttgccctgtataactttgaacatattgccaataattaagtttaaatcaaactttttgtttgctacttttatctgtaggtacatattataaacaatttatagagtacaaaggccctcaaagacatacagcttgaaaaatctccccttctaaagcagagagaaaataccttacctcttgtcagttgttaattgaaaaaaaattcaaaatttagctaagcagtgttcgattgataataatctttatctcatactttattttcttaaatctccaggttggtgaggccaacccaaagctgcagaaagtacttgatgccctccaagcaattaaaaccaaggtaaacacactaaataagtagtttaaatcagagaacaagaatttacagatctatggaaatcatttaatgaagtattaaaactggggagtaggaaggccatagtaaaagctaccaactgaaaatcaaggtgctacttcaatactgcctacctctgagaaagtctctaatgcagggaattgttttggttttctgtttttcatagttatggtttatttatttcagcagaatatggcctgtagaaaaccagattacatagccatttaaatttgcttgaaaaactatatctaacaaaattgtgattttccatttgataaataaagatatctctagttttttagcagtagaaaaattcagaagtaaagggcattcttttgagatatggttgatatacaatctttgataaccataactcttgtcaactcaaaaaaaatggattttttgatatatacaaacttagctttattgttttaaaggtaagcagttaaaccataaatcagagatttgtcatgttttgcagcatggagaactgtcatatatttgtgtaaaatgaatctgatttatgctgattctagaaaagattaaacttaaatgattgtcttataaagtataaatgacagagataaaaaataagccctcaactcaagagttatcaaaaaaatatgaaaagaaaatataaggaaataattagtgaagataaaagcagaaaagaataaaataagaaagaaaaatgatggccgggtgtggtggctcatgcctgtaatcactgcactttgggaggccgaggcgggtagattgcttgaggtcaggagttcaagaccagcctggccaacatagtgaaatcccatctctactaaaaatacaaaaaattagctgggcgtggtggcgcacacatgtagtcctagctaatcaggagattgagccaggagaatcgcttgaacccaggaggtggaggttgcagtgagccgagattgtgccactgcactccagcctgggtaaaagagtgagactccatcttaaataaataaataaataaataaattttgaaaagaaaaatgatggctaagtaaggggtaaaattttatcaataaattgaaaagttgattctttggaagaacaacaaaaaagtcagactttggggaagctggataaagagaaaaaaagccgtacatataaaacattattagaaataaataggttgtgactaaagatatagaagaaaattttaagagacaaaattttttataacattatgccagtaaatttgaaaatttagataaaatggataattttccaagaaaatgtgaaataagggaattgactcaaaaggagttagaatacctaaatagactgagaacctaaaagtaaatttaaacaatagtcaaaatgtatctattaaacaaaaagactaggcccagaccacttcatggaaaagggttactcaacttttaagaaacaatcatgccagtgttaactaaagtgcccagatgaaggaacagacagaaaacttcccatcaatttaatggaatctgataccaaaaccaggtatgaaaactacaaaacagacaaacaaaacaaaaaacataggataaactttcttaggaatatagctaaaggaaatcctaaaatttattataacaaatcaaattcaacagtgttttaaaagagtagtttctgaactagtagagtttatcccaaaaatacaagaatgactcaatattagaaaatcttaaattaattcattatattaactagttaaaggtgaagaaaacctcatgatcaacttgttaaatgcttaaaatcatttgataaaagttaatgccctttctttaggatgaaacaaaatgaaagaaaactgtctgaaaacttattgaatttgataaagaatttacctagaaacttgtatcaacatttaacttcatagtgaaacacttgaagcatttacatttcagtcagggacaagacaaaagtgccactgtgaccatcacaattgaaaattataataagggtcctagtcagtgcaacaaaataatgaaagagtacatattatgatagatatcgaaagagcaaaaacaaaactatcattatgtgcagttgatatcatcactaacatccacctgaaaactccagaagaatcatctaaaatacagaatgcataaaagattagcatacaaatatcagtatatttcctacacaccagtaacaatcagaaaagacgataggaataaatagaataaaactgaaacaaccaatatgcatgtcaataaagatttttgccattgaaatagaatctggcatcattcctagagaaaaaaataaaagctttatactagaaattaaatatgttttaaagatatagattgtaaaaaagatttttgaatctttgcttatctgcaaccaaatgaagaaggaagacgtcttggtcaaaaacttacatataacacatttttcatctttttttcttctgttgatattattgtttatatccacaaacacgccagtcatgaaatactaaatagtagaaaaatcaatgactcttagctaaaatctctaaataatgtataacaagataatatagcatatatatgtcacatatattcatataagtattttatatcatgctgtaatgatgtattcttttcttccagggcaaacgagccccattcacaaattttgacccctctactctccttccttcatccctggatttctggacctaccctggctctctgactcatcctcctctttatgagagtgtaacttggatcatctgtaaggagagcatcagtgtcagctcagagcaggtagagttgtgaatgaatgggaactgggaatgcgtagcaggaatattactttaattgatagtatcagtgagagagattattatttcagtcagctttgtgagaagttcatttttcctcccaacttaaaaatattaatttggggacataggtttattaaactatccaaaaatgcattataatactttattttgcctttatgcagaaaaaaaatgactcccgccactctttcctccttaataaggaaaagtccaaccttgttaaatatcttcttaagcatttcagaaataaaggaaaaactgtgactggacatttcaataagactttggggaattgtggctcccagctggcataccttgatagttggcaaaatatttttgttccttttgtggagcttaaacttttaaatattcaacaaaatatctcattaactgttgttaataatggtgattatagtaagtatcattcattgctctaccatgtttattacgtgccttacatatgttttattagccaattctcataacaaacctacaggacaagcattgtagcctgttgctaactgacatttattgagcacatgctatgtgtcaagtatcattctaagggctttgcatgtattaacccatttaatcttcacaacaacacagtgaagtaagtacttatggaaactaaggtaccaagctaataagtcgctcgcccaacgtaccccagctgaaattaaaaagttgatactttaacccagtcatcaataattaaatcaataaaataaagcaaataattaaatttgctttatttaattgatttaattaaataattaaatcaataattaaagcaaaatgcctggttcaaagaaatgaatgtaaaggatttggggctttctctcttcctattagtgatattactgcaatttctaactcagttttctaaatatcagtgcgttagtaatcctgtaaataaaacgctttatgtaactttaaaaactttttatttttaaaatattttatccttctagctggcacaattccgcagccttctatcaaatgttgaaggtgataacgctgtccccatgcagcacaacaaccgcccaacccaacctctgaagggcagaacagtgagagcttcattttgatgattctgagaagaaacttgtccttcctcaagaacacagccctgcttctgacataatccagtaaaataataatttttaagaaataaatttatttcaatattagcaagacagcatgccttcaaatcaatctgtaaaactaagaaacttaaattttagttcttactgcttaattcaaataataattagtaagctagcaaatagtaatctgtaagcataagcttatgcttaaattcaagtttagtttgaggaattctttaaaattacaactaagtgatttgtatgtctatttttttcagtttatttgaaccaataaaataattttatctctttct

SEQ ID NO: 9 - DNA, 2182 bp, Homo sapiens
ggaaaatggagataaactcagctcatcgtcttgtgatgcccgaaattatgcactacctagtgcatagtaggtgcttaataaacacgagtcctttccttcaaaggatctgggcttagagcccagtggagactgccatgggctggggacagtggcatgtgcctgggaagccttggcatcactcaggcccagaagacaccagtgctctgaatgacacctgcataggggtggagacactctgccttgggagggggctctataccacacatggctggactggggtctgtgtgtgccagtctggatacacaggtggccgactcagctgcttctggcggggagattggtttctgcctcctcctgcctcttttccaactctttaatagagagaggacataatggagtgttcagagaggcctctccccaagacaccataaactgcaggtcaggagccaaggtcaggtgctcccaccctgcctccaggagaaagactttccccaaaaggtcctgtcattcctcagcccttctccaaggtattactgaacagaggctgaaaagggttgtcttttggaaagagtggtcacacatcccacggactggagggaatgtgtccaccctcccacccccaactcccatccacggacaggctagggaagacagaatctcaaccctggtcctaggggctgccccaggagtctagatccaaccgcttcacttcctcaggaggctagacctgccactggggggctgtggggtgaacatggggttcaggctgggtaccccatccagtgagaccacgaatctgagcatggcaactgccccctcagctcctgcgaggtggagacatcacgcactggctgggtataagctcagcgatctggcgagggtggaaggagggaggaagaagggcccaccccctgctggctccccctccccctgggactccccctccctttccaggcggggatataagccccacaaggaaagcgctgagcagaggaggcctcagcttgacctgcggcagtgcagcccttgggacttccctcgccttccacctcctgctcgtctgcttcacaagctatcgctgtgagtggctgggggctcaagcctggggaaacccaggctgttttgtggggaaactgaggctgggatggtggaagctgggggtgagtggtaggaaactggattggagggggccatcggaggtgggaaggaggccagcagcgggggtgggggtggggaggcaggcagggcttatgctcctctgacatgaggaaactgagtcaggagacggtgcagtgcccaagaacacacagcaagcccggtggctgagccttggtccggtaccagccccagggagagcgtcggagcgcggccccgacggcagccgcagcctcccgccgtgtagggtcgaggcttggaatgacccacgtcccaatgtcgccttcccagatggtgttcgtgcgcaggccgtggcccgccttgaccacagtgcttctggccctgctcgtctgcctaggggcgctggtcgacgcctaccccatcaaacccgaggctccccgcgaagacgcctcgccggaggagctgaaccgctactacgcctccctgcgccactacctcaacctggtcacccggcagcggtgagcgcaggcgcggagcgggacccctggggctctcaccctgcggccccgctccacctgggggcgtggccagatctgaccacgctcttcccttccccgcccccaggtatgggaaaagagacggcccggacacgcttctttccaaaacgttcttccccgacggcgaggaccgccccgtcaggtcgcggtaaaagcgcccgttaccacacatcctgcatccgagagcgcggcctggccctaccctggcaacatcacttaacgacgtctcccaggctcgcctccccagatccaattccttccccttcgcttccgcaggtcggagggcccagacctgtggtgaggacccctgaggcctcctgggagatctgccaaccacgcccacgtcatttgcatacgcactcccgaccccagaaacccggattctgcctcccgacggcggcgtctgggcagggttcgggtgcggccctccgcccgcgtctcggtgcccccgccccctgggctggagggctgtgtgtggtccttccctggtcccaaaataaagagcaaat

SEQ ID NO: 10 - DNA, 24978 bp, Homo sapiens
cctgtattttgcttggcttggttctctaatttgactcagcttcacataaagtcaggaacttctcctgccaacagaacttcagcttctccagtggggatgtgtattctggagagggggatcaccctttcccacttccattgttggggcactcacagtgtttgggatgtctcccaggtcctgcaggagcagtacgcttcctgcagagggtgtgtggatcctctcagaattgctggtctgttcttgcagttgatctgcagctaaaattcacaatgcaagcctctgcatgctgctctgtctggagctgcaatctagtcctgcatcccatctgccatgatcactggaaaaccctcatttattttttaaagggtccagaaaatgctaatctatagagatagaaattagattagtggttgcctagggtaggatggatgcaaaatttcagagtggggggttagaggctattgtatagaatcttttggagataatactgattattgtagtgaaagtaaaattctgtgaatatactaggaaacattgaactgtacacactaattggtgagtcatatggcatatgaattatgtgtcaacaaagttttagaagacattacttgcaccacgatattaaaaaatgccgtttgagttgtataattacttcttctctctatgtcaagggcaccgaacaggcaggagcctctcacttgccactgttcttaacagtattataaaataattacataagacaggttacttacatattctaggtcataaaaattattgcttgactagagtaattgtaaacataaaagaacaccaaacacactaaaataaatatgaggtcatcaatcttttgttggtctccttggcatgcacctattcagactgttagtattatgtatttacttcaaattttagcagttatattttaacttgattgatttttcctcagatataagtatgagaaatgacagaaagaaacaacaactggaaaagaagcattgcataagaccaggatgtctctgaaatggacgtcagtctttctgctgatacagctcagttgttactttagctctggaagctgtggaaaggtgctagtgtggcccacagaatacagccattggataaatatgaagacaatcctggaagagcttgttcagaggggtcatgaggtgactgtgttgacatcttcggcttctactcttgtcaatgccagtaaatcatctgctattaaattagaagtttatcctacatctttaactaaaaatgatttggaagattctcttctgaaaattctcgatagatggatatatggtgtttcaaaaaatacattttggtcatatttttcacaattacaagaattgtgttgggaatattatgactacagtaacaagctctgtaaagatgcagttttgaataagaaacttatgatgaaactacaagagtcaaagtttgatgtcattctggcagatgcccttaatccctgtggtgagctactggctgaactatttaacataccctttctgtacagtcttcgattctctgttggctacacatttgagaagaatggtggaggatttctgttccctccttcctatgtacctgttgttatgtcagaattaagtgatcaaatgattttcatggagaggataaaaaatatgatacatatgctttattttgacttttggtttcaaatttatgatctgaagaagtgggaccagttttatagtgaagttctaggtaagtcatgtgtctaactggtgcttattaagttctaacttttctgtgcctttgaaggtgagcttatataaatataatgtcagaagatagtgtttttaagggaaattatgaattgcaaatgtaagatgatctatcagtctcaaaaatattatagaatgttgaccttatagaatcagttagaaccctggggccatcactactacaggacacccagagagtcataaaccttcattgtaaagcactaatgatttctttaaactatcacatatcattttgctatacattttttcatctttaaaaaaagtcaatagatacctcaagaaacatcttcatgaaggcagacacgtaaatttagtatttacacatatttctagaaaaattatcaatgcaggattgaggaatttgtttctctttgagttcctcagtttcctcatttagaaattaaattttgtttttcatgtaagaaggattccttcacagttgagtaatatagtggctctactccagaaacagaagcctaaaacttgagatttctaatgtttatacattccttcaataacaggttgacaattatttctttcaaaaactgaaatcttgttgaaagtgaacatctaagttttaatctatattttattaaactgcatctctccatcaaagaaaataggggccaaattaagggagagcacatatctctatgtcaataaattctgaaaatgttttaattctcatttgtaaatatatttattttaaaaatctaattatattaagatcttaagatgaaccaagacagtagtaggtgtaaagatttcagtgttgagctcaaaaaactcatggtttactttgagaaccaaggatcaagggactagcttaataaactgtagacactagagtacttcctggaaagctgttttcatgggtaaggtaagatgaattaattgtggaactgaaagagttgtttaaaggtatatttgttactattgcagcttcagagggaagacaaatgtgtatttaagttcatagtggctacattagtccattctcacactgctgtaaagaaatacctgagactgggtaatttataaagaaaagaagtttaatagactcagttctacatgactgggatgcctcaagaaacttagaatcatggtgaaaggctaaggggaagcaagcttggatcttctcacttagtggcaggagagagaagtgcaagcaggggaaataccagacacttataaaactatcagatctcatgagagctcactcaatatcatgagaacagcatggaggaatccacaccatgatccaatcacctgccactgggtccctccctggacacatggggattatggggattataattcaagatgagaggagatttgggtggggacagtcaaaccatattagtgacttattttaataattatttatgattgtgaatatactgatgttacattaaagatgtgatttcttcttacagatctctgaatacattgccttccttatatatacatatgagcaacatatgcaataaataaaatctaaattatgactatatataaatgtatttatatatattttatcaatgcacagacattttatatatgtttgggtatgttattccaagtcctttcaggaaaatacctgcatattcaaataacaattctcgtgttagctaccttttgttttgttttgtttttttccatcaggaagacccactacattatttgagacaatggggaaagctgaaatgtggctcattcgaacctattgggattttgaatttcctcgcccattcttaccaaatgttgattttgttggaggacttcactgtaaaccagccaaacccctgcctaaggtaaatgtgttcttgtttcatttgtttgcttgacattttcagaaggaatggctggatatgtttctttcagagtgtttaactcagagtgaggggaatatgggaggtcaaaaacaaggacttgccattagaaaatcatatatttctgtagtatcacaagtatgtgaatgttattatcattaaagaccaaagaggtttactagggagattttgaaaacagggttggttaaagtaaggccttcattgtgccacccaaaagatagtatgattcatttcttcaaaaaatatttgtagagtgattaatacaaaccacaggtaagtgctggattttcagagaataaaggtagcacagtttctgctccctcatgccttacattgtactttgaaagatagaataaaaacaatgaaaaagaaaagtctaaaaagtgttataaggaaagaccacaatgataaagaaatatgcagaagagatcccaaactcattgacaattaaagtgagtactcaataatgtgcagagataggtgaaacgatgaggggatgagaaacacccaaaaagaaaaccagaggccaggcaaggtggctcacacctataatccctgcactttgggaggcagagaaggcatgattgcttgggctcaggagtttgagaccagcctgggaaacgtggtaaaacctcatctctaacaaaaataaaaaataaaataatagccaggcatgctggtgtgtgcctgtagtctcatagtcgtagctacttaagaggctgaggcaggaggcttgcttgagtctgggagcagaggctgcagtgagctgagaccacaccactgaactctagcctgtgcgacagagcgagactctgtctcaaaaacaaacaaataaacaaaaaaaaaaaaagtaaaggcttgcattaaggcagaaaagtagaaaagcaataagggcagttcccaggaactccaaatttaatttacaggaaaaggttgagtaaaagtcaatgatgggccgggcgtggtggcttacacctgtaatcccagcactttgggaggccaaggcaggtggatcacctgaggtcaggagttggagaccagagtggccagcatggtgaaaccccgtctctactaaaaatgcaaaagttagccaggcatgttggcaggtgactgtaatagcagctacttgggaagctgaggcaggagaatcacttgaaccccggaggcagaggttgcagagagccgagatcacgctattgcactccagcctgggcaacagagtgagaatctgtctcaaaaaaaaaaaaaatatatatatatatatatgtaatttgatatacccatagggacaatggagagctactgaaaagagtgaaaagagttaagaaatgaagagatatgatcagatttccttttaaaaaatcccaatattcccaatgtataatattgcaaaaaggcaagtttgtaaaatgtaaagatcatttaggaacttttacatgagtttaagcaatcatgactacttttataataataatcacaacttcatattgtgctgtgtggaaaaaaagtagttaccacagataaaacacttaagttgtctctgacacacagccagtgatccaaaaatattgttgatattatgattattttagtcattatttttaatactttaaattagctaacatgtgccagccatttaagatatcagtcttcatttaatagtgattgattttccaacacatcaagattatattctctagcaaagtcctagagaacagatactctgtgtacttgtttaaatgtaaatgtttaagtttgggcagtcagttgaacaagctggaaagctaaagttgtattgtaaaggtggaggctcttcattaatattctagcttaaaaggtaattctgtgtactcttatcttattctcaaaaaaaaattcctcactcacattaaaagaaagtgatagtgccagtagcagggggaagagagtagcagaataaggacaagggataaatgactagtagtacaatagtgattattactgatactagcatgatctcggctcactgaaacctccaccccccaggttcaagcgatctgattctcctgcctcagcctcccgagtagctgggattacaggcacctgccaacacatctgactaatctttgtgtttttagtagagacagagtttcaccatgttggccaggctggtcttgaactcctgacctcaggtgatccacatgcctcagcctcccaaagtgctgggattacaagtgtgagcctccgttgttgttaacttgcagaaggtagacttgaatccaagtaaataattgtgaaactgattctctaattcttttgtacacaaaataattgttgccacaaatttgcttgcttttccattatgtattagattctcagataatgtttgtatatttcaaaagaataagactcttgccaaaaagtatcaagtgtttgaaaaatgcatataggcattgcctttataatatactcacatgaaactgtacagagaataaatcatgatggtaagattcaatatcggtagcaaatactcattaaaaaaactctggaaataattcaaatatcttacattaagaaatggttaaaaacttacataatgtgcataccaagccattacaatccttttttcaaaacaatgtttaattacactgtcagccgtggtacaggtatagttggaaactaaggaacaaaatgatgagtagaacaagatcacagtttttttgtagaataaaaaggcatatacaatgagaataaaattttctaaataaacatcacatatgtacattgagttatataaatagaattaaacccataatgaaatggtacacattttaaattgagatagagatatgggtaaatgattttctttttctaaattttcatacttttataaaactacttacattgatcttctattaccattactttcataaagacatcacagaatgagatcagtgctgatctgtctataaatagatgttttattacttcaatactgggtgggtgaagcagacttttggcagtgaatgagacaaaacattgaactcaagttacattaaatgtggctacaggcaactgcaattacactgagttcctggatgcctcatgaattatctctaatagccatacactgaatctccaattaaaactgatgtcaggccaggcacagtggctcatgcctgtaatcccagcacatcgggaggctgaggcgggtggatcacaaggtcaggaggtcaagaccactctggccaagatggtgaaacctgtctctactaaaaacagaaaaattagccaggcgtggtggcaggtgcctgtaatcccagctactcaggagactgaggcaggagaattgcttgaacctgggaggcagaggttgcaatgagccaagattgcatcattgcactccagcctgggtgacagagaaagactccatctggaaaaaaaaaaaagatgtcataaagttaaattatattttttaaaaatacttaccaatatatggtctgaattgacatattttagaatttctttttttatttgtaaacagttttataaagaaatttcccccaatgattaggaccagaaagtatatttgttatgacagaaggggttggtcattattttactgagaaaaagagaatttagaacaaaagggacaacagcaacaaaaagatgagtatacaattttgatatgatatccaggaaacttatgggtctacatttcttttcctctttctctctctcttttttttttttttggtgtgagaatacattgagcgatgtggcattagagaatggatttaagtttaaaaacagggacacatcaggaaacacaagtcagaataattctcattcatttcaaagcaaacacatattcaccaggagcttcatatagtgtgagggagctactctagggggtgagcagatctccactggagaaagtcctggtgacctctcccactgtggttcaagtgccccctgtgagacacagcaaagtgatgatgagggtcccccacattcagttatacatagcacatcaaattcacagtgtgatttcaggacaaaaggtgtcatagtcatacctaagcaatgacctgagaaataagatcacttaattatgtaactatatagtatataatactgtattataaatggaattctcagaactatttcccagaaattccaaaccacaataccagactgctgaatgtcagtgattcttatacttcagcttttaaggtgtttttggggggtgggggtgtcgggggcagtgaggggtagtggggtaagactaggaaaccctaactttaagtgaaatataaagggttagagagctagaagctaaataaatgtagatataatatcattccaattgtaactaacttttcctcattgctcatagtcatgtaatggctccaatgactcctaactaaaagaactgaacagaaaaaaataaaataaaataaaactactccaaataaacacaagagatttagtagaaccacaaaaaaaattagaattgaagccaagtaaagctaccttccaataacctatgttagtaattataatattataaataaagtgtctgggtgtaacattttctagcattatctcctcctactgcagtgtcatagctttgtttcatttcctccttacacacacatacatacatgcatatgcacacatatttacacaaatttgcatgaaagatcccacatatattatattacacatctcctttcaaagaaactgaatgattaggtcagtttaaaaaaattactccaatagctcctgactttctcatcttagatgtttgtaacaatcctgtcaatagtgttttctgtgctgttgctcttttctgatagaacaaattctttcttcacaggaaatggaagagtttgtgcagagctctggagaaaatggtattgtggtgttttctctggggtcgatgatcagtaacatgtcagaagaaagtgccaacatgattgcatcagcccttgcccagatcccacaaaaggttagataaagtgccttaactgtggatggctactaaatgaatctgttaaactcttcaagagtccattacagaaatgttctgcctgaaaatttaactgctatgatagttctaattatctcagacatctgttcaaagcaaaaacatatatggaagatcttaaaatcataaagagaggagttttggttgataataacgttggcattaatattgtgatcagaaggaaatatatttaagaggtgctagtgaagtttggtattatcatggtatcgtagcatgtacatagaaatcactaaattctgccctgtcatttgctccttttggtttacaggattttagaaggtactgtatacactgtagatattatcaaaaagcagttaaattttaataagttactgtactatcacaataacaataagcaggtattgaaaaaactttgaaatgcatcatgcagcttcgtcttaccaagcaatctggctgtttttacttcccatgcattggaataggtctatttagcgttctgttcagggtgccattcagagaaagaatgtcctagtctgactagccactgctctggaggtacccacctagccaagtagatttagagaaaaaaaaaaaaaacttgtctgctctgctgacttgggtgccactaatgtcttaagcagaaaaatgtaatggaaaggatggagatagaatcctgcttttagggtagactatgtgcattattaaatgtggcccaacaaagactatgctctaagaatcagattagtgccttctccagattgaggaaggagcagaaaatataaataaacatggtaggaacttattttctaatctatacaatctttgtgtattttcaatttacgttttagtttcttatctgacatagccctctctgaatgatctatgcaagtttttgctgaaaacacagagttactttaacactcccatatcaaatacaaggtcaacacttgtaaattctactccagtttataaagattgcttgggaattctaaaatcagtaccttagtttggtactagacatggtaatgactggctatagctgaccatatatcaaggctgtcaatgctaggtagtgcatcatctaagtgtgaaagatcagttaagcaaaatgcagcaaaatacaattttctacattttcagcatctgtattgttaatcatgaattgtcaatgggctcctttttcctacattgttagcatttacaaaagtagcaatactgataatagtctgaatttgtgtcaaacactgccacttgaaatttttcctgaaagtagcacttgatagttagcaaatgaaaagaaattacacatactacatatgtagcattatttctcaccatatgtgcagtttaaatatttagtcttttgtaatcaatgatgtcaaattcataaaataacttatgactagtagacaagtggatataagtaaactcttctcatatcactcaaaaattaataaatttatattaaatttggaaggttacagctagtataaagtatataaaataaatatataggttattactaatttgctacttttttattactagaattaagactgcctaacaattcttaaatatttgaatatttcattgataatcttgtgaaccccaaatatctgatacaggtctcagtacatttagaaagtttatttttgccaacttgaagcagggaggaggcattcctttgactttctgattagcctctccaaggaggcaatcagatatgcatttatcccagtgagcagaggggtgactttgaatagaatgggaggcagtgatttgcttagtgactttggggcccccaggcttattttccttttacatttaaaaaaaatcttttggagaaagcattttagaagaaaatgagtctctggtctcaggttttcatctgatctctaatggcaaggaaggtttattcctaagcaggtcctgagttattaggaaagttcatttttagtaggttgtgaagtctcatgtcctatgaagacaaaataaagggagaaagggagaaaaacaaaaccaaacaaaagaaaaatccttgaaaattaatataggcccattactctgaagtccataaatcagtaggcaggtaagaaagtggattatgtatgtaaattggctgctgttattttcttctgaagtttaagttgtctagcttaatttgtagggctttatgaaagcatgacttagtttacagtgactccaaactaggaaaaatggtggaaagggaggaaaaaaaacctgaagacactattttgaagacgtgtagccatgaaaaattagaattcagtccaaactgtagacagtaataaaagttgaaaaacattaggcaagactagaatctaacaacaggtatactgttatttttgaaacataatttttctgtcttcagtttcccaattttactaaagacaaaccatggtacaactgatttgctttattatacttggcctgattattgtatacagaggaggaagaataattttttatttacataggcttttaaagtggctttgatggaactttgtcttatagaaagaatctcagataggacttttttaaagctgaggaaagccatagatttctaccatcaaatacctacgagttgggtgaattcctctcctcttggggttccaaaataaacttggggttcctgggcctgtcagaaagttacattctttgcttaacacagttcaggaaccctgtacagggaccttatagatgaaggtatgaggccagttttcccaaggggttttattggctccataagttaagtttgattccctaaaggaaagcccaccataccagtggaagccttgataaaataaccagtttctccaattgtgttttgttaaaaatgaaaatagattcttattgcacttatgcaaataactgtattgacaaaagtaaaaaatactcacaaatagtttccaaattctgaaaaatcaggtagagggaaacaaatatgttctaaatttttttcataggagtatactaaattgttaaaagctgttaatagctcaaaaaaaaaaagattccttcactctgaaaaaaaaacaaaacaaaggatcagcaatgttttaagcaaagtctaaaagattactttagttttttattatttcagtccatgtagttaattcctgttctgcttgatactcatgaacattttagttctccatgagtcctgaaagtttttcttccattctaatgtcacaatctccaaaattatcaaaaactttttttcaagagcacctgttagaattttatggctgagtataaaatcgccttctaaagaggaccaaagtaagacaacaattgtctgtggaggacaaaaagttttagggcagactcagtcaaagacacaatggacaaggaaatttgttacctctgtggcacacaataacttaacacatataattgttactgataacgtacacactaagtcatatcagaattataggagtttcccataattttggaacacataacaataacatacttatataaatacagctcaaaaagaccaaacaccatttcatatttgacaatgtttcctgtataatttttatacaaaataaaccaaattatgtcatttttggatgttagggaaactaataaattaaaggattacttaggtcagaaaaaatcataatttataatttgtttggaaaatttctcaaatatcaaaggtttaaaacacttaatatcacaggtaagataaatcattcatttgactaatgtggtaactcaaggatttcaaaaaaaggcaaaaatcttcattctttgagagaggagactcaatttgccaaacaataagccctaataaaatagcatgaagccaaataactttgtttttcaaaattttatgaacaatctataaaattctaatcttgaccataagatataactttcctcagcctttcataacctttataatctttattaagaagtcagtttatgcttccagaaaaccttgttaatctgacacaggggcccatatgttggtcttgcattagtgtgtctttgacattaatgattaatttgtaaataaactaacttatctctcagtatcagttcttaaaatctcacacacccacctcttctgtgatagtccctggaccttgaggagctgaatagcttttagaaagcactgttagcattatgccacaacaaacagaacttgaggaaaaaaacttatatgagttgaaaatgagttgaaggatagtgttgccatttcacaccctttatggtttagctttgaaataaaaatgataacagttttttcccaaaacaaaccttactgcctgtggactagattgcttaaggccacagggttagaagttatgataatcttacttaattcaagatgtggctattttcattaaaccaatatcaatgtcttatttattaaaaaattacacaagcaaagatcattctgttttgtgcttggtttacagttttgtaacccttatgtcaaattttgacaccttaaagtatttggcaacaataagtatgaaattgtttgattaataaatgcaaacaaaaatatatgctggaaattcttaagacatttctaatattatcatactttagcaataattgtaaagttatcttatttataaaagattttattgaagttacataaacttgaaaaagcatttgactagtcttttttttctggcaaagtatttaattcaagcacttttattttcttaagccaattaattagagctcttttatatattttcagtaataaaacattgtgtacaaaacacataaatacatacacacattaagcatgccaatagaagtacatcttatagatttatgaaaactacattttgccatattagacttccaaattcttgataacctgtttcaataggtaatctgtatgaatacttgatcaccataggcagttgtaagctaaatagtcttacatttgcatattaaaagaaaccaagtgaaaattaaatagcaaaatttacatcataaggtacagagacaaaaaatttggtgtgctggaaggaaaataaaatggattcaattgcctattaaacataaaattatagaaattataatggccttttaaatatatgcaaacacatgtacacacacacaaaagattctatggcttttacttcagaactttagccatgagataaaaaaaattgaccagcttgcagacaaaaacctgttgaatccatagtgtggtttttatcttaatagaaaaataaaagcaaatttaaagcaagaagaaaagaattttttttaaaaagagagaacttaggaactctatagcttgcaggacaacctagggttcttaatgtatatgtgcacaaagaccgtattaccttcattttacataaactctgccaagtagaggtgtcataaaacctaccaagtgatatcagggggtcattcttcttgttttctcatcattcttagattatttgtttcccactttttttcctaaaaggaggaactgagctgtggcctagggtttatgtgtggtgaatcaatgtgtgctgcttgtgggcagtactccacagtgtgtcaccactgagttgtttccaccctcttacatgtctcagtttctctctccagaggtgtatgacctctgagagggctcaaaatgctgggtgatctgccctcatatgtgtttcctggactagcctttttttaaaagttaatttttcttggggatttccctgcagggccactccatgtcacagggggtcaaccccaagacactcccacaaggcccccagttgcttaggggtgccttttgcctgggaggagcagatgccctttcactttggagctgagaaaactcagtctctcattttcctatgtaaaccacagttcagtttctcacacaaatccacacagacaagccaaatgagattaatttggggaataaaaacaatagaggagaccctttacaacacatctccaaactagaattaggattcttaaacaacaacttcctaggaggaaaaaaatagcaacagtcaatactacttccagtaaactgtactcagccaccccctactttgtaactcgtctgccattacacatgccaaggtaaaatcctctcacagtacaaggtaatctgtggtaatctcaaagccaaagagatcaggtcattcaacataggaaaacagagctttggactgagaaaaaaatctgcccacaactcttggaactccacaaagaaaacagacacccctaaaggggtgagtggtgcctttgttctgaattctttaaaagagttcaagtcattagaagccttctctagatttttcatactgcaaatggcaaaaggcaaaaggaggtatagggtggaggaaaagtaaacaaaagaacatttgtttttttaaagacaggaagcaaacacagaaaccaagagcatggtttttaggttttgttttgttttgttttgttttctcttttgcgtctgcaaagaattttagccaaattagacaggctttgttacccacaatttggaattctcactcagatttgatcaagtcaggtaaagttcatcaaatctgatgggagaaatactggaatgtacaaaaaaaaaaaaaatcccagaaatgtgatcactaagcactgtaatggtaaggagaaattaagtccagctagttgttaaacattaaccaagacaaaaccgcaattcagctgtttacctacggatgggtttcaggccaaaactgccctctgccatcctagaatcaggaaagaaacctcaaattcatcctccctcctgggagcgagctcaaactccatagagttacctgccttccattgtcatggaaacaggaaatcttgcctttcttgtaggaagcaagtaaaactccaaaaaaaacaaaaaggagttgtacagcaaaataaacttcagatcttgtctgaattttggggtatcagagattctctggaggggttgctcccagacctcagccaattgtcttctttgtttgagccataaatttagctcatgctggtaccaagcactgataggacatttatcaaaggtcagggaacctccactcagaatctcttcatggttaccaaaatatgaaccctgaatatatgagacagttctcagataatttagaaagtttattttgccaaggttgaaaatgtgcacccatgacacagcctcaggaggtcctgatgacatgtgtccaaggtggtggggggacagtttggttttatacattttagggatacatgagacatcaatcaacatatataagatgaacatttgttcggtccagaaatgggggacagctagaaacaaaggcagagcaacttgaagcatggaaggggcttccaggtcataggtagatgagagacaaatagctgaattcctttgagtttctgattagcctctcgaaatgaggcaatttgatattcatttatctcagtgagtcaagggctgactttgaatagaatgggaggtaggtttgccctaagcagcttaacttttccctttagcatagagtttgggttgccaagatttattttcctttcacaatctcatgtgtctagctattatgttagaaatgtcattatttctttatatacaaaattgattataaaagtaacgacattaaacgtgggtattcaacttacctcaaacttttagtagttctcattacttgacatcacttcttcttatttcttcatcttttatatggattaactaactgattattaatctcttcagaattctaacatgctatgtttttagagttctattcattgaacaagatattttccttgccctaacaggttctatggagatttgatggcaagaagccaaatactttaggttccaatactcgactgtacaagtggttaccccagaatgaccttcttggtaagattctggagaacaaacagtgaatatattagtaacagcaaattggagtgataatagttcaacataaaacaaacatatttagcatttattattggaaaactaaaaaacaaatcaaatttaactactttatatttattttccagtcttagtataaaaagaatgcactatagtagttggcattttattacatacagtcacattctttatggtcagaataaaaatctctttgttcaggtgtaatttcctctcacaggttttaaataacatcctggattttctgtctgtctcctatttatgcagctttacctctgttctttcccctactgcagggttatttcaacaggcactgaaaaatagcggacacttttctattaccagtgactctactttttatgggaataaataaccaatctttatcatgataaaatgataacacatttcatgatgatgcataactggtccttcctcagccccacctccaccctactccctgctgccttttaaaaaaaattaaatattttaaatattttaagtatttaaatattttttaaatatgtaaatgtgacctcattatttataatacttaaaagaccacgttcttgtatacccaatcttattcttttttttgcacattttaattttttaattaagaatatgctttttcattttgttcacctggcaattcttctgaaatttgaaaacaatttcaatgcagttttgtgggtataatgttacctagggaacagttttgctttaagttccttatattgtgcatttcttattcaattctcataccttgtaattaataattttgttaaaatgcatccacttttaggtcatcccaaaaccaaagcttttataactcatggtggaaccaatggcatctatgaggcgatctaccatgggatccctatggtgggcattcccttgtttgcggatcaacatgataacattgctcacatgaaagccaagggagcagccctcagtgtggacatcaggaccatgtcaagtagagatttgctcaatgcattgaagtcagtcattaatgaccctgtgtgagtattacagttttgtgaccaggtggtatttataaattattttgtcaacagtgaatatgaattttaacccgtttttaagagactaattttgaagggattgaagtgatttaaccaatgtaaaatctgtccttactttccaccagacagtttatttcaaagttacatttcaaccccacagatttaatgggtcaccaatgactgcaatgaattataaaatcaaaaaaattaaagatatgtagataattattttaaatatttttaatgatagaatgcacaatgaaaagaaagaacataactagagaaatatgatatttcaattcaatacctaaaatttctgaaagtatgaatctattctttctcaaaaatttatttttattatcattattttaagaaatgtgataatgaattataatttgcatagcataacattcactaaaatttaaaatctaaatatatttagtatgtttacatagttacaaagccacagccctaaagaacattttaatgaattcaaattaaactcataatgtatgaagtcactcccaataaacctctagtcctagaaaaataccatcttactttgtttctcaatagattattctcttcacatattttatataaatgaaatcatacaatttatggtgtttcataaatgacttctttcacttagcataattagttttagttttatttatgttgtaggatgtatcagaactcattcatttttatttctatataatattctttgatatgtttataccaaaattacccatttatcaggtcatggacattttaggtctttccaattttggcatttatgaacattgttatacatattttccgtgtaaaaatatgtttttacttcttttgaggagatgctaggagtggacttgctgagacatatgggaaattgttgtttatgaagaactgctaaactgtttttcaaagtatttgcatcatttttcattaccaccagctggataggagggctctaatttcttcacactcttcccaacacttgttatcacctgtctttctattacagccattctagtgtgtgtaaagtggtctctcattatggttttcatttgcatttccttatggctgaagatgttaaccctcttttcatgtgcttactggtcattcacacatcttccttagataaatttctattttaatcttgtgaatattttgtctttttctatttatcttatggattcataagaattatttatatattatagatacaatcccttatcaaatatgtgattttcaaatattttcttccactatggacagatagatttttttttttactttttggaagatgccttttgaaatacaaaggtttcaatgttgataaaataaatatgtaatacttaacttttccataatccaaaggaaatactatgaaaaatgctgtgcctagaccagctaccatcaattcagagtctattactcctaccaatattattatgaggttaggtggtaccagctaagggaatacattaaaaacactttaccaaaaaattagtaagacaagaaatgatttaagatacttcaaaaaaagtaagaaagtaaagaaacataaaacaggttagaaaattaaaatatatatatatatagaataagatgctggatttaaatgtgaactagagaaagaaataaagggtattcaaataggaagggaagaagttaaattgtctctgtttgcagatgacataattctatagttagaaaacccctttgtcgcagctccaaaattccttaagctgataagcaacttcagcaaagcctctggatacaaaaatcaatatgcaaaaatcacaagcattactatacactgacagtacatgatttgacagagagccaaatcatgaataaattcccattcacaattgcaacaaagagaataaaatacctaggcatatgcctaacaagggatgtgaaggacctcttcagggaggactagaaaccactgctgaaggaattaagacaggacacaaacaaatggaaaaacattccatcctcatggataaaaagaatcaatattgtaaaaatggccatgctgcccaaagtattttatatattcaaagctattcccatcaaactaccattgacattcctcacagaattagaaaaaaactactttaaatttcatatggaaacaaaaaagagcccatataaccaaggcaatcctaagcaaaaagaacaaagctggaggcatcatgctacctgacttcaaactgtactacaaggctacataaccaaaacagaatggtactggtaccaaacagatatatagaccaatggaacagaacataggcctcagaaataacactacacatctacaaccctctgattgttaacaaacctgacaaaaacaagcaactggggaaaggattccttatttaagaaatgttttggaaaaactggctagccatatggagaaaactgccactggattccttccttacaccttacagtaaccaaaccagcatagtactggaacaaagacagacatatagaccagtggaacagaacagaggcctcagaaaaacaccacacatctacaaccatctgatctttgacaaaccagacaaaaacaagcaatggggaaaggattccctattaaataaatggtgctggagaaaccggctagccatacgcagaaaacggaaactagtcccctgccttacaccttatacaaaaattaactcaagatggattaaagacttaaatgtaaaacccaaaaccataaaaactctaggagaaaacctaggcaatatcattcaggacataggcatgggcaaaaatttcatgacacaaacaccaaaagcaattgcaacaaaagccaaaattgacaaatggggtcaaatcaaactaaagagcttctgcacagcaaaataaactatcgtcagagggaacaggcaacctacagaatgagggaagatttttgcaatctatccctctgacaaaggtctaatatccggaatctacaagaaagttaaacaaatttacaaaaaaaaaaaaaaaacaacaccatcaaaaagtgggcaaaagatataaacagacacttcttaaaaaaagacatttatgcagccaacacacttatgaaaaaagctcaatatcactgatcattagagaaatgcaaatcaaaaccacaatgagatacaatctcatgccagtcagaatggcgatgattaaaaagtcaaaaaacaacagatcctggtgaagctggggagaaataggaaagctttttacatttttgacgggaatgtaagttagttcaaccatcatggaaaacagtgtggtgattcctcaaagacctagaaccagaaacaccatttgacctagcaatctcattacttcgtatatacccaaaggcatataaatcattctactataaagacacatgcacatgtatgtctattgcagcgctatctacaatatcaaagatatggaaccaacccaaatgctcatcagtgatagactggataaagaaaatatgatacatgtacactatggaatactatgcaccataaaaaggaatgagatcatgtctgttgcagggacacggatgaaatgcaaagccattatccgcagcaactaacacaggaacagaaaaccaaacaccacatgttctcacttataagagggagttgaacaatgagaatacatggactcagggaggggaacaacacacaccgggggatggaaggggagtgagagtatcaggacaaatagctaatacatgaggggcttaaaatctagatgacaggttgatcggtgctgcaaaccaccatggcacgtatatacgtatgtaacaaacctgcacattctgcacatgtatactggaacttaaagtaaaaataaaactttttaaaaaaatttgaactgaccaggtgcagtgactcacgcccgtaatcccagcactttgggaggctgaggagggcagatcacgaggtcaagatatcgagaccatactcctggccaacatagtgaaaccctgtctctactaaaaatacaaaaattatctgggcatggtggtgtgcacctatagtcccagctactcaggaggttgaggcaggagaatcacttgaacccgggagacggaggttgcagtgagccgagatagtgccactgaactcctggtgacagagcgagactccatctcaaaaaaaaacaaaaaagcaaaaaaacaaaaaagtgaacctaccagtactcacattaaatttaagcagaccaaaaagaaaagacaaaatagtgatctttgaaatattttatttaaggagataaaacatttgaagtacacaattaaatgtaatctatgtgttatatatgtgtgtgtgtatatatattgcacatttatctgtatatatgtatccatacatatatctctggttgtgtgtgtgtagacagaaaataaacatttttaaaagagtttatggagaccgggtgtggtggctcacacctgtaatcccgacactttgggaagccaaagtgggaggatcacatgaggtcaggagttaagagaccagcctggccaacatggtgaaatcctgtgtccactaataatacaaaacttagccagatgtaggggatgagcacctgtagtcccagatacttgggagattgaggcatgagaatcacttgaacccaggagatgcaaattgcagtcagccaagatcactccattgcactcaagcctgggtgacagagagactctgtctcaaaaaaaaaaaaagattatatgaaatagttacctgaatttaccatatgctgggccataaataaacactaagtaaattgtataagattcaaattcataaaaattatatgttctagtcatactagaaataaattataaatcatccaaaaacgataactgaaaacaatctgattctttaaaataaaaaatattttttaaaaaattcagtcaacaaaaaattctaattataaatgtgcctttctctcatcaactattcttccaagtatacatccaacaaaaatgaataaatatttaaacctaataaaatatacaaatatcttaataccataattattagtaaggtcaaaaaatgttaacaacacaaatatccattaatcacaaaatgaagagatcatctgtggtctttgtcaatcaactgaatactctctacaccaatgctattaaacaactgctaaccaaaaacagaaatgaatatgtattatttaattcaattatataaacaatactaatctatgatatcagaaatcaggttaatacttactttgaggataaaaatagtgactaaaatggcccaggaggagagagttcttctatgcagtttgtgataaattggtgtcttcactttgggataatgtttaagataatcttaaaattttgaggtagtcacatagtatatatacatttatcctatgtatttcatacttgaagttttactgtagaagatatacaacatattttaaagttccagaaatcaaatagcaaagtaagcatgaagcactagagaaatcctatgggtgcctatagtgtggccaggaaaagactctccaagaggtatcatacaaggggaagcctcaaaaagaaatagaagcaaacctcaagtagttgcaagaaagaatgctcaatgagagagacacggggaacaaaaggtgtaaaggggctaaggtgagaacaccttcaggagtttagagaaaaaccgaaggccattgtctctagaagaaagtgtacagggggaaagggctaggacaagtaggtgcctgtgtagagttctctagaccaaagacagatttggaatttattcttaatgtaacaagaaaccagatggaaatcttaacaggtgagtgtcataatttgatattaatttggaaaatattctggctactagaaggaaaatatggtagaagacaaaagattagagtagaagctgagaaactagttaggaggcatttcaccagttgtgtcacaattcttctttaaatacgtcaaaatgggctgggcacagtggttcatgtctgtagggccaacactttgggaggcagaggcaggagaatgacttgactacaggagttccagaccagtatgggcactacagcaacacctcatatctaaaagtgtaaaaaataaaaaaatatagccaggcatggtggtgtgcagttgtagtcctagcttctcatgagactgagatgtaggattacttgagaccgaaagagaaaggctgaactgagccatgatcatgtgactgcactcagcctgtgtaatggagcaaaagcctgtctcaaaaaataaaaaaaaattaaaaagatcaaaaagatcattctcaaattccatttccactatcttacttatagcacttagaatggctcataatattttctgctccagaaaacattaactttcccaccgaaaattccatttttcatttttaaaggtatttgtcagtgataaaactccaatttaaaaaccaaactttctgtaatgacatgaattaaaacattgaaatttcatgccaattcagtgacacttactttcaatcatttgtgtgacacttttcaaagaccatccatagacttgatatgcttaagcaataaatttacttttaatgttgatatctttatatttatccttcagctataaagagaatgtcatgaaattatcaagaattcatcatgaccaaccaatgaagcccctggatcgagcagtcttctggattgagtttgtcatgcgccacaaaggagccaagcaccttcgagtcgcagctcacaacctcacctggatccagtaccactctttggatgtgatagcattcctgctggcctgcgtggcaactgtgatatttatcatcacaaaattttgcctgttttgtttccgaaagcttgccaaaaaaggaaagaagaagaaaagagattagttatatcaaaagcctgaagtggaatgactgaaagatgggactcctcctttatttcagcatggagggttttaaatggaggatttcctttttcctgtgacaaaacatcttttcacaacttaccttgttaagacaaaatttattttccagggatttaatacgtactttagctggaattattctatgtcaatgatttttaagctatgaaaaatacaatggggggaaggatagcatttggagatatacctaatgttaaatgacgagttactggatgcagcacgccaacatggcacatgtatacatatgtagctaacctgcacgttgtgcacatgtaccctaaaacttaaagtataatttaaaaaaagcaaaaaaaaaaaaatacaactcttttttttaaaccaggaaggaaaatgtgaacatggaaacaacttctagtattggatctgaaaataaagtgtcatccaagccat

SEQ ID NO: 11 - DNA, 11006 bp, Homo sapiens
agtgaaaagctcccaagatgaaaggtgtaatctggaaaggagcttcagggaccgagttagcctgggaagagagttgctcacctagagcccttcccatcatagattctgcctcttttcactagaccgtctgaggggcgagtcccagatcaccagcagattctgttttatggcctaggacttgatctcacttcctctctggatttgagtctcctgtctccaagatgggcctccctgaagcaatgtgaggcccagctaaagagatagggagtgagtgagatgggaggatcccagcctagcaccccgactctttcttcactctgcatctctctgcttacctctcagtttcttccccttctacctcttcagagtctaccagggccagcttggttgctttgttgacaaggctaagggaaggagtgaggctggaggagtttaggctggaggtcagaacttcctggggaatctctttttttttttttttttttttttttgagacagagtctcactctgtcccccaggctggagtgcagtggtgtgatcgcagctcactgcaacctctatctcccaggttcaagtgattctcctgcctcagcctcctgaatagctgggattacaggtacccaccaccatgcccagctaattttttgtatttttagtagagacaggatttcaccatgttggccaggctggtctcgaactcctgaccttgtgatccacccacctcggcctcccaaagtgctgggattacaggcatgagccaccgcacccggccacctggggaatcttctaatagtcttagggcagcttagctggcctggacccacctcccttgccacctgccccctgcaccgactgatcatgttcagtcacccaggagatgatggagaggctgatcaggcctcctggaaagggaggaagagggccctagttggagagatccatcagcagaagccagggaggagatacagacccttgctccctgatgctcctcagggctagcatggggcaggagtttagctgggaggaggcggaggcagctggcgagatagatgtggcggagctccaggagtggtacaagaagtttgtgatggagtgccccagcggcacactctttatgcatgagtttaagcgcttcttcaaggtcacagacgatgaggaggcctcccagtatgtagagggcatgttccgagccttcgacaagaatggggtaaggcaccctgaagggaaggaccagtggccagtccacctggcgccttcctccacaagtgtcctcagggagagctcccagttccccactcctcggctctttctctgctcttctttccactccgtctctctttaccttttctgtctcactcaccaaacccttctgtctcttctcttccttttgtccctttccatcttctctgtctctccttccctccctccatctcttagctgtcggctgatgctccctgtgtcctcttcttgagagctgaagggcgactggcagacagtccaggtcctctctttgtgtatttttgaccaagactctgcagcccaatgaccgggttttcgcatctgccagagcccctgtcactctaaacactaggagcaaaagagatgttctaaatgagacaaggtatcttagcatgggctatgagctccctcttgttggggttcttctgagactggtcagatcctccctgtcaagaatgctggaagaggctcctgcatgtattgggagactgggcgaatgactgcaaaagcccctttcagctcttcaagtcctggaaggtttcattaaatcattcagactagagtttctctaagcccacaatgtcactagcagctaagaagataacacatcttgtaaatgcaccaggggattgaattttaaatttcaattcagttaaaaaccccttgattatttaaggttatccagttcagtgccctggcaatcctcaaatacctcaaatacctcaaatgccctggtatttgcctcaaataccaatttaatctgaagaaagtgtcagttctccattcctcagtgcgtggagaacttagctttctaagctgaatcactgggaatgccacttcaggtctcatcctgtcgctggtaccagtcagtgcacgtccccacagtgcctgtcccgggacaggagggtgaggtcagcaccttcaattcaacagaacctccttagagatgaaccccatcgaccaccccacagggcacagagccagtttcggacttctcagcgctccgcctctcttaggtctcctctgaatcagcagcaaccctgggtgggaggggcagacttttgttattccaaattaaatgatgagaaagctgggcaaaagggaatgaatcgatttgcccaaggtcttaagtgctcctgcctagaaggcaggttttttaaagagagaagatgactttttaaaataattgatgtttttttaaaatgtaagaaaagtaaacaaatatatcaggtcataaataataagactcatttaagtccatcaatcttccccagattcatctaaaaatcaatacgatcatgattcaagatccaaagggctgattaagcccctaggcatatagttgtactccttatacctcatctcttcttataaatcggcatatgatgttcatcaatgttttttcctttttgaataactttttaattttactatgattctaaatttacagaagagttataagaatgatacaagtaactcccatatgcaatttatccaaatttccccagttattcacattttatatcatttactttatcattctgcctctctctgtatacatacatatatataatgtatcctataagtatatatacatatacatgatacataatttatacatatactttttttaagagaaagctatagatatcatgcccgtttatccctaagtatttcagtgtgtattttcttttttgtttttgagacagagtctcgctctgtcacccagtggcatgatttcagctctttgcggcctctgatttcccaggctcaagggatcctcccacctcaacctctcaagtagctgggattacaggtgtgcaccaccatgcctgctaatttttgtattatttatttatttatgttggtagagatgaggtctcgccatgttgcccaggctagagtgcagtggcacaatctcagctcactgcaatctccacctcctgagttcaagcaattctcatgactcatcctcctgagtagctaggattacaggtgcacactcccatgcctggctaatttttgtatttttagtagaaacggggtttcaccatgttgaccagactggtgtcgaactcctgacctgaagtgatttgcccaccccggcctcccagagtgctggaattacaggcatgagccactgcacccggccaggtttctttcttttttcctttttcttttcttttcttttcttttctctctttttttttttttttttttttttttttgagttggagtctcgctctgtcaccctggctgtagtgcagtggtatgatcttggctcactgcaacctccacctcccaggttcaagcgattctcctgcctcagcctccccagtagctgggactacaggcgagcaccaccatgcccagctaatttttgtatttttagtagagatggggtttcaccatgttggccatgattgtctccatctcttgacttcatgatccacccgcctcggtctcccaaagtgttgggattacaggcatgagccaccatgcctggccttcctttttctttttttttttctttttttttttttgtatgatcatacattgcatttacttgttgtatctccttagtcttctttaacctggaatctttaatctcagcttttcttttttatttgactgtgacatttttgaagactgcagctgagttatgttgtaggacagcccacaactggcgtttgtctaaattggtagaattgccactgatgtgatgttgtgtcctcggttcatcataccatccggtacaagacatcagtttgtcccatcactggcgtagttaactttgatcacttggttaaggtggtatctgccatgtttcaacattgtaaagttactatttttttctttgtaattaataagcaacatgtaaggatatatcttgagactaagtaaatatcctattgttcagtcaaattttctactggctttggcatctgttgataattttctaaccccatcaccccttctctatttattagttggcattccactgtaaggaagagcctccctagaaagtgtttttcagttcctctctcagggactgagccttctttcccacttagtctttgtctccaaacctacacctgactccattcccccttatatcaaggagtgtcatttcggaacaatcggtctgagatttctaaagcaaatccaatcaaaagtgtttatagatgtggttcacacgtgaaaatgtgaggtgatggaaaccggtttggtggggacaaaaaggtaggaacacctcgtctctgccactctcccttgcaactctcgtggttgccctatgaccgcctggaatggaagaaaggggagggtgaagatcagatgtcatttaggattcttatataacatgcattgaagtcagggctggtgcacaaatatggccaattcaaggagaaacagggcagataatcccacagagccggtgacacgcccatcctattcctgagtagacagagccatttccatcactctcaggcctctgtgggtaattggagctgacaaggtcccatgcatagcagatgagattagtcccagctggacgtttcccagaaatggtcctggggtttccagtaacctctcagatgagatcacttgtctagagatcactctggaatatgtctcatataaggcaaggagtcatggaaactgaatcatgttgagagaggatgttgtaggaatagaagcttctggacaaagaatgaggaagactctggagatctagagagtggggatttgtgagtggtttcaggttttgtttttgtttttcttctcttggcacccccaagcactaggcttatttgctggacagaaatagatcttaagtggagactgcaagttcttccgacgtgatgcactggaggagatgcatgcctggaaaagctctgccacttgctggctgggtggcctgggaacctctgggtctcaggctcctcatccataaaatggggataataactaattctcattaaataagaaacacaagattgatttgtggtaagcttaataagtaacaactactcgagaaaatagccttttaaagaactgacaaccattgctaagtgtctaccctaaaaaaagaaataccagagatataagaaaaggtatacgtgcaaaaaaaaagttcattgtttaatggaaaatattagaaatatattcaacaaagggaatgttcagtaccccctccccaccaaaaaaaaaaaaaaaaatggaagttgacattttaactaatttttaaagacatgagaaaatgttacatgagaatgaaggaaacaaaattataaatataatctgacctcaattagataagtatatgatggggagtacggagaccatatatttataggaattatataaaagatatgaatagaacacttcaggtactaaggtaagctcgttttgttttcttcttagtttttccttaggcttcttgctgtttccctcattttctgccattttctcctgttgctcaaaccttgttcactgaggcaccccttgatctggggctggggctcctgagtggcctgacccagtgggacagaagtgctctgggccatcagtgtcatttctgataacaaagtcatgtgaatgacaggcactcctgggggatctgatagctcagatttttgatttggagaatggagttcccaaccttggaataagtgagcacctgtaagtgagacactagcacagctaacccactgcagccaccaacagcagcggcaacagcagcctgtcaccccaaacacatctggagaagaaagcaagaatatatcctctttcttatttactgttttagaaatcattattgctgccgcatttctgttacaagaaggttctgttgcttcctggtgagagtcaccttagaagtagactgtgcctctcccccttcctctgcccaattagcacctgagctctgcgctccccaaccttcctggatgggctggaggcacaggcctgttgttcggtgtaatgtccactgggacctagaagtgggtagggctggagccactgcctgtctgcctctctctgacttggggtgaatgagaatgcagaggaaaatttcaacatgggctctgctttctaattccttcaaaactgtcttagtcccaaattcagatcaagtccatcattgactcattgatttatgaatatctattggcttacaattctggccataagtggcactgtgctaggcatggaggagaaacccaagcaatgtcaacccctcttttccccaggagcatataacatggctagagaacaagacaaatctaggaaacagttaagtgacaatgccagagaaagtcccaagctgtgtagaatagacagtagaggctgtggatgttagaatgaggagggagagagcactatggctgaagaggtcagagaataaaggcttcctggaggaggggacccttgagctcagccttgaaggatgggtaggcttgggtgatcatagaaaatgagaagagagaatgttctctaggctgggtgtggtggcttatgcctgtaatccaaacactttgggaggccaagaagggaggatcacttgagcccaagaatttgagaccagcctgggtaacttagtgagaccctgtttctaaaaataaatagacagatgatagatagtcagatagagagagagagagagagatgatatagatatagatagatagatagaatgttctctaccccaagggtggagaaagacttgagcaaagacacagaggccacatggattaaaaggaggaggagaagccctgtgtttgcagggatgaatggcctatgctctggggaggtgggctgtgccctcagcagcatccacatctaatgcaggacaacaccatcgacttcctggagtacgtggcagctctgaatctcgtgctgaggggcaccctggagcacaagctgaagtggacattcaagatctatgataaggatggcaatggctgcatcgaccgcctggagctactcaacattgtggaggttagtgtctctgcccatgggccagcagcctgggcactagagcactgctggagctctgaaggttggccacaagtggccagcggggactgaagaagaggccttgaaatcattctgagtgtgtttcctgtgttctcattctgagtgtgtaatttctagtggaattaagctagaaatcaatcaaaaaaagattattagaaaatccccatctgtttggaaattaggcagtagacttccacatactctgtggaacacacacacacacacacacacacacacacacacacacacgacaagtatcttaaattgaaaaataatgcaagcatgacatactacaacttgtggaatgcagctaaagctgaacctgcagaaaaatttatagatttaaaatacacatattagaaaataagacttaaaatgcatatattttggaaacagaagctgggtgcagtggctcattcctgtaatcccagcactttgggaggctgaggtgggaggattgcttgagcccaggtgttcaagaacaacctggaaaacaaagcgagaccccatctctacaaaaaaattaaaaattagccaggcttggaggtacatgcctgtagtcctagctacttgggagactgaggtgggaggattgtttgagccaggagttgaaggctgcagtaagctatgatcatgccactgcattccagctggggcaacaaagtaagaacctgtctcaaaaaaaagaaagaaaagaaaatatatcttaggaaataattagaaattgcatactatattagaaaataagactttatatattagaaaatcaatgatctaagaaaccatctcaggaaattagaaaaaaggaagagtaaattaaggccaggcacagggactgacacatgtaaccccagcactttgggaggctgaggtgagtggatcacttgagcccaggagttcaagaccagcctgggcaacatagtaagaccccatctctacaaaaattacaaaaaaattagctgggcgtggtggtacgcacctgtggtcccagctactccaaaggctgaggtgggaggattgcctgagcctggaaggtcgaggctgcgatgagctgtgattgtgccactgcactccagcctgagcaacagagtgaaaccttgtctttaaaaaaaaaaaaaaaaaaagtaaaataaacccttggccgggcacggtggcccacgcctgtaatcccagcactttgggaggccgaggcaggaagatcacgaggtcaggagatcgagaccattctggctaatacagtgaaaccctgtctctactaaaaatacaaaaaattagccgggtggggtggcaggcacctatagtcccagctactcggaaggctgaggcaggagaattgcttgaacctgggaggcggagcttgcagcaagccgagattgcaccactgcactccagcctggtgacagagcaagactccgtctcaaaaaaataaaataaaataaatcgaaagatagtagaagaaagaaaataaacagcagaaatcaataaaatagaaaacacaaatgcatgagaaaaagtcaagaagatcagaagttatttcttttaaaagactaacaatcattctctattagcaagaatgattaaggaagaaaagaagtgcctagtacatcccagactctggcgtgttccctgggttagccagacccgcgctatgaggcaggcatcgttagccctgtttcacagagcaagaagctgcttcatagagattctgtaatcggcccaaattagtctacctaggaagtgctggggctggatttaacccctcagtctcccaagacacgtcgatgaggcctattttatgctgggcactgggctgagcagtgaggccatagaggtgcataagacgcagcttctgtcctcagggagcgccagcctgggagctaaggagaaccatcatatgtgtccatctcttccgcatttacatggtgctttctttctttcttttttttttctgagacagagcctcgctttgttgcccaggctggaattcagtggcgcaatctcggcccactgcaacctctatctcccaggttcaagcgattctcctgcctcagcctcctgagtaggtgggattacaggcgcccaccaccttgcccagctaatttttgtatttttagtagagacaggatttcatcatgttggccaggctggtcttgaactcctgacttcaaatgatccacccgcctcggcctcccaaagtgctggggttacaggcatgagccacagcgcccagactacatggtgctttcacaaacatagtctcattgggagaggaaacagggcaaaggagaaacctgggtttttccctccagtccatgaggagggaacatgtgtatccccatcattctgttttacacatatacaggcacacttatatagatacactgaattttcttctctgcatctctatttcttcctgtgtagaatgcaatttagactgtcatggtgacttaaacctccctcattagaggttttggatttgggctttgcagctcacagtggaaatgcaaatggtgttggggtcaggtggggtgtgaggccgggaactcagctggaattaggccagtgggattctgagagcaccgccttaggacaggtcagttttgatctggatccagattatgtgatcctaagacgcacagcctgggaagccagcactggggaagtggtgctgggggatgtgggtcactggggtgaaggtggagctttcagggtctcccgtcaatgcagctgagttttctttggcagggaatttaccagctgaagaaagcctgccggcgagagctacaaactgagcaaggccagctgctcacacccgaggaggtcgtggacaggatcttcctcctggtggatgagaatggagatggtaagaggggcagagatggggagagtgctgtccactctgcatcatcgccactttctggccgcacgtccttgggcaaggccctccaccttccaaccctggggtcctcatctgtgagaaggctgtggagaagatgtcatgaactaacaaagggactcatgagcacgtgtttgtaggagtgactaaaagtcctacaggagttgctgatggaggccaggcacgcagaatagaaagaataggaactttggagtcaggcagggagtgatatattgagcttctcgtcctagtctcaatttcctcatctggaaaatggggataataatagtggttgagaggaatgaataggataatgtgtttaagagcaggcatagggtagacctccattcaggctgcttgggctttcctccctgtagcccaaagcccagcctcagggctatgtggggagagagctggcttggaatacacacttgagccctccagctctctcagctccacccagcatttccgtggtaccatgcgcaaaagtaaaacttcaattcatcagcaaagaaagccccttaaaggtggcaggagactcctggagattcagacacctgacaagccgcaagcttgaggtctgagactgcaggatagttggcataagacgtgtaggcgcatcctgggagcgaggtctctcctcctgcccccagacccaggtctccccttcttctacatgaccacctctcctcccccttgctcaggccagctgtctctgaacgagtttgttgaaggtgcccgtcgggacaagtgggtgatgaagatgctgcagatggacatgaatcccagcagctggctcgctcagcagagacggaaaagtgccatgttctga

SEQ ID NO: 12 - DNA, 495635 bp, Homo sapiens
tcaacctatgtggaccctgttcatcaggaataagtccctgcatttgaggaccttataaatcaataattatgtagaatcactttctttttcagtctcatttcctccctctttctctctctcacacacactgacaaacacgctgggtgctataactttaattacctgatgtgttaaaaaaaattgattcatttggaacttaaccagtttagctgttgttcacgctgttatgtaaaaaagatccctaaatgacttctacctggtaagaggagggaaggcgttggaaggtgaaattgcaggagaaggagagaatcgtgaaacggagtgagttgttttctctatgaatggtgattaggtcaatatttttcaaacggtgaacatattgtgtgaagattatttgtcaatattatctcattaaaactattgcaaataaaagtgtataatttggtaaaaaaaatgaagagagaaataaaaataatacaagaaaagtcatgaactcctgactccacacgtgagttaaccctcagtttttctatgttacttagaaaaacactgagatacagccaaataatatcatgatatctttataagaagagggttttgtaaccctcactcgaaatttctagctctgtcctagagttaatttagggagcagtcagatccagctgtgagaaacacgggccagacagtgagactggcttttaccagatgtgagctcttagacatgtcacatggcccttccgtgcttgggggtttaccttcacatctgtaaatgaaggaaactttgactcccacagaacataattcatgtgcatctataagtagaaatgctaatgagaattaattatttatgaagtataatcactcgcatccactctgggacacagcctactctgaggcatcccttccagaagtcactatatagtaggagacatgcaggtgggtcctccctctgccgatgaaaaccacccagccctgaccctgcagctctgggagaggacccccagccctgagattcccacgtgtttccattcagtgatcagcactgaacacagaggactcgccatggagtttgggctgagctgggttttccttgttgctattttaaaaggtgattcatggatcaatagagatgttgagtgtgagtgaacacgagtgagagaaacagtggatttgtgtggcagtttctgaccaggtgtctctgtgtttgcaggtgtccagtgtgaggtgcagctggtggagtctgggggaggtgtggtacggcctggggggtccctgagactctcctgtgcagcctctggattcacctttgatgattatggcatgagctgggtccgccaagctccagggaaggggctggagtgggtctctggtattaattggaatggtggtagcacaggttatgcagactctgtgaagggccgattcaccatctccagagacaacgccaagaactccctgtatctgcaaatgaacagtctgagagccgaggacacggccttgtatcactgtgcgagagacacagtgaggggaagccagtgagagcccagacacaaacgtccctgcaggaagacaggaggggcctgggctgcagagggcgctcaggacacattaagaacacagtaaactcagggaccaggtgcccagggaggttaagggctggtttcctttcagagacttagctgtttctccatctaacagtttccccagaaccctgcctagatttgtgatctgtatctgctcaaactatctgtgtcaccttcctcacctgtgactttgaggaagcttagtgtggacattccagtgggtggagagatcttggtgacagcaattgtgtgttctgtctaggcatgtctatggctggccatcaggaacgacaggctggaattcttggaaagaggcacacctgccatccatcaggaaattttgttgtcttctgttctgctagaattaaatcaggcacgcccaggttaactactactatcttcctagcttgagaaaattaatggtgggcttgaataacacctatatgaaatcatcagagcaacacctagattcgagtctcatttaataattgagactatgttctagccaaggagacacataaaactggtgattgccgtggtcagttcatatcatatatttgtcagtagaatctggctggtattatgaacagctttgccaacacatgtgttagtgttggtcttcggagaagcacattctatgaatccattaggtttatgtacagtttcctaaggaaccggtccacgcttttgagaggaaacgcagagcgggtggaaagaggctggggaagctgaaggcatatgagggaagttggtccctgagtgaaggagagagggaggataactcagtggaacttccttaaactgtgctgttctaggaaggtccagcaagtcactgtatctgagtcatgtcaaagtttcccatcggggacccccgtgactcccagcagtggctctactcagatcagcgcggagctcattgttctcctgagagtggagcacaggacgtggccccagcaccagccgtggcatgcacatcagagtgcagccccaggcgcatggctcaggtgcactgtgctccctgcaggtggagggagggaagacctgactcagaacccatatgatgtgggttccatacagaacacaacttttacttaatttctgtagatgacatagaaataaacatacagtctgtaaacaatggtgattcctacatttaccttgagagctttattctttgattctgcagaatgtcctggcatggtgttgcctttctcatgtggaagtgtaacataagttgaggacatgtgttccccactttcattgttttcctccatgtacagagatcctgagtggagtacagctgaccctccttccacactgttcctctcctccccacgggaacagcagataattacctgaggctgaatctgaggtgggatatgtcctgtgcacctcagagcctgcagagacccccggctgcagattcatggagtcaggtgtttgtgcatgtgggaatctcgagctgtgctgttgtcagtgaatgctgcttagaactaattgcaggattcagaattaggagaccccctgatctatcacacctcagctcattctgccactcatcatcttcagaaattctgaatatggttcagtttacatttttgtgatgtactgttctcatttcatttagtcatgagtttggtcagcagaaagtgctaccatttatgtgtcccaacctgatgaagctaatttgcttcacgagaagttaggaggctcctgaatcttatcctaagcctgtctctctgcactttcctttaaaattcagttttacctggaattctgttgtgttgatttagccagttttccccatactgagtgtctgattttcctggatatctgatcagtttccttgtccttcaccataacttgggtgacatctgatcaccctggtctaacttcaacaaaaatcctggcaggctgccctaagcaggatttacctcactcctgatgtttcttcttggtgattttccatcctgtgccccaaccctgctgtatgcctataaatcctcacgttctcattctgtatttggagttctgctgaatctctcccccactgcaaaatcccactgccctggtccctacacctatcatgagggccctggatgaagtcttccttactgtgctggaacaagtgtcttcatatatacattttttctttaacaaatcaacctttagtatttcctaattgatcaaaggacctcaaacattgcatgaaagcgaggatctccattttactataaggggtgttgtgtgaatttcagtttccatgtgtggtgtccagaagtcctgggcaccaacggttgtgcttctctgtccaattctgtgattctgaaacccgggagtcatctgaacatgagtaaataggtgacttttctcactatttagtgactgccttatttcatttaccctgaagcttcacgaacacattgatgaaaagtagatagagaacttgtttggaaatgcaagatttatagtagacgtaaccacctacatgattctggaggtcttcttagtgttccaagaaccagatgtttttcccaccacaggacaaagatgagaacctccacgctgtgaggatagaggacaggcagggcaaagatgagaacctccacgctgtgaggatagaggacaggcagggcggtgtgaggacaaaaggggctgtggtcacgtccagggtgttctctcctagcaacgcctccagctctttcctcactctgtggtatttgtcagatgggaaacatacctcaaatttatatttgacatattgatggaagtccaggcaagaggcatctgaaagcttatttctgaacctgcttctgtaaggaatgcccatatcccttggtctctttcctctttcttaactccattggctcccttcccctcctgcacacacccactgacgtttatggccacttccccacacccttcactgtagtaccattttcttgggctcctgggaaacccaacagctttagttaaactcacagctatgtacacccataggcccctcaggaggttctcagtttcactcctacagtctcccaggctgctccttggggtcctaacctgaccatctctaccctctctcctgagtctggccatccattgaacgtccctgctgccctctaatctggatttgtgtacagtagaaggttaactcagcagacctggattgtttaaaccctgcacattcctgaaaaacattgttcatttatggctctcagttacctcctgatgagaactctgagcccttaaaatgctatgccagataacagtgtctgtggttgtctgcagccttgggacctgtagtacacatttaatcatagtgctttgtagtgaatgccagctatttttttttcctgggtagcgggggagctgttgtctgagtattgtggtcagttgaaatgcctaaccttgttttcactctaactcactactttgaatcttccctgtttgtctctttaatcacctagccttgcttctcatgtaagtaagactctctctagctgggaaagctggacaaactccaattgaccccttaatttacaagacactaagggctcctcacccaacccccttccgtaaggagttaacctgtgtaaacagattctcagcatttcaaaggagcccagttaactgataaggtactagcaccaacaatgtatgaagttcccaggatttttctcaaggagataacaacataaagccttgagttcatgcccggcatagcccctatatctaattataatgaaagatttagagccctgcacctggtactgttgctctttttgtaaccatttgtcttttaaattgtttatctctctgtaaccattttgcttcttttgattcttgcatgtttttacttccgtagaattattgcacttgagttcccctccccttcctaaacctaggtatgaaagttaatcaagccccttcctcggggcccagagaattttgagcattagccgtctctttggccgctggcttaataaaggactcttaattcgtctcaaagtgtggcgttttctctaactcgcctgggtacaacatttttggaggccgcagcgagatattaacaccactgggcgagagccggtctcgctccgggctcccccggaaggatggccagctcggaggagggacaccacctgaggaaagaattttcaggtccgcaaagagtgaccgccttccagaggagagcggatcgaccactgtgtcagcgccctaaaagtcaacatctgagtcctcagcttctgaccccggggtcaggtaggtcggatgtgacttcgtttccggtgagaggggagcggccctgacgagggcgctgagtcctcagcttctgaccccggggtcaggtaggtcggatgtgacttcgtttccggtgagaggggagcggccctgacgagggcgctgagtcctcagcttctgaccccggggtcaggtaggtcggatgtgacttcgtttccggtgagaggggagcggccctgacgagggcgctgagtcctcagcttctgaccccggggtcaggtaggtcggatgtgacttcgtttccggtgagaggggagcggccctgacgagggcgtccctcttttgactcagcccattactctaggatgctagtgggttgagccttcgttttccggtaggcgccttcgtatcttggtttgggtgggaagtggtcctgaccaggaccctcccttgacttagctcaagacccaggacgctggagagctaagccttggtttctggcagacctctctctctctcttctatcttccatccttcttttggaaatctccgggaaaggaaaaaaaaaaaaacctgttataaactctgtgtaaatggtgtgtgaatgtgggaggacaaaggcttgcgtttgtcttccagtttgtagctccatggcgaaagctacggagtttgagtgggccctcacctgccgttctgtggtgacctcataaggcttaaggcagcatcgggcatagctcgatccgagctgggggtttatactggcctgccaatgctaagaggaacccaagtcccctcacggggagtggccaggcaggcatctaaatgatcccatcacgggacccccttcccttgtctgtctaatagagaaggtaaaacaggaaaactgtcatcattgtttacatgccctagggtcaattgtttgttttatgtttattgttttgttcggtgtctattgtcttgtttaatagttgtcaaggtgttacatgtcaggacatcgatatagtccacgaggtctgggtaaaaatttcttcaaggtccttagtgctgattttttgtcacaagaggttaaatttctaatcaatcatttagactggccaccacagtcttgtcttttctgtcataaacaagtaagctgttgttacggaaaagagtgtggagaacattcacctgattggaatttctggcaccatgaaggttgcgggtatttagattgtcataccccacgtcctagtgattggtccccttctaaactgaactggtggtgggttcaaaacagccaccctgcagaccttcttgctcacctcttctgtcattctgtaacttttcctgcgcccttaaataggaccttgtgtaaagaaacctacgcccgtcatgctttacttcgtttagactcctattctgttccactgtggctactttctcatcttaaggacgatccgagtggtccttttccccctcgtccctgccccttaccccgcacatctcgttttccagtgcaacagcaagttcagcgtctccaagacttcgctctgctctcactccttgaacccttaaaggaaaaagctgaatttgaactgtttgcctttgaatcgtggagacataaaaaacacttaggatataggtctagaagaagaagaagagggagaacgcctagatcgaactggcccaggagacctcagactggccaccaatccccctccctcaatcttaaagctacagcaatgtggcaagtggtattagctgttgtggtttttctgttctttctgatcatgttaattctgtttttccgacactccagccccccagggaaagagtttctctgccggtgttggatctgatatctctgctcaagactttgctaaattgtctttaaataataataataataataaacgggaaacacctcctcctggccccgtaagggttggagccctctccagtgtatgctggaaaatttttctcttggtttctcagaggactatggagtccgccttagaaaaggcaaggtctggacactctgtgaactagaatgaccaaagtttggagtcggatggccctgtgaagggtcattaaatcctaccattgttcaagccgtgtgatgggttgttaccggaactcccggccaccctgatcagtttccctatatcgatcaatggctaagtttgattaggaatcctcctccatggctctgttcatgtgccattcgcaattccacctccaaagtcctcctgagccaggccgcgtttttgcctcaaccctccgccagttcggctccccctgttttgcctccctctgaagaagaggagagtcttcctcacccagttccaccgccttaccaccagcctgctcccttggcgccatcccgtgtctcttcgactgcgtcccctgtgggctgtgaccgcccattgccttccgctacgaccgcatgggaggaagcagcccctctactcccactgagagaggcacgagtcccgcggctgatgagcgctcagcccccttcctggtttatgtccctttttctacttctgacttgtataattggaaaacccataatcctcccttctctgaaaagcctcaggctttgacctcactgatggagtccgtgctccggacccatcgacccacctgggatgactgccaacagctccttttaactctgtttacctctgaggagagggagcatatccgaagagaggccagaaagcacttccttgcatcagccggtgggccggaggaggaagactagagacctcctggaggaggaggaagctagagacctcctggaggaggaggaggtctttccctccacctggcctaattggggcccagattcctcaggtggaaggagggctttggacgattttcaccagtatctcctcgcgggtattaaaggagccgcttggaagcccataaacttgtctgagacaactgaagttgtccgggggcctgatgagtcaccaggggtgtttttagaacctctccaggaggcttatcgaattcacacaccttttgacctggcgactcccgagaatagccgtgctcttaatttggcatttgtggctcaggcagccccagatattaggagaaaactccaaaaactggaaggatttactgggatgaatatcagtcagcttttagaaatagcccagaaggtttttgaaaaccgagaatttgaaaaacaaaaacaagcgacacaggcagctgaaaaagctgccgataaagcatataaaagacaagcaaaaatcttggtaacagctatccaagagggcagaaaggaaaggcctgcattccagaaaaatggccaaggaacctcgggttcccaccagaaaagtgaaagaggtgaacaggcccctctaggaaaacaccaatgtgcctattgcaaacagactgggcattggaaaaaggagtgcccgttactgccaaaagaaaaatctgaaaacaaaaaggttctcaccctggccgcaacagaggagcctgatgattgatggggacagggctcccttgctctcggcccccaggagcccatggtaactgctacagtggggggccagcctgtatgtttcctaggagacaccgggggagagcactccgcactggagactcccctggggagtgtctcaaataaaaaaattgctgtacaaggggtaactggagctatacaagaatatcctgtcacacacacctgagaagtaatcttgggacagaaaagagtgacacactctttcctagtagttccagagtgtcctattcctctccttggacgggacctactccataagttacaggcctcaatctccttttcagctcagcaggctcatctcacactaggaaatgcaacttcccccactgcccaactcttgctaactacccctctgtcagaagaataccttctggtttcaccgtcgtaatcaccggaggagaatactaatactcttttgttagatctacagacacttttcccccgagtttcggccgagtcaaaccctcccggactggctaaacaccatccgccagtagtcatagaactcttggccactgccataccggtccaggcaaagcaataccccacaagtcagcaggctagagaggggattaatccccacattcaacgactgttacaagctggcatacttaccccatgccagtcggcctggaacacgccatttttgccggtccagaaacctggaacaaatgattactggccagtacaagacttaagggacgttaataaatggactgttgctgtccacccaaccattcctaatccctatactctactcagcctgctcccaccagaacatacagtatacactgtccttgacctgaaagatgctttctttgctatccctctggcccccaaaatccagccgatttttgctttcaaatggacagatccaagatcaggagacactacccaactgacttggactcagttacctcagggttttaaaaattcccctaccctttttggagaggctcttcagcaagatcttataccttccgagccagtcaccttaactgtactcttctccaatatgtagatgacattttaataacaactgaaactatggatggttgtctacaacacacaagagacctgctctacctccttcaggagctcgggtatggagtctcagccaaaaaggcccagctttgtcttcccagagtgtcctacctggggtacaagataaacaaaggaaaaagggcactcactagtgcccggaaagaagccatcctgcgaatccccactcccgccaccaagagacaggtacatgaattcctaggagccctgggatattgtcgtctttggatatcggggtttgcagagattacaaagcctttgtatactgctacaaaaggtaatggcccactgatttggacagacaccgaggaacaggcttttcagaatctgaaaaaggctttaactgcagcccaggctttagccctcccaaatatctcaaagccttttcatctgtttgtccatgagagccagggagttgctaagagagtgcttactcagactttaggaacttggagaggcccagtggcttatttatctaagaaggtggatcctgtggcctcaggatggccaagttgtttggcagccatagtggctacagcaagcctagtccaagaaactgataaattaactctaggccagaatttaacccttacagttcctcatgctgtagagacttgactacgaagtgcttcaggtaaatggatgtcaaatgctcgtattttacaatatcagagtttactgttggatcagccttgtttgactttctctcccacaaggtgtttaaatcctgctactttactcccagatccagattctaatactcctgtccatgactgtcaggagctgttagaagctaccgaaactggcaggccagatcttcaagatgtgctcctgagaaaggcggacgccaccgtgttcaccgacggcagcagttttctcgaacaggggatacgcaaagctggtgcagctgttaccacagagacagatgtgttgtgggttcaggctttaccggcaagcacctcagcacaaaaagctgaattgattgcccttactcaagctctccgatgggttaaagataaacgtattaacatttatactgacagcaggtatgctttcgctactgtgcatgtacatggagccatctactaagaacgcgggttgctcaggtcagaaggaaaaataattaagaacaaagaggaaattttagccctgcttgaagctgtgtggctccctcaacaagtggctgtaatccattgtaaaggacatcaaaaagaaaacacggctgttgcccgcggtaacccaaaagcggtttcagcagctcgggaagtggcgctgtcttcagctccgtccataaacctgctaccggcagtttcttttccacagccagatctgcctgacaaccccgcgtactcaacagaagaagaaaaactggctgcaaaccttagagcaaataaaaatcaaaaaggttggtggattcttcctgactctagaatcttcgtacccccagctcttggagaaactttagtcagtcacctacattctaccacccatttggtgggacaaaattagctcagctcctccggagctgttttaagatccctcatctacaaagcctaacagatcaagcagttctctggtgcacagcctgcgcccaggtaaatgccaagcaaggtcctaaacccagcccaggtcaccgtctccgaagaaactcgccaggagaaaagtgggaaattgactttacagaggtaaagccacaccgggctgtgtacaagtaccttttagtatcagtagacaccttctccggatggactgaggcatttgctaccaagaacgagacagctaacacagtagttaagttcttactcaatgaaatcatcccctggtacgggttgcctgctgccatagggtctgataatggacctgccttcacctcgtccatagctcaatcagtcagtaaggcattaaacattcagtggaagctccattgtgcctatcaaccccagagctctggacaggtggaatgcatgaaccataccctaaaaaatactcttaccaaattaattctagacaccagtgaaaattgggtaaaactccttcctttagccctacttagagtaaggtgcaccccttatcaggctgggttctcaccttttgaaattatatatgggcgggcaccacctatcttgcctaagctaaaagatgcccattttgcagaaatatcacaagctaatttattacagtacctgcagtctctccaacaggtacaagagatcattctgccacttgtttgagaagcccatcccagtccagttcctgaccagatggggccctgccattcattccagctcagtgacctggtgtttgttaaaaagttccagagagagggcctaactcctgcttggaagggacctcacaccgtcatcctcacgacgccaacagctctgaaggtggacggaattcctgcttggattcatcactcccacatcaaaaaggccaacaaagcccaaacagaaacatgggtccccaagcctggatcaggacccttaaaactacacctaagtcgggtgaaactgttaaattaactctttttatttgcttcttttgtttatccttgcctgtaatgtcttctgtgccttcctactccttccccctcacctctctcacaacaggacgtgttttcgccaatactacttggaaggtggtactccagggcaagtcacctttgcagtcgacttgtgtatactgttcccggagccggctggtacccacgaagatcatcgcgacctgccagtcatgggagcaggaggtgtcgaccttgcagcaggatttggacactctgggagccaagccagatgtggaagctccaaaggtgctgaaaaaggactccaaaaggttgacttttacctctgtcctgaaaatcaccctgatgctagctgttgagatacctaccagttcgtccgcccggattgggcatgtgtaactttagccacttactctgggggatcaactagatctccaactctgtcaataagtcgtgcttctcgtcccaaatcgtgttctaaaaataattgtaaccctcttaacatcattgtccatgaacctaattcagctcaatggtactatggtatgtcatggggattaagactttatgtcccagggttcgatgttggaactatgttcaccatccaaaagaaaattttggtcccctggagcccacccaagccaatcggacctttaactgatctaggtgaccctatgttccaaaatcaccctgacaaagttaatttaactgtgcccccaccattctcagttcctaagacccagctacaaagacatcaactccaacccagtctgatgtctatacttggtggagtacatcattttcttaacctcagccagcctacactagcccaagattgttggctatgtttaaaagcaaaacccccatattatataggattaggagtagaagtcgcacttaaaggtagtcctttatcctgtcatgcacaacctcatgctttcacattaggagatgtgtctggaagtgcttcttgtctaattagtactggatatgacttatctatttctccttttcaggctatctgtaatcagtctctgcttactcccatgagcatctcagtctcttaccaagcacctaacaatacctggttggcctgcacctcaggtctcactcgctgccttaatggaactaaatcagaacccctcttgtgtgttctagttcatgtccttccccaggtatacgagtacagtggatcagaaggacaactcctcattgctcccccggaattacatcccaggctacgcagagctgccccactactggtttctcttttagccggtcttagcatagctgggtcagcagctattagtacagctgccctagttcgaggagaaactggactaatgtctttgtcccaacaggtagatgctgatttaaataatcttcagtctgccatagatatactacattcccaggtagagtctctagctgaagtagtacttcaaaactgccgaggcttagatctgctgttcctctctcaaggaggattatgcgcagctctaggagaaagctgttgcttttacgccaatcaatctggagtcataaaagatacactccaaaaagttcaaaaaaatctagataggagccaacaagaacgagaaaataacacagcctggtatcaaagcatgttcaattggaacccctggttaactactttaatcactggtttagctggacccatcatcatcatattattgagtttaatttttggcccttgtatattaaattggttccttgattttgtaaaacaacgtattgcgtctgtcaaacttatgtatctaagaactcaatataacccccttgttgtaactgaagaatcaacgacttgattcccctaaaacacaagtggggaaatgaaatgcctaacggtgtttttactttaactcgttactttgaattttgtcctgcttgtctctttaatcacctaaccttgcttctcatgtaaataagactctctctagctaggaaagccagacaaactccaattgaccccttagtttacaagacactaagggctcctcacccaaccccctttcgtgaggagttggcctgggtaaacagatcctcagcatttcaaaggagcccaattaactgataaggtacccacaccaacaatgtatgaagttcccaggaattttctccaagagataacaacatgaaaccttgagtttgtgtccggcatagaccctatatctaattataataaaagatttagaaccttgcacctggtaccgttgctcttcttgtaaccatttgtcttttaagttgtttatcactctgtaactattttgattattttgattcttgcatgtttttacttctgtaaaattattacatttgagtccctctccccttcctaaacctaggtataaaatttactcgagccccttcctcgtggccgagagaattttgagcatgagctgtctctttggcagccggcttaataaaggactcttaattcgtctcaaagtgtggcgttttcttaactcacctgggtacaacagtgcagctggtggagtctgggggaggcttggtagagcctggggggtccctgagactctcctgtgcagcctctggattcaccttcagtaacagtgacatgaactgggtccgccaggctccaggaaaggggctggagtgggtatcgggtgttagttggaatggcagtaggacgcactatgcagactctgtgaagggccgattcatcatctccagagacaattccaggaacttcctgtatcagcaaatgaacagcctgaggcccgaggacatggctgtgtattactgtgtgagaaacactgtgagaggacggaagtgtgagcccagacacaaacctcctgcaggaacgttgggggaaatcagctgcagggggcgctcaagacccactcatcagagtcaaccccagagcaggtgcacatggaggctggggtttgtttcctgtcaggatttgggacttcctctgcttctgacagtttctctagggaaactctttaattttagatttctgtgcccaccaatgtcatctctacatttttttaatcattgtaatatgataggaggacttattctcacatgcacaatatgtatattgccacctacgggaatgaaaactcctcaaccatggtcaccagcatcagagtcgtgaggaagctcaggggtgcctggtgagtcttctccagtcagactcaggacagtaacctcaaggggattcccttgtgagaactcacacactttcatgagaacagcaccaggagttggttctaaaccattcatgaaagacccactccatgacccagtcacctcccaccaggtcaccccttcacaattgaggattataatacaacatgagatttggggcaggacacaaatccaaaccatatcagatacacattgtgaaatgctcatgatggtcagggtaatttgtatttctatcacctcacagcgctaccattttattatttttttaaattaaatgcatgagtgagtgtctgatgagaacacctcagatataccctttcagcaacaatcatttttataatacagtattaactataggaccattgctgtacgttagatctccagaactcatccaacctgcacaactgaaactgtacaatttaacaaacatcacccgatttccctctcctcccaggtcctgagaccctctattctgctctctactttcaagagcttgaatattttagatcccacatgtaaatgagatcatgcagcatttgtctttctgcatctggcttattccactcagcatcatgtcctccaggcccatccgtgttgttgcaaatgtcagaatttccctcttttcaaagccaaataaaatacagatttatgtatacacattttctttatacattcatccatttacagtcattaaattattttgcaaatctacactattattaataatcttcaatgaacacgtctttggcaaagtaattttatttcctttgcatatataataagaaatgggatcaccagattatatgatagctttattttcaacttatcgagtaaccaatcctaccacagtgtattccctttccctcacattcttgccaatatttgtcatctattacatttctgataataaccatattaactagtgtgaggtgatatcgcattgtgcttttcatttgaattcctctgataattaggaatgttgagaaccttttcgttttctgtttgccatgcatgtatcttctgaaaaaagttatccaggtttttgcccttttttatcagttcatttgttatttgctattgaggtatatgggttatttatacatttagatagaccttcttgtcggatacataattacacatagtttttcctgtgctttgttgttaaattcaaagaaatcagttccgaattaatggcaggaattttttttgctccatgtgatttatgagtttatggcttcaggtattatgtccaatattagctgatttttttatatggagttagagaaggcctaattttatttcttttgaatatgaatgccagttttacaccattattgaaaagactgtcctttctctactgtgtgctcttggcacacaaaatcaggagagacataatgacaaaagaaaatatcagatgaatattcctgatgaacatagacctgaaagtcctcaacaaaatactatcaaatagaatccagaagcactttaaaatgtaatacatcatggtcaagtgggctttacccctgggatgcaaggctcgttcaatatccacagtaactgtgattcacaatgtaaacagaataaaagcaaaaaccatatgattatgtcaatagatactgagaaagcctctggtaggttctaacatccactcatgataaaaaccctcaacagactagacatcaaagaaacgtacctcagaataatagccatctacagcaaacccacagtcaacaccatactaaatgagccaattaaaacacttgtctttataaattacccagtctgaggagtttctttatagtgtgagaattgactaatacagcatccaaataggaaaggaagtcaatccgtccaccttcagcgatgatataattctatacctagaaaatcctaaaaagtctgccaaaataattctagaataaacaactttagtaaagtgtcaggatacaaaatcaatggacaaaaattaccagcatttctataagccaaccacatccaagctgagagtataatcaagaacaaaatcctatccaacttacagtatccacagagaaaatgaaatgcctgggaacacagataacaaacaaggtgaaagatcactacgaggagaactataaagcacagcagaaataaataataaatgatacaaataaatgggaaacatttcatgctcatggattggaagaatcaatattgtaaacattgtcataatgcccaaaggaattcacagattcaatgctatttacataaaactatcatcatcattcttcacagaatcagaaaaaaatctattctaaaatttatatggaaccaaaaaagaccctgaatagcagaagcaatcctaagcaaaaagaacaatgccagaggcatcatgatactgaccttaaactacaccataatgtcttgctaacaaaagcagcttggactggtacgatagcagacctgcagaaaaaaaaaaatagatcaaaattgaaaacagaaataaagttgcacacctgcaaccttttgatctttgacaaggctgacaaaagcaattggaaaaaaaaaatctctgtattcagtaaatggttctgggataactggattctggcaggtcttgcagaatgcaagagtgaaggagcctgtccagcttctacctagatttcagatgttagagagccctgcatgcccaggaagaagcctgctgcagcagtggatccaccacacaaagcctctactagagcattgccaaagatggggaaagatggagttggagcccccattcagagtccccactaggacgcttcatagtaaagctgtgggaatgtggccacaaccctcaagaccctagaatggtagagctacaggcaacttgcaccctcagcctagaaaagcttccagcacttgactctcacttgtgaaggcagccccgtggtctgtgcctagcaaacctatagggattggctgcctgaggttttggggacccaccccttgttccagtgtgccctggttgaagtacataaagtcaagagagattattttgtagtgttaggatttaatatctgcagtgctgggttttatatgtgtgtgaggcctgttggttgttccactggccaatttatccctttaggattggaattatttacccaatgcctgcaccatcattgcaccttggaagtaaacaactttcatttttaaacttgcaagctcacagctggagggacattgccttaagactcagatgagactttggacattttagttggaggttgatcaacttaacattttgggaactattgaaaaaaggtgattatattttgcagtgtaagaagaatatgagaactttgggtctgagagtgcaatgatatcatttaggggttttcccctccaaatgtcatggtgaaatgtgacccacaatgttggaggtggggccaactgggtggttttgggtcatgaggagatttttcaggactggcttggcatccaccccatggtaattagtgaattcttgctgtattagctactgtgagattttattgttcaaaaaagtctggcaaccctcctaccctctcatgtcccccctcctcaccatatgacacagcctcctccccctttgccttccaccatgactgtaagcttcctgaggccctcgcaagaagcagatgcttgtgccatgcttctcacacagcctgcagatctgtaagccaaataagcctcttgtctttgtaaatcacttggcctcaggtattaatctataccaatgtaaaatagactaatacactgcccaaagcaatatacagagtccatgcaatttatatcaagtaactaatataattgattacatatttttaaaaatcctaaaattcatatagaaccaaaaaagggtctgaaaagcaaaagcaatcttgagcaaaaagaacaaagctggaagtaccgcattccctgacttcaaattacacaacacaaagataacaagaaaggcagcgtggtaatggtagaaaaaaaatcaagagcccagacatacagccaaatatctacaaccaacggttctttgacaaaactgacaaaaatatacactggagaaacaaccctctattcaataagtagtgctgggagaattagatagccttatgcagaagaataaaatgagacttctgtatcatcatagacacaaattaactgtgaatatggattcaatgtttaaatttataaactcataaaaattcctgaagaaaatctaaaaaaaatcctctagacatttgcctaagcaaataaaatatgactaagactgacttcaaaagcaaatgcaatgaaaacaaaattagacaaacaggattaattgaaacacagattgtctgcatagcaaaagaaataaccaacatggtgaacagacaacctgtgaacagtaaaaaaaaatttgcaatctattcatcaaagggctaatacatagaatctacaaggaactcaaataagtcaacaagaaataacaaataacttcattaaagagtgagcaaaaaccagacatttctcaaaagaagacacagacgtggccaaaacaaataaaacatactcagcatcaccaatcatctgataaatgtaaattacaaacaacatgatatagcatcttccaccagtcacaatggctgttattacaaataaaaaacagcaggtgtttggagagaagcataggaaaaataatgctttttatatgcttggtgaaaatataaattagtacaacctctatgaaaaacaatacagaagtttctcaaagaactaatattagaattaccgtttgtcccagtaatccctcccagtgggtatattcctcccaaaaggaaatttttatatcagaaaaagtcacctgcattcctagtgtctttcacagcaacgtgaatagagttgtaggacattagcctaaataaaataactcaaaaagatcttctcttttataattggaaagtaaacaatgggtacacatgtacatacataaaaaacaaaagacactgggaactgcaaaagagggcaaggtgagaggaatgtgagggttaaaaaatcacctactggctccaatgttcactagtgggcgatagttacaccagaagcccaaacctcacctttatgaaatatattcatgttacaaaattgcacatgtacaccctgattctactgaaaaaaacagaaataaaacatgaacagaattgttagactgctagctagatttgtcaacaaagaaaaatgcaaaaggagcaattctctgttttggaaccctttctcattttctggtacaattagaaattgtagactaatccctatattctcttctgaagccctagcattagccatttctcaaagacatgctggttccttttttttttttttttttttttgagacagggtccagactcactgcaacttccacctcctgggttcaagcgattctcctgtctcagcctcccaagtagctgggattacaggcatgcgccactgtgcctggctaatttttgtatttttagtagagacagggtttcgctatgtgggccaggctggtccaaactcctgacctcaaaagatctgcccacctcagcctcctaaagtgctggaattacaggtgttagccactgcacctggtcactggtttcttttatagaagaatagtattaaaaactcaaatcttgattctgggtgtattttttattaatgtgcactcatttcttgtagaaattctcaggtaaaaaatctaggaagtatgtgttgtgtattaacccatatatacacagacatctaaactatttttatctaatatatgtacctatattatgctaaacttgcaaataaaatgacatgtccaccctaagttaataccacatggatgtttatcgcattccttctatgcctgacactaacctcccactccaaccacaaggaaccccatttccccatacgccgtccattctctttgtagtccaattccaagattcctgtggagtgtaacaagatgtgtaagttgtgctcttttgtggaacatcgtcaattggggtacaatgctgatgtgaagtttcttttttctttaatcttattgcctacaccatttctgaatctacttagtacctcttttgaattcatacatttgtaatggaattagacattttctatgttatctgcattccatcctggaattcctaatcacctatttttaaaaaaaattcttttgaagtaagattgtattagtcagggttccctagaggggcagaacaaacaggatatatatacgcacacaggatacacacacacacacacacacacacacacacacacacacacagagtttattaaggagtattaactcgtatgatcacaaggtcccacaataggccatttgcaagccgaggagcatggaagccagtccgagtcccaaagctgaagaacttggagtcccatgttcgagacaaggaagcatccagcacgggagaaagatgtaggctggaaggctaagccagtctaatcgtttcatgttcttctgttgttgttgtttttttttccctctggccacactggcagctaatgagattgtaccacccagattaagagtgtgtctccctttttgagcccactggctcaaaagttaatctcctttggcaacaccctcacagacccacccgggatcaatactttgcacccttcaatctaatcaagttgacactcagtatttagcattacaagtccaccccgtcaacttgaaaccatacacatctcctgagattatacataatcttcaaacaaagacaataataaagtcataattacacctaatataatacaactttattcgttcaactggaaatgcaccaatccccaatccaaatgctattacatatggtccactccctcaaggacacagccaggatcatcctatgacttggtgtctagaagactcatgcacttttaattttacctccaatattagactccactttatcacatgcagacactgcagaatattttaagacatcgatgtcttatgctgaaaaattcaacagtacataaaattgccttcccaccacagccagtggttactactgaataaggatctgccatcccctagggaggtgctatagtggatggtgtgcactgttagtagctatggaaattgatccattgtggcaaatggcagcatctttcttttataacattaaaccatattatattgtatacacataccacattgtctttattcatttgtctgtatgctgaccatcagatagtttccatatcttcgctgttattaacagtgtttcaataaacataggatgcagatatgtttacaaggtggtaatttcatctacttgggtatactcccagaaacaggatttctggtcatataatatctccagttttaattaatttaggacgctttatgttgctttccataattgtggaaatgtagaatggtatagccattatgaaaaacaattttggttttgagttatgatccataaacagcatttgcttatggctctcaatgagagtttctactaaatatgatggaaggccaggaaggattctcaccttaaagcttggatggattatgaatttacctcttatttcctaaaagcaaaagtttggaagcatacatgatggaggctgttggcaggtttcaggatgatctcataaaaggagaatctgctggataaaaatgttgggttttcagttatagacacacctacactcaatatgaaatgatgaagtcaactgaggatctagaacatgttcacttgaagcaacagcacattctcaaaggaacttattgctccatcacaagggcgatgaacttctgaaaccagtaaagtgtgagtgcacagtaagtgataacgttatcacgtttacatgaagtttgtttaatgtgccaaaggctggtacagattaatcttacacaaatatatgaaacatatttttccatacatagatatctagaggataatcctcttagcaaaacttcttcaggttacagaaatctgtgtaagttgtagatctcatggggaactgtctctttataaatactggtctgtttttcaagtcaggaaaaattatctctgttggagtaggcttccaattgtgtagacttctgaattgcttcttgagttgtaacaaatgaaccaaaaaatttgactaattggagttttgtggctgtcttaataaaaatttcttataagctttctttcaattatttgagaccagttttcctgattttatttttctccaatagataaattttcacaagatctcaggaaaccacctctctggctctttagtttaaaagactagcttcttaggaaaagaagcttctttctaacattgaagagctcatttattctgcaaaccatgaagtttgagtctcattgtcaagaatcatgaaaatttttactccaatatactgaaagtcatgactcttgaattcaatatttattggcattcacaaaagtgattcattctcagatgtgtcctatgttgctggcccaacatatcagtgaactgagtatcctcccttagctctctctgtctgtagcactgagtctacaatcttcagagtcatccatgaaggggagtcctgaggttcatgggattcttgtaaacattcaggtcaacagaagaaataagcaggattgagggctgccagccatttccacgccattaggaataattaccatctaagtataaaggtctacatcatacagaataccccacaggataggctgatgcaaaaaattccaaccccacagaggctccacagcaacccttacagttctttcagggaaggaataatctccaagttaaatgagtcagtaaagctgctctgagctacaggaaaaattggatttggccaggtttgtctgagttcaacgtgattattatactcagctcctgctccaatctggactgagtacggggaatttaaatgagcctggctgtgtggtttgttatatgaaaatctgaactatataaacataaatggcatgtctggactagcatgagggtgagagatcctgggaactccaccccccatactcttatcgccctttcctccaggaacctccaggttctcagggtgagaatccacatagatcccttcatggctctatttctaggaaaccaaatctctaataaatacacccagactttcttcagacacagaaaccatgggaaaggcatctctagatcctcatctatgtggggaaaggtaatccatccccattacaagcccatactagcaggcttcctttatcatgaaaatgggtaaaattagccaatagatgtaaatttaaagaaaatttcctgtgatgctccagccagaaaagagcaaaaatcagcttcacttctggagacttcccgtataggtcacagcccagagaaagaagatcaccacagcattaaaattcagctgtaagaacatgtaatgcttccgtgttccacacattatgtctcaccagtttagtcaatatggattaaatacgagagtgtggcaatgcacaaactctatctgaggaggaaataggagaaaaatgttaaggaaaatagaagaattcgacgcctctaataccaggaacttcagcacaaagaaaatgatttcacccttattggcctcaaatttatttttcctgtggcatctgcagggttccaaagtgagaaaaattaattcactgtgcatgcacttccgaagtgtccacttgcattctgatatctttacttctatttgcagaaagtagacacatattcagccttagtgccagtgtagggagtgctttccgtgacatggataccagaaaaatagggtaaacatagggcccattaatgtgaaaatcagacattgtgtgtgtgtgtttgtgtgtgtgtgcgtgtgagttgaatagtagagttggagtgggcttctatccacctacacctgcaggtattctcaggtgccataatcaactgcaggaccctaaaggaaataagagtccccccaaacccctgaagagtttttgggttcaccgtgtgtccaatgattcagtgcctcttgagctctaggaaagggctccccagtgatgcatgagatctttcttggggtctccctgcagagttcactgggattcctaaggccaattcagtatttcaaaagatggtgtgagaagcacaggctgtcactaaaggagaattctgagccagggcacagccactttatacttggctggggacactggtaggaatatactctgtgagatcagacaggaacctccttgcaggggcagggcagggctgcagggggcgctcaggacacacagagcacaggcttccgccccagagcaggtgaaggaggctggggaggggttcctctcagggcctgggacttcctttaaaaaatctaaaataagtatttcacaaggactgccgatgtttatataaatatcctattcaattgtgagcatttatgaaactcgatgttgtaatgagaaccacttttacaattggaatttcaaacttccctagacatcttaatagtaagcagctggaggtcaggaggagatcctttcttataaataagtgcaattttgggagaaacacactcattcccaaaatagcacattcacatattaaggtctagaaatgattcgagttgcccctgagacagtcaaatgtgggttctaagtgaggtgcgtgtcctgggggagcttgttctccagtgggggaagctctgtcaacacagagttcagggatgggtaggggatgcgtggcctctaacaggattacggcttgaaccctcagcttctacaattgtgtcgtccatgtgtcatgtatttgctctttctcatcctgggtcaggaattgggctattaaatagcatccttcatgaatatgcaaataactgaggtgaatatagatatctgtgtgccctgagagcatcacccaaaaaccacacccctccttgggagaatcccctagatcacagctcctcaccatggactggacctggagcatccttttcttggtggcagcagcaacaggtaacggactccccagtcccagggctgagagagaaaccaggccagtcatgtgagacttcacccactcctgtgtcctctccacaggtgcccactcccaggttcagctggtgcagtctggagctgaggtgaagaagcctggggcctcagtgaaggtctcctgcaaggcttctggttacacctttaccagctatggtatcagctgggtgcgacaggcccctggacaagggcttgagtggatgggatggatcagcgcttacaatggtaacacaaactatgcacagaagctccagggcagagtcaccatgaccacagacacatccacgagcacagcctacatggagctgaggagcctgagatctgacgacacggccgtgtattactgtgcgagagacacagtgtgaaaacccacatcctgagggtttcagaaaccccagggaggaggcagctgcactgaatttgaggagattacagggcttacaatgtttaaagttgtttagaaaatgagctgagcaattgaggaatgtgagtaatggaaacatggatgcactctatataggaaatgtttctttcaacagtcaccctatatgcaaaattcagaatggtaaaggcagcaatcagtgaggctgacgcaaatattcccatggaggccttgtgcagacataccgtttttaaaatcagatagataaataatttggaacaagattgctggtaacgtggctaagactaaatatgattcctaaaaactggccaaaatctattccaaattgtctctgccactccttttacataaatgtattaaaaagtagttttaagaccacagcaaaattggacagaaggtgcagagagttctcatgtgcccctgcttcaccatgcacaggctttcccactgtcaccatcctgccccagagtcatcaataagttacaatggatgaacttacatgggcggattggttctttcctcttctggtggtctcttggcataccaagcccaaattatcttgaagcaccataggttctactgtaatgcctaaccttgttttttactctagtttgctactttaaattttccctttttttgtctccttaattgccagccatgtttcccatatgaatagactctccctggctgggaaagctgggcaaactccatttgaccttttgatttataagacattaagggctccttacccaaccctcttcttcaaggaattaacctgtgtaagcagatcctcagcatttcaaaggagcccaattaactgataaggtactggaacaaacaatgtatgaagttcccaggatttttctcaaagagataacaacataaagccttgagttcatgcccagcatagcatcatatctaactataatgaaggatttagagccctgcacctggtaacgttgctttttgtaaccatttgtcttttaaattgtttatctctctgtaaccatttgcttcttttgattcttgcatgtttttacttctgtagaattattgtatttgagttcccctccccttcctaaaccaagatataaaagttaatcaagccccttcctcggggccgagagaattttgagcgttagccatctcttcggcagccggcttaaataaaggactcttaatttgtctcaaagtgtggcgttttctctaactcgtttgggtataacactacaagtgggttcctgggaatgatgccagttcagaggaaaagtgggtggggctattcatatttgggctcttttttagaagattcataaaacagatattttcctatacgttctgtgactcctgatttactatcccttcccagagggtaaggtccctaagtgttttgcggtatatccatgtctatggaaagaaagcaagttctggtgaatcccgtaaggaatgtcctttgatgagaagtggagaccttggtcatgaggcacatcatgtatgattttctataattccgttagattcactgtaattttggggggtgtcctgtggaatgggtcttctgtgtccctgcatgttcagctatatctgtgtggtgccacttacacttaatgagatgagattcctgctgcttgtatcaggtcactggtgatctctgaagctgcttctggtttctgctttaatatgtaaagagcatgtcaaacatcacccacattcttacaataataaaagcctggaaaattgattatcaataatttcttgaatctgttgaagaaatgaaattgcagggaaaaccaggacccccaaaactagaaagacattaaaatagagataatcagactgatggatcaaagttctgtggcaataagataccaaattataaacaaggcctaaagtcatggattaagtcactcacccctacacttaaaaaaatgactgtactgtaacttccacagggcttttttgttttctgtagcacctaaacaagcactggttctgaggtaagcatattaaaacatttgcagctcatggaactccaaacgtggtaactgaccctctcccacaagccataaatagagctttgtttggacaagagacagatttcagtaactgtcttctgagaagagactactgaccatgaacttgtcctggcaatttacagagactgtgcagtgtgtgtctttctgcctctgcacaaagcccttttgatgaacagggcccgattgtcattcatttagttcttaagtcctcatccccaaagcaaacactaaatgcatgtaacatgtgtgtttgcttattagacatgagagcctgcccactatgtgaacatcaacaagatccttctatagcctgctgagtgtgtacacttggccaatccatttgcatgaattcatttctcctctttccctctcttgaagtgcctgctcactgtctctgtgggaggctttgcttcccagcctgttaaggtggctgtcctgcagctttaaccatttctcagaagtaaagtctcctttctaaatttataaattatgtgactgttccgttgaaagtgcaagctggtgggaacagttacatggtaattcggtaaattgctggtggacaggtgtggacagggatagggtaagaactcctgggggctgcacaccccacacttcgatggaatttccctccagaaacttctgggttctcaggatgataatccaaacagattccttcatggctctgtcatcaggagagctactctcttgataaatatgctcagaacttcctccagacaagatcctacagagaaaaaatgcttttcaagatcctctattctatgtgaggggaaggtattcttttccatcccaggcagtttcatcttagccttcctgtgtcataaaaaggtcaggttcaagacaataatatgtggatgctgcagccaggaggggggagtagaagacggaggaaaatcagctgcaccactggagactccttgtaaagggcacagtctagagaaaaaacatcaagaaaacattgaaatcaatttccagtacatatactgctcccctgcccaccacatcacctcttcaccagtatgatcaatctggattaaagagaaaagtgtggcaatgcacagactctgtccaaggactagaccttagggaaaccaaaggcagagggagaggaaaagttaaggacagtgaagcggtttaaagcctctgagaccaacagcttcaggaccaaggccacggcccctctgtcaatggccttagatttacctctcacggggcatccacagggttcccaggtgagaacaggcaaaaacaaggtgaagacactttccaaatctccagcagtactgagcttgctttagctctgtttgaagaaacaaaacaacaacaacaaacaacaacaaccgcaaatataaccaggattaaggtcagtgttggaagcacttttattaatttttttaaattttttatttctcagatggggtcttgctctgtctcccaggctggagtgcagtggtgcggtctcggctctgcaacctccacctcctggggtcaagcaatcctccaccctagcctcccaagtagctgggattacaggtgcatgccacggcgcccagttaatttttgtattttttagtagagacagtgtttttccatgttggtcaggctggtctcgaactcctgacctcaggtgatccgcccaaattgccctcccagagtcctgggattacaagttaattgagttaataaagctgttctgaactatgaaaaacattagtttgctcccagattttcttgatttcagtttgattattatattcagctgctgccctaatatgtttgagcatgttactatttaaatgaccctggctgtttgatttgttatatataaatctaaactaaaacaacttaaaggacaggtttgtactattattaggatgagatattctgggtgcccctcatttgctccatgaacctccacatttttaatttagaattcacataaattccttgtgagttgtgtcagtcatcgagagacctaatctctaacacctttacccagaaccttctccagatagaccacccacaggaagaacatttatagtaatttatctacatggtggaaggtacttcactgccattgtagaaccctcttcccagccttcctttatgaggcaaatgattgccagtatggtaagattgaacaaaaggatgtgccagtagggtaagattgagcaaaaatagtcctgagatcctgcagacagggaaggacgtaatagacaaatatcagctttattagaggagactccttgtaaaggtcatagccaagaaaaagaagacaaaatcactgagattaaattctaagaatcttggtccagttcaatcaagccatcaacagccaggtggcttcagtggccactatgcatattaccccatgcctaaatgttctggcttgtacaaagagcttctctgtaaattgcacattgccatagtggaagatggcatgggagattttgtgacaaacacttaaggtgcaataatagctatttttcctttatcatgacaatatgtggcatgcttctagattcatttcatgccaaagaagttcctcagaagggtaaggaaatggagaatcttacacggtccaatgcagtccccaagaagggactttgaatggacagttacactggttactacgatgtgtctctgaccttctcaggatcgaagatagtcatgagtatcaaggtggagatggtctaggtgagagaaaggaagtagtgttcttagaagatggtatgccaagataagcctgactatctctcctcttccagttcctgcaacttcatattgcctgattgagtcacttgcctatggtggtaatgacatcagcaatgcaataaattctctggtggctttatatctggtttataacatgggagatgtttcctcaagagtggtgatgccagtgtggcttctgctctctggtggtgttggaatctgcattagtctgtgggtttggaggaaggagattcagccatggggaagaatctgacactctcacaccctctgtgccttcggtactggactgctcctgccctcactatggtgattgcatcagatattgcctccccaccagacaacacgttaacatggctccttgtacctggctttaaccaagaaagttgtcgacttgactcttcgtgacattgtatagcctggtttgtcacaatctttatttcgggaattatcagtgctgccatcttggctgtcttcaagtatgtcatcctcacagtgtgaagctgtttgacattaacatttttgtcaatgtttgggactaccttacatattccggctcagttcaaaatgagctatgtaatgtagccaggtttccactgagttccactttgcttcttggctgtctattcctgcgcaagtttctatgtattttgtatcaggcttcaattccattatgtttaaaatgttgtctctaaagataaacaaagatttttttaaaacaaccaaacatgcagccatttgaccgagtgtggtctgcattgttagtctcaccatcttctgccctaacaagcaccgaatctaacaacacaaatatcatggaagctttccttggagtagctcctgtaattagaatcattgtattctgccctcctgtcagtggtggaacgttctattggcacatgtggaaacctcttagagggacgagtttctttgaacacaataaaattttaagttaggaataacttatttgaaagcaattcattgaaggttattgctaagaagttagaaacagtcttttggcagtcatttcttcaagatgtatggcagtgtgggagggatatataaagtggaataggaacttgggctagttaaatggaatagcctccaatgttaatctgtttaccttttaactgaatgaaaaagcctatagttgtaagaaaagaaaaaaaacacaatcctcacacattcccttcccatcagcattgaagatgagtgtggcaatgcagagactctatatagggaggagaacatagggaaatgcaaagacaatgggagaaaaaagtcaaggacagtagagcaactggaagcttctgacaccaacagcttgatgaacagggtcactcaacccttggtggacacagagtcacttctcttagggaaactgcagtattctcaggtgacaatatgcaaacatgatgaatgtacacttgctacgtctccagttgtgtactgttttccttacttctgtttggagaaggaagtcatatactcaggtctagtatccgtgtagagggtgctcaccatttgcaagatactaggaaaaatggcaagttagaggcccactgttgtaaaaatcaaccagttctgtgtgtgtgtgtgtgtgtgtgtgtgtgtgtgtgtgttatagaaaaagaagacatggagtgggcattgatccacaagtatatatacctacaggtattcttagatgtaatattcaattgcaggagaccaaacaagataaagcatcccccaaaacccttgaaaatttttgtgctcactatgtgtccactgattaaatgtatcctgagctccagggaagggctccccgatggtttcttagagttcactgggtctcctaaggtcaatgttttcaaaagatggtgtcagtaacatatggtgtcactgaaggagcattttaaactagggcatgacctcttcctatagccctagagacactgagagagaaatcctctgtgagcccagatggaaacctccatgcagggcagaggcagtgctgcagggggcgcccaggacccacccagaacaggctccagccccagagctggtgcacaggaggctgcagaggggatttctcccagaattgagtgttgttttattgaaaaccaaaaaattataacatgttaaaattagaattttgcaaagactatttctattatctctatacatttagaaataaacaaatcaacaattcagtgagaaccacatttaaaaggcaaaattgttacttgtttgagatattttcctagtaaaaagatgaagaacagggatggttttattaaatcaaaaggtacacatttcagaagacgcagagatcccaagagtaagactgcagacagcaaagcctagaaagggcggaggctgtccatgtgccatgtcctgtgtgagtcaccttcttagtggagaagttctcccttcacaaagttttgggcatataaagggaaacacgacattaaataagaacgaggacttgtacctcagcatcccacagttgtgtggttcatgtgagatctattttctctttctcatgctggatcaagggtaaggctatgaagtagtagttctcgtgaatatgcaaatcacctgaggtgaacactacagatatgtctgtgccctgagagcatcacccaataaccacacaccacaaagacactcgctgagaagagcaaccctaagacacataattgtcagattcaccaaggttgaaatgaaggaaaaagttttaagggcaaccagagttgtgccatggcacagtgttgtgccatgtcctttctctgttttcttgcctgtttatttatgtcagatgtgccacctacatggaataaggtcagaattctgcctccagtaacacatcaaaggtgacctttgattgtacttttggtttatgctccaaaatattgattataaaattcatcaccgtcatattttatgtcaaaataaatctgcataatctgaatgtcagtacattttggaatctattaaataactgaaattgcaagaaatattacccactccaaaaactggagagatgggcatgtccagaatggcagttagcacttgcttacctggtgcagaaactgcagaagccacaagctgttgagggcacttacatggtaaccactacggacgtctgaaagacaaatgtggactcggtaaatgtgaccgttccagagggtcttatacttctaaggtttctggactttctctccagaaacctccagattctaaaatatacaatccaaataaatttccgatgggtcagaattgaagatgaaatgaagatgattaattacagagaaatataccaggagcccacttcaaaagcttctaaagggaatgacttttccagaaccttatcctatgtgaaggaagacaaatctcccattccagattctcccccattcttccattattatatgaatgagtaaagttagccaaaaggggtaagacgtacataaatagtccaaggaggccgaaacctcaaaagggagtaacagccaaaaatgagcttttcccctggagatgctttgtcaaggtcacagcccagaagaggaagcctattgaatctctaggtttccattggaagaacaggcagtgcttacctgcactgcacaatccattctaactaggatgatggctatggattaaagatgaaagtgtggcaatgcacagactccatctgaggagaacacagaaatactaagacaatggcagagggtgagacaaagacagtagagcaatgtgaagcctctgacatcgtgatttttaagaccaacatcttgtaaatgccatcatagttctcagcttcttttattatgggacctttgctggtttcctagctgagaaagtgaaaataacaacctgcatggacttcccaagtctccacctgtatcctgtttgctttagatctctaggagaagaaagtcagataactgggcctggtgtcagtgtaggaggcacttcctaaaagccacatattaggagaagggaaaatgtgtgttattggaatagtggatatggagtgggctttcatttgaatgtatctgcacctgctagtattctcagatgcaacattcaactgcaagagcccagtgaagaaacatggcactcgcaaatctcttgtaagtttttgtcttcattttggttccactaatgaagtgaatctggagcttcagggaaggggctccctcctgtgtcattgaatccttgctctgggtctccctgcagagttcaataggtttagtaaggctaatcaattgtttcaagagatggtgtcagcagcatatggtgtcactgaaggagtattctacactagcacacagccatttcatgctgggctagagaagcctgggggaaatgatttgaagtctcagcaaggaacctccttgcaaggcaggggctgggctgtcgggggcaccgagcaggtgagtcagaaatcaatatgtaaagatgaggacctatggatatgaattgaaaatatataaatacttcaaaaaattccagtaaattgagtccaaaattaaccccaaattattcaaaacacaaattccttgacaattattttgggagcagtgagttcataaagaattcaaaactactgtttcagcttctgattcttattgttcctgagatgagaaaatcatctctaatcacacatcacacagcaaatctgtaaacaagagtgtttctatggaagatcctgggggatctgaacaccaggcaggtgctggagaccctgtttcaggagcgcccagcagatctcagagggacctgctggtcactcacgtgggacatcagcagtaactttctcagtcaccagtcagctgtgctggtgactgatggacccaggacagaaccaaggcacctcctcagtgtcatggagagtgatggttccagaaatcatccaggtgctctctgtgcttataaaatgtaggttcactgtgaggagcatgttctgagggggattgttctgtgaaaggacctctgttcatgagtgttcataaatggagcagggcatgcatttcctcaaacaggaatagcgcttggaccatcagcatctcactcttgtaaatctgatgtgtcatttatcttccctttcttattattgaccaggctttgcgctatgaaatgctctgtctcatgaatatgcaaataacctgagatccactgaggtaaatttggatgtctgtgccctgagagcatcacccaacaaccacatccctcctctatagaagcccctgagagcacagctcctcaccatggactgtacctgggggatcctcttcttggtggcagctgccacaggtaaggggctcccaagtcctagtgatgaggaggggattgagtccagtcaagggggcttttatcatctcctcccttctcctcacagatgtccattcccaggttcagctgttgcagcctggggctgaggtgaagaagcctgcgtcctcagtgaaggtctcctgccaggcttccagatacaccttcaccaaatactttacacagtgggtgcgacagggccctggacaagggcatagtggttgggatgcatcaacccttacaatgataacacacactacgcacagaagttccggggcagagtcaccattaccagtgacaggtccgtgagcacagcctacatggagctgagcagcctgagatctgaagacatggtcgtgtattcctgtgtgagagacacagtgcgaaaacccacatcctgagagtgtcagaaaccccaggaaggaggcacctgtgctgacacagaggagatgacaaagattattagattaaagattttcttagaaaatgacactaagtcattaaagaaaaggaacaatattaatgtgtatttgagaaattttaattatttgagagatttttcatacagcatttattctgtaaacaaatttcaatgattacagaatgaatcaaattaatgaaactaatacagaacttcctctgaaggtatctttgtaaacattaatttcttaatcagtgctgtaagtattttggaacacagacacaaaatcacattttaagtctgcatttatgtctattaaaaatgccaaaaaaatctccttttgtgcatgtagcattttgaattcccaccatcaatgcatgatagttcttggttttccacattcatattgtcatgtatccttatgagaattgtgtgttttaaccaatctagtaggtgagtaatgggatctaatttttatttaaatgcacatgtccctccaaaagttcatatttaacaattttcctataacttctgttgagacgcctctcctgacattcggttcattttaactgcattgcttcatttcgattcattgcaagttgacttgcatattgtttataaaagtcatttcacaaattaaaagaattcatttcacaaatatgtgacttggaagtattttctccaagtctgtggctgtctttattcccttatcagtgtgtattgcagaaacatatgtgtgtgtatgtgtctgtgtgtgtatgtgtctgtttgtacgaatttagactcaaaaacatgtaaaattgcattcattcatagatgatgtatttggcaatatatatgaagtctcattataaaatacactaatagtgattattttttccatgtctctcaactcaggccacaatcaactcatgagtgtttaaacttcatctacttgattggaggactatccatttcagatatttggaatacttctgtaaggaaatgtgttcatcttcccaatatttatttatataatcatctattaatatgtgtattggtttatgaatatatatttcatactctgaagaagatccatgctatattattcattttatcgttcaaatcaccacagctttattaggtcctgggagctcatttaatttggatcctgtatccttacagcacacctcatccttttgtttttgaatacttccctgtttccttgtattacaataaattctaagctcattttctatattaccttttttgtacatagaattagccttttttctaaagattgcttgtttctaatgttaacgaatagcagtaaaataaaaaaaattgtgataccgtgtataattacttctaggacctctcaacctactggcctagtagacgtgcatgtttatatgaacccatgtttgtggacgcatcaaaactatttatgtaactaatcttctgtaactttattatattaaaaatgagaacacactggtctcctgacccaactatgctaccacatggacctttctagccttccttccttgactgtccataaccacccactgcaaagtgaggaatcctatcctaccaactgccttattattacctagttgcacaattttaggacacatgcatagcggtatcagaaatgtaaagctcattggaaatatatttatctactagaatagagtgttatgtgtagtttctttacattttaaacttatagaatttcctcatttccaaagttaattagattagcaacttcattttctactttctttagtgaagtcatttcaattacattatataatatcatttatttgaaattcggtataaaccaaaactatagtcaagtaaacagatagaggatattcaaggaacttagagagtgagtattaaataagtacaaatggcactgtttaagaatagtaaaattatttttagtgatataaaatggttgagacacgatgcagttaatttgtctaaactcataaatgtgtgatggaaaatataaacctaaatatatacaatttttgtaaaaagtatttagcagttcattaaccccaggattaaatgcagactgtatcaagttatctaataacttatttggtgagggtggggatgtcatgagatgcatgcaaaaaagaatgaagtaattttcctcatttgcgtttaagatgttaccattcactaaagacctttaatttaaaaaaaatcaattttctacgtgacccaggttttttcttcctgacgagcaaataacccagataattcttttctttccttggttgagaaagattttccccaaacttcagctcagttcaggcacacactgtccctgaatgggcatttaccctcagatgggtaacacacctgtcaacatggggactcttctgtcagacaaacacacctttactcacgtggattcttccctcagaccaacacacaagtccccacatggactctttcctcagaccaccacatatgtccttacatttactctttcctctagtaatgacatttcctcatgtggactcttgtctcagacaaacaaacatgtctgcatgtgaactcttcactctgataagtacaaatatttccacagtgactgtttcctgacacaagcacatatatccaatgttgaactgttttatggcaaaatgatctcaagataataattataaaatccctcctgacaaggtgtagatctgcatttttttattgtaccttaactttgccttattgtcaagaacaatagtttgcagctctatatgcaccgattagagattggtgtccattttctctggaaatgtatttttatattcttactggatgtatttttttgataatgtttgctactgtgaagatacctgaacagggtccacactagaaaataaaaaagactaatcggcagattaaccctgtgcatccagacccacgagtcctttgatcctgcccccctgaaatggagacacagaggacagatgagcaatgctgagcggtgcacccaagaccacaaaaagaaagacaaggaaatgtgtcccctcccctcctcatgaaaggcagctcatcccctgttccttcaggccctggtgaggagccaacccatgtctgttcccttcctcggtgtccacaccgtggggtctgccctgatttgggcttcccttctcatcaccctcaatattagtgtcccttgtgaatcaggtccagctgcggctgctccacatggggccgttcttccatttcctctgtgtttgcagaagtcctgtgtgaaatttactgatagagtcaggggggaaaattgtacagcccagtggttcactgagactctcatgcaaagcctctgatttcacctttactggctacagcatgagcttggtccagcaggcttcatgacagggattggtgtgggtggaaacagtgagtgatcaagtgggagttctcagagttactctccatgagtacaaataaattaacagtcccaagcgacaccttttcatgtgcagtctaccttaaagggaccaaactgaaagtcaaggacaaggccttgtaatactgtgagagacacaggagagggaatatctgcgtgagcccagacagaaaaatctctgcaggaagacaggagggagctgcatggtagatgctcctcagaaccaccagggcaccttggggacaacctgggggcactcagaaccaccagggtgtgcttaggaccacgggacactcaggatattagggggtgctcaggatcacgagggggcgctcatgacaccaggggacactcagaatcacaagggggcgctcaggacacgagggtttgcccgggaccaccagcaggcactcaggtcaccagggggtgctcaggaccaccagggggcgctcaggacaccagggggcgctcagaaccaccagggggcgctcaggacacctgggggcgctcagaagcatcaggggtgctcaggatatcagagtgccctcagtaccacgagggggcgctcatgacaccaggggcactcagaaccaccagggggcgctcagtacacgggggttctcttaggaggcagctccaaatcagaagcctgagaggctgtggttttcttttaaaccttggtgattcccgacctggtcaagcaaaagtcttccccaggatctctcaccatttcttccttgtaagtccatgattacttttacctacaaaacattaacttagaacaggaatttaattcaacttttaatgctgcatattttccaagtaatactagcaatgatctctcaggacaatttttacaataggttatttatatattttcttgattaaaaataatactattattaaaatagtaaagttataaaaatcacacctgtaatcccagcactttgggaggctaaggcaggcagatcacttgagctcaggacttttagaacagcctggcagcacagtgaggtcttttctatatatatatatgtaaaataataataataataataaatacctgggtatggttccacctgtggtagcagctacttgaaaggctgaggcaggaggatcccttaagcctgggaggttaatgctgcagtgagctgtgattgtgccactgcactccagcctcgttgacagagtgagaccctatttaaagaaaatgtataccctcaatacaaactgtttcaatgattagagttttgtatttttgtgctgtaatagtcaaacaattgtacatgttttttaacattaactcagcatatacatggtattttgtttatttttctttcatctgctgtttttggaaattaaacacgactttaaatgctcttgttctccattttggttggcttcaggtgtcctgtttttcagactatttctccatcttccctttctctttgaaagtattttactttcctcagtctccatgaaggaaaaagaaagtccctttactttctgacctccaagtctgttgaatcagttcccttctcttcataatcactgaagccaaccaagtttagaggataatggttctccttagaatatgctcgtctacctgcagactctctgccctaactcacccttttccagggtcctgcagaccatctcctcgtttccctaagtaccacagagtgggctctgcagctcctgctgccctctgtgtgctcagccctggggctcactagtgttttgatgatcaagtccaaatccccatgtgcttggaccctctgagaccaccctctaggaagatgccattgtgagtgagccctgaaaatcatggactgtgttcagtttcatattcctggatgttctctgttgtaaaggaatattgacaaataaatactagagtttgtattgaatattcatgccaaaaaagttttttaaaaatttttcaaatgaaacaattttatcttgcctagtttgaaaactacaatctaaatttaacaaataatgtaatacaacgtttgtcctattagttattcaatttattaaaaacagactgatatttaaagttaataccattgcacatttgagtgacatatttggcaagaacagcatttacattcagctttaacaaaacatgtatttatatatatttgtctttttagtattggaataggcagacatacacgtagaagagcattattttctactacaacctcaaactgcaaacacaatttaaattcaattaagtaataaaaaaaatatgaaacaaatgggtgtgctgttttggtgtttagatatacattcacttttgcatgggcacatgtatgtgtctttgctgggctgttgtgtatgtatgtgtgtttgtagaaccatgaagttttcaaatacatcattaaatgacatagttatattaatcttggccaggcatggtggctcaagcctgtaatcccagcactttgggaatcttaggcaggcagatcacctggggtcaagggtttgagaccagcctggtcaacagggtaaaaccccgtctctactaaaaatacaaaaattagccaggtattgtggcacaagcctttagtcccagtgtggcagggaaatgtggggtcggaaatcccacacagagtttctactggtataccacctagtggagctgtaagaagaaagccactgccctccagaacccagaatggtagatccactgacagcttgcaccatgtttctggaaaaaccacataccctcaatgccagctcgtgaaagcagccaggagggagactgtgccctgcaaaagttttttaaaacttttcatttgaaaagttttaaaaaagttctgtcacaggggcagaacttcccaagaccatgtgaacccacttgttacatcaggtaacctggatttgagacatggagtcaaagaagattattttggaacattaagatttgacttcccagctggatttcagacttgcatgggacctgtagtttggaccaatttctccatttggaatggctgtatttacacaatgcctgaactcccattctttctaggaagtaactgacttggtttttattttacaggctcatagatggaagagacttgcctcatctcaaatgagaccttggactgtggacttttgagttaaggctcaaatgagttaagactttggcagactcttgaacaggcatgattggttttgaaatgcgacagcaatcattactctagaggaccacacgtgaagtgcaacaagcaggcgcagaagacaagtgattcgtgatttcactgtagtttgtttaaatggtagactcacagaagtagaatagaatgttggttaccaggggctggaggggtggactggaaaaggagagattgtggtcaaagtgtaaaatgttccagttagacagaaggagtaagttacagtgttctaatgcacaagatggaaaatatggctgtgaatgcattatatatttcaaaatggctaaacatgcaaatgttaaaattttttcccactaagaaattatacaggtcgggagcgggggctcacacttgtaaacccagcactttcggaggccgaggtgggtggatcacaaggtcaggagttcaagaccagacttgccaagatggtgaaaccctgtctccactaaaaacacaaaaattagccaggcgtggtgttcaccacaggagaattgcttgaagcaaaggctgcagtgagccaagatcataccactgcactccaaccggggtgacagagtgagactcagtctcaaaaaaaaaaaagaaatacatttatgaggtgctggatatgttaaatagcttgattaacaattccataatgtatgcatgtatgatagcatgtgtgaatggacctgtatgaaggtgaggtgccctggtcacgtgacagtgaggtgacttgggggaggtgtaaggttacctgggggtatgtgtgcggtgaacttgggcacatgtgaggtgacccacggtgcatgtgtggtggcctgggtgcgtgtgaggttacctggacatgtatgaggtgacatggggaattcgtgaggtgacttggatatgtatgatgtgacctcaggcatgtgtgaggtgacctggccgacgtgtgaggtgacctgggggacgtgtgaggtgacatggggaatgtgtgaggtgacctgcgggaatgtgtgaggtgacctgcgagcattccaggtgacctggggggtgtgtgagcttagcaggagtgtgtgtgaggtgacatggggtatatgtgaggtgacccccctgacgtgtgaggtgacctgagcacatgtgaggtcacctaaggcacatctgagttgacctgggggatgtgtgaggtgacctagggaaatgtatgagctgacaaagggcatgtgtgcagtgacctgggtgcatgtgaggtgacctggtgcatgtgttagtttacctgggggatgtgtgaggtgaacaggggcaggtgtgaagtgcctgaggaatgcatgaggtgacctggtgcatgtgtgtggtgacctagcagatttacgaggtgacctgcgggatgtgtgaggtgaatagggacttgtgtgaggtggccacaggaatgtgtgaggtgacctgggggatgtgtaaggtgacattggggatgtgtgaggtgactcagggcacatgtgaggtgacctgggggatgtgcaaggtcaccttgggtgagtgtgaggtgaccttggggatgtgcaaggtcacactgtgtgagtgtgaggtcatctgggatatttcaaacttcgtaaggaaagcctgcaacagtatatggcactaaaagcttcacactccaacaccgttaatgcgcacatcctcaaggaactctaagtgtttccaggttagcttaaatgccatggagcgacacctgccccaggcacactcatatatgcatcctgggtctccctatcaacccctatcctcaaattttcagtttatgtttgctccatgatatcaactctgatatgttgaaggttttttttttcttttatttgtagttgttcaggtttgctatttcactctcattactctgggctcagtcctctcctcaggtgtcccacttcagagcttgctatataataggagacatgcaaataggaccctcccttttctgatgaaaagcagcgcagcctgaccctgcagccctgggagagaagccccagccctgggattctcaggtgtttctattgggtcaacagcaataaacaaattaccatggaatttgggctgagctgggtttttcttgctggtattttaaaaggtgattcatggagaactaaggatattgagtgagtggacatgagtgagagaaacagtggatatgtgtggcagtttctgaccagggtgtctctgtgtttgcaggtgtccagtgtgaggtgcagctggtggagtctgggggaggcttggtacagcctggggggtccctgagactctcctgtgcagcctctggattcaccttcagtaacagtgacatgaactgggcccgcaaggctccaggaaaggggctggagtgggtatcgggtgttagttggaatggcagtaggacgcactatgtggactccgtgaagcgccgattcatcatctccagagacaattccaggaactccctgtatctgcaaaagaacagacggagagccgaggacatggctgtgtattactgtgtgagaaatcctgtgaggggacacaagtgcgagcccagacacaaacctcctgcaggaacactgggcgaaatcagctgcagggggtgctcagggcccactcatcagagtcaaccccagagcaggtgcacatggaggctggggtttgtttcctgtcaggatttgggacttcctctgcttctgacagtttccctagggaaactctttaattttagatttctgtgcccaccaatgtcatctctacatatatttttttaaatcattataatacgaggactcattctcacatgcacaatatgtatattgccacctacgggaatgaaaactcctcaaccatggtcaccagcatcagagttgtgaggaagctcaggggtgcctggtgagtcttctccagtcagactcaggacagtaacctcaatgggattccctgactagaatggcttttagggatttcgattacagccaagagagaggctggaccaggttcagtgtcatgtaggacctcacagattttatgtatgacatttctcctgacaataaagtatgcaaatgagtatcagtcactgatctggtgcttcctgactttcatttttagtggttctcgcttttccatttgattttcctgctttctggataaaaggatgttgtccctgtggtctaaatccctggggctcaagccctttccctggagcttaggtggggctcaggctgtgactcctgcagccattgggagaggctgctgagactttcttctctctcattgttcaggatactccactctgttttctggagacgcgtctgagaacgcgtgtggccattagtaatgagggcacaagcttctttggtcaaaatggggtgaggatgtggaattgatcctgtgctgtgtaaactgtcacagagtcaccttcttcaccagtagtgttagaagagcttgtaaaatttgtcggaatccaactggagtcccctgtgttcaaaccctgacaaatggagctggggaaggccatggatggaagcttctcatgcacatacccctgagaacaagacctagctttataacactccaaaaaaccacaaattgaacaaaggcaaccacaacaataaaagaattacttatatccctgagaacaagagctagctttataacactcagaataaccacaacaacaaaataattacttatatacctaacaacaagagctagctttttaacactcggaaaggccacaatcttgcacaaggcaaccacaacaatgaaagaattacttctgtgaaaatatctgcacagcaactgcctatccaaccttacactgatgtcaaccttgttattgatgcttctagcccaggatcgtcctcatcaaaatgtcattcagatcctgcctatgaaaaaaattgtgtttttcagtgcactcatgttctagtaaagccctcagagaccctctccttcacctgtgctgtctctggatttccaatcataaccagtacttcctcctggagctgtatctgccagcccccagggaagaagctgaagtgggtcaggtgtgtaggtcacgaggaaacacacagtgcaacccgcttctcaagagtccagtcaccacctccagatccacattcagaaaacagtttttcctacagctgagctacccgcacaatgagtaaaccaccatggatttttatacaaaagacacagaaggggaggtcattgtgaggccagacacaaacctccctgcagggaagctcaggacaccagggggtgctcagacaccaagggctctcaggacacatcaaggcaggtgcaagaggggaaaaaaggtgctggaggtggggtttttcatcactgtcatattttactctccactatatttattctaatgtatattattttattattagacaatgatatttatataaatatatagccatacgtaggtgcaccaagttgtcctttccatcttatgtggaccttgtccattaggacgaagtccctgtatgtatttgagcacctcataagttatggttaattatgtaggatctctcactttttctgtgtcccttcctccctcctctctcacacacaaactgacacccacaaagagttctacaactttaattacctgatgcgttgaagaaaatttactgaagtgcagctttttcagtttaactgctgttcatgttgatgtaggaataagaacattgtctttctcaactgtgtagctctctaagctgagtagcacctttatttataatacccagatactgaaagcaatccaaatattgatcagcaggttaagcagtaaacactttgttctaaattcgttcacttgaataatacccactgttcaaacaagtacggctggaaatgctcaacaagggtaaattcacaagtacttatgaagagtaacataagccaaagaaatacaagtacatacatacagttccacttttataaattttataaaatgaaaactaatctaaagttacataatgaaaaccagtagttggccgtggacatggtatgagaagggaaggtgtaggaagtggcaattacaggacaacgagaggaaattttgaggataattttttctgtattgagaaaggttatggttatgtcattatttgtcaaattgtacacattaagtgaagattattactttctaatttcgacttcttaaaatactacaaatttaaacatatataatttggtagaaaaggagttagagatggataaaatatatgagaaataaaaaagaaaatctcagaacgatggcataaggattcaaccatcaaactaaataaattttaaatttctcaacacagaattatagattcataaaaccagctcctggattcattgattttgtggaattgatttacatgtctttatctccttcagttctgctctgatgttaggtatttcttctcttctgctagcttgtgaatttgctcttgcttctttagttcttcaaattgtgatgttagggtgtcagttttagatctttcctgctttctcttgtagacacctagtactataaatttccctctacacactgctttaaatgtgtcctgaagattctcatatgttgtgtctttgttctcattggtttcaaagatcatctttatttctgccttcatttctttatttacccagtagacattcaggaacaggttttccagtttccatgtagttgtgcagttttgagtgaatttcttcatcctgagttctaatttgattattgcacttgtggtctgacagactgtttgttatgatttctgttcttttgcatttggcgaggagtgtattacttccaattatgtggtcagttttagaatatgtgcgatgaggtgctgagaagaatgtatattctgttgacttggggtggagagttctgtagatatctattaggtctgcttcaagtcctgaatatccttgttaattttctgtctcgttgatctgtctaatattgacagcggggtgttaaagtctcccactcttgttgtgtgggagtctaagtctctttgtaggtctctaaggacttcctttatgaatcggggtgctcctgtatttggtgcatatatatttaagatatttagctcttcttgttgcattgatccctttaccattatgcaatgcctttctttgtctcttttgatcttttttggtttaaaatgttttatcagagattaggattgcaactcctgctttttttttttttttgctttccatttgcttagcaaatattcctccatccctttattttgagcctatgtgtgtctttgcatgtgagatgggtctcctgaatagagcacatcaacaaaataaatagacagctagccagattaataaagaagaaaagagagaagaatcaaataaatgcaataaaaagtaatgtaggggatatcactactgatcccaccgaaatacaaactaccatcagagaatactataaatgcctctatgcaaatatactagaaaatctagaagaaatgcataactgcctggacacatacaccgtccaaagtctaaatcaggaagaagtcaaatccctgaatagaacaataacaaattctgaaattgaggcagtaattaatagcgtacaaaccaaaaaaaaagtccgtgaccagatggattcacagctgaattctaccagaggtacaaagaggaactggtaccattccttctgaaactatttcaaacaatagaaaaagagggactcctccctaactctttttatgaagccagcatcatcctgataccaaaacctggcagagacacaacaaaaaaaagaaaagctcaggccaatatccctgatgaacatcaatgcaccaattctcaataaaatactggcaaaccaaatccagcagcacatcaaaaagcttatccaccacgatcaagtgggcttcatccctgggatgcaaggctggttcaacatatgcaaaacaataaatgtaatccatcacctaaacagaagcaatgacagaaaccacataatcatctcaaaagatgcagaaaaggacttcaacaaaattcaacaccccttcatgctaaaaactcaatgctctaggtattgatggaatgtatctcaaaataataaaagctatttatggcaaacccacagccaatatcatacagaatgggcaaaaactggaagcatttactttgaaaaccagcacaagacaacgatgcctctctcaccactccaattcaacgtagtattgagagatctggccagggtaatcaggcaagagaaagaaataaattgtataaaaataggaaaagaggaagtcagattgtctctgtgtgcagatgacatgattgtatatttagaaaaccccatcgtctcagcccaaaatctccttaagctgataagcaacttcaacaaagtctcaggatacaaaatcaatgtgcaaaaatcacaagcatttctataacccaataacagaaaaacagagagccaaatcatgagtgaactcccactcaaaattgctacaaagaaaataaaatacctaggaatagaacttacaagggatgtgaaggatctcttcaaggagaactgcaaaccaccgctcaaagaaataagagaggacccaaacaaatggaaaaacattccatgctcatgaataggaagaataaacatcatgaaaatggccatactgcccaaagcaacttatagattgaatgctatccccatcaaactaccaatgactttcttcacagaattggaaaaaactattttaaagttcatatggaaccaaaaatacatcctgcatagccatgacaatcctgagcaaaaaaaaaaacaaagctggaggcatcatgctacctgacttcaaactatactacaaggctacagtaaccgaaacagcatggtattggtaccaaaacagacatatagaccaatggaacagagcagaggcctcacaaataacaccacacatctacaaccatctgaactttgacaatcttgacactaacaaacaatggggaaagaattccggaactatttaataagtggtgttgggaaaactggcgagccatatacagaaaactgaaactggaccccttccttacaccttatacaaaaactaactcaagatggatgaaagacttatccagacctgaaaccataaaaatcctagaagaaaatctaggcaataccatccaggacataggcatgggcaaagacttcaagtctaaaacaccaaaagtaatggcaacaaaagctaatactgacaaatgagatataattaaaggaaagtgcttctgcacagcaaaagaaactatcatcagaatgaacaggcacctacagaatgggagatttttgcaatctatccatctgacaaagggctaatatccagaatctacaacaaatttacaagaaaaaaaaacccatcaaaaagtaggtgaaggatatgaacagacatttctcaaaagaagacatttatgcagccagcaaacatgaaaaaaccctcctcatcactggtcattagagaaatgcaaatcaaaaccacaatgagataccatctcacaccagttagaatggtgaccattaaaaagtcaggaaacaacagatgctggagaggatgtggagaaatagtaacatttttacactgttggtgggagtgtaattaagttcatccattgtggaggacagtgtggcgattcctcaaggatctagaactagaaataccatttgacccagcaatcccattacttggtatgtaccccaaggattataaatcattctactacaaagacacattgcggcaccattcccaatagcaaagacttgaaaccaacccaaatgtccatcaataatagactggataaagaaaatgtggcacatatacaccatggaatactatgcagccataaaaaaggattagttcatgtcctttgcagggacatggatgaagctggaaaccatcattctcagctaactaacagaagaacagaaaaccagacaccgctgttctcactcgtaagtgggagttgaaccatgagaccaggtggacacagggaggggaatatcacacactgaggcctgttgggaggtaaagggctaggggagggatagcattaggagaaatacctaaggtagacggcaggttgatgggtgcagcaaaccaccatggcgtgtgtatacctatgtaacaaaactgcacattctgcacacgtaccccagaacgtaaagtatcatttaaagaaaggattacatattccattaaatatatatgagaaatcagagactcctgaatatacacatgaatacacactgggtctacctatatttttagggaaacactagaatacagcaaaataatgtcatgattttattaaaaaggggggtttatcaaaccacaccaggcatgtccagctctgtcctggagctggttcagggaacaggtgggtcctgtgtttgggagccatgacaacaagctcacagcgtcagttctagttgaaacctcaaaaaggcaaagggatctcaactaaaatatcatgtggatgtcacatctgtgggtgctgcatactcccccgatgtgaatatggaaaggttaattacctcttgaactctctgccgagattagtgctggtctctcaggaacacccaaaatggctcgatagagccagaaagcagactggctcagggtttttgtgatggtttcgtcgtgggtcagagtgaggcttcccacgcacaggaaggggattgtacagtgcgaaacacccactggtgtcaaatgaggaagctcccgcaattcctaactagattcacattgtgtgataaaagacacacaatagacataacttcatggtcggatatcacaaaatgccgttaaaagatgtggtaaaaaggcaactttaaatttttagtcattggagtgcgtacaacacaaaaatcattttcaatatttgtaacacatgcatgcaataggacaaaggtatgtgatgagggtaaaatctcgaaagtgtgaatcttccagctaccaagtcgtagggtaataactgatgtgtgctgagggaggaaaccatcacgccatagtgctaatggtataacccttggtgaagagagttcaatattttattgaagttttcataatttttatttaaagatgccatttttcaacatactcagatgattgtgagtgccattgattctgtatcgtatgaacaatggcaataccttccatgtttacataatattaaaaaccacgttaagactgaatatttggtgtcatggtgcatcacgttattctagcttccatactagttgttttatttgtttgttttctcctttgttggcatttggtttcgaattcatatgtcaggtctctataatgtaggaatttatttaaaagtgtctttttttgtccattttgatggggcttccaggagacgtaagaacctcctctgcttgcaacacattttaaaattacacactaatgtagaacatctgtatttaatcctggtttttagttaattgacaagctctaataagtgaagtaacttctccattctgggctgattttacatcaggtataggaatatatcctaggtgaaagtttgtaccagtaatatgaattattaggtaataacctccacctttatgatttacatgttattcatcaagaaatagtgttaaatcaggagtctcaatgaaagtattacctaagggatatacaaaatatattgctaatctacataaaacagatgtgaacacactcttagtatccagccatgtttcctgtcaaccacacagtaactttgacttcacttgggacttgttctaattttcaaattagttacttattaatcttaatgcttctagatattatgtgtgactattttagcagagagtgaagaaagacagcctaggccgactaaacaatgaggaaaatcacaacctgatgaaacaggaagcctctggatgtgagtggctccaggattgaataatttgacaactcatgtacccaggaagtttcttttctcaattttccacactgatgcatccagaaagtcagcttcaccccccaggtgactcccataatgcagtgacatggtgacaatattcccatggtcacatacgtattttatatattggctggaaaaggggcagagacagttctgcaattctcctctgaaggaccaggaacacctcaacagaccacctcccctgcccccatgactagaactgcaccacgtgcccacatggacactcatccctgatggggataagaagactccattgatgaggccgactattttagcatataaattagtaaagactgatataaaggtttcaacaactaattgaagtctgttcttctatgtccaccagagactatagatgctccagcgatatcttgtttttctttgctgcgtgactgtgtctcttctccttgttccatcctccagagaatctctttcagctcccacaggtgcattcctctgttacatgtaactgacaattgataaattagtggaagcccttacactaaaggaagagtctctgacctcatcttggtccatattcctagaaaggcattgtgcccgtaagtctgggtgtgaccttctgagtgttcctgaccctcctccagaggagatgctcatctgtgtgttcttgtccctttcactggggtagaaccaccctgtttcccccaggtgttccctcccacagctccagtgttccgcatcagtgtcatcacctcccagatctgctgccctgccctgcagactaaagctctgattccataagaaggagagttatgtctcaacagaacttcgtggcagtgacctctgttcccatctcaattcctgaggggttgcaccagtgcccctagggtactggttttggtggttcccctgcaaagtaatttttggttctgtagtggatataagggagtcgagtctgaatgcctttcaaaaatgggggctcttgttctctcccagacagacactttgggaaaggaagattttgtgactgccccttttttggggaaagggattcaagaggatagaaaagctcttcagtatgtggtcccttagaatttcaaactacaacaagcttaccatattcagtttcaagcaatcccatatatatttgtatttttatctttaacagactatatttcatatgccagactctgccttaggtaatctcatatgctggctttgttactctctacaagaacttgcttcttgttaaatttaagattttttttaacttcagttatcctaagcattcagaaatttgcaaaatttcatcttgactgtttatctgttattgttgatgtagttgtaagaaataaagaatatatatccctcatttatgtacattttcaagtcgagtagtagatttttagtactaccagagtaataaaataatttgaacattgttaagctgcttaacagaaaatcaaattatggtaaatttgttcaatggaatactacacaacatttataataaataattgtctgatacatgcaacaagaaggtaaaatatctaagtatttttgctgagtaaaataaaccagacaaatgagaagatttaccatataatttcatttatataaattctggaaaataaaaactgaacttacttaagtaatataacaacaaggtaaaatatctaagtattgatgttcaggaaaataaagcaaatgaataagaatatgtactatgttattccattttaataaactctgataaattaaattgaatctacagcaatataaagaagaacagaatttaccatttggggaaatggtagaagaagggaagaggaaaggaggaggaatatagaagaatgagagggaaattttgtgaattttctggttcaccttggtaactaggatggttacatcaggtttatcaattgtacactttaaatatgtgaagtttattatcagtaaactgaaatttataaaatttattaccagcaaacaaatgaaaacttgcacaagaaataagtgacataaagatagaaaaaatattaaatttcagaaacacctaataatttatcttcgtgaaccctagttctcaccatatttttaggtgaatgctagaatgcagcaaaattacacatgctctcaatacagaaagtgggtttcacaaaccacactaggcatgctcagctctgtcctggagttgggttagggagtaatatagggccagtggatgaggagcacaggcctagatactggggctcactaacctcaggtatgagctcttagatacatacaaagcccctccacgcatgggtttacttccccatctgtaaattgagaaaccattgacccctaaaaatatgatttacacaaatatgtaaaaatgtaagagagtgattagtgcaaagtgtttatcacagcacaatttcataacaagacagcaagttttccaaacagcatcattgtcattagattcctgcagggcatcattaccttatctgggccctgccctctgttcaggcatcccaccccagagcttgctatatagtaggtgacatgcaaatagggccctccctctcctgatgaaaaccagcccagtcctgaccctgcagctctgggagaggagccccagccttgggattcccaagtgttttcattcagtgatcaggactgaacacagaggactcaccatggagtttgggctgagctggattttccttgctgctattttaaaaggtgatttatggagaactagagagattaagtgtgagtggacgtgagtgagagaaacagtggatatgtgtggcagtttctgatcttagtgtctctgtgtttgcaggtgtccagtgtgaggtgcagctggtggagtctgggggaggcttggtaaagcctggggggtcccttagactctcctgtgcagcctctggattcactttcagtaacgcctggatgagctgggtccgccaggctccagggaaggggctggagtgggttggccgtattaaaagcaaaactgatggtgggacaacagactacgctgcacccgtgaaaggcagattcaccatctcaagagatgattcaaaaaacacgctgtatctgcaaatgaacagcctgaaaaccgaggacacagccgtgtattactgtaccacagacacagtgaggggaggtcagtgtgagcccggacacaaacctccctgcaggggcgcgcggggccaccagggggcgctcgtgacccactgagggcgggacaggtcccaggagcaggtgccgggagaggtttcctttctcctcagctggaaaagtcaggtttatcttcgcaggactctggagtcttctaggctgtgatattttgttacttatatttattatgaattttatcattaatacttaaattttagtaattattaacattctacatattattatatttttaagtatatactttcaagaaataaacattcctaattgcataataattattgtaacataattattgtaacatataattatatcctaaatgcataataattattgtaacaatcacattctcattttgtatttgaattttcatatttattttactaagattttaattttaatataaaatatttttctacaattgtctgttttccatttttgtgagataaaattagcatatacaaaaatgcacagattctccaggtacagttagagggtttcaggcaaatgtgcacatacttgtctacagcagctaagtgagggtgaggaacaggtgaggtccatctccccacaaagtgtcctcttagtgcttccagttagttctcacataaggatttttttttatttcaactttataatttagatacagagggttcatgtgtggatttgttacatgggattactgagtgatgctgaggtttggaatacagatttcttcaccccctccctccatggtctagcagtccacagtgtctgttgctcccatatttatgtctatgtgtgctcaatgctgaggtcccacttacaagaatatgtggtgttcagttttattttcctgaattaatttgtttaggattaagaactccagctccatttgttttgctgcaaaggacatgatttcattctttcttatggctgtgtagtattatatattttacatgtaacacattttatatatccactctaccattgatgtgcatctgggctgatctttgtctttgccactgtgaataacacagcaataaacatacacatgcatgtgtctctttggtagaattatttgtttaccttgtagtgtataccctgtaataggatagctggttcatataatatctccattttaagttttttgagaaatctccagtctgctttccaaagtgggtggactaatttatattcccattaacagtgtgtaagtgctttcttttcaccacagccccatcagtatccattggtttttgactttttagtgataaaaatttgagtggtgtgaggctgcacacctacaaccatatgatctttgataaggctgacaaaaaaacaagaaatgagaaaggaattccctgttccataaatggtgctgggacaactagctggccacacgacaaagattgaaactggatgtctgctttcaacatatataaaaattaactcaaaattgataaaagatttaaatgtaagacatcaaactataacaatccttgaagacaacgtgaaaatactcttctcgacaccagctttgacaaatactttttggctaagtatgcaaaagcaattgcaacaaaaacaaaaatagataaggagagactaatttgctaaagagttactacacagcaaaccaaccagctaatcaaccaaacaaacaaataaacaaacaaaactatcagcatagtaagcagacaacctacagaatgtgggaagttattcacaaatattgcatccaacaatgccctaatatccagaattgtattagctggttttcatgctgctaataaagacatacccgatattaggaaatttatcaaaaaagaagaagaagaggtttgatccacagttccacaaggctggagaggcctcacagtcatggtggaatgtgaaaggcacgtctcatatggcagcagacaagaaaagagaacttgtgcaggaaaatccccctttataaaactatcagattttatgagacattcactctcaagagaatagcatgggaaagacccacccccatgatttaattatctcacagggggtttattccacaacattaggaaattactgaagctccaattaagatgagaattgggtggggacacagtcaaatcatatcattctgcccctggctcctcctaaatctcatgtactcacatttcaaaatggatcctgccttcccaacagtcccaaattcttatttcagcattaactgaaatgtccgcattccaaggcctcatctgagacaaagcaagtcccttctgcctatgagcctgtaaaatcaaaagtaagttaattacttcctagacacaatgggagtacaggtattgggtaaatagagcaattccaaatgggagaagttggccaaaacacagaggctaaaggccccgtacaagtccaaaatccagtgggacagttaaatcttaaagctcaaaaaagatctattttgactccatgtctcacatccaggtcatgctgatgtaagtgttgggttcccatggtcttgggcagctatgtgcctctggctttgcagggtacagtctttcacccagctgttttcaccggcttgctctgagtgtccatggcttttctaggtgcatggtgcaagctgttggtggatctactattctggggtctgaataactgcggccttctaatcatagcttcactaggcaatgcaccagtggggactctgtgtgaaagcacccaccccacattttctttcctcgctgcccctaacagaggttcccatgtgggcccctccctgcagccaccttctgcctggacatccaggcatttacatacatcctccgaaatctgggcagaggttattaaacctcaattcttgacttctgtgcacttgcaggctcaacacaaaatggaagatgctaaggctcggggctttcaccccctgaagccacagcctgagttatatgtaccttggccccttttaatcatggctggagcagctctgatgcaaggaagcaagtccctagactgcacacagcagagggaccctgagcccagcccatgaaacaattttttcctcctaggtctctggcttatgatgggagaaccttccacaaaggtctctgacatgccctggaacattttctgcattgtcttggtgaccaacatttgggtcctcgttacttatgtaaatttacgcagctggtttgaatttatcctaaccaaatgggattttattttctattgcattgtcgggctgcaaattttctgaacttttatgttctacctcctttttaaaactgagtgtgtttaacagcacccaagtcacaccttgaatactttgttgcttagaattttttactgccagatacctggtatcatctctctcaagctcaaagttccacaaatctctaaggcagaggcaaaatgccaccagtctctttgctaaagcctaactagagtcacctttgctccagttcccaacaagttccttgtctccatctgaggccacctcagcctggattttattgttgacatcattatcggcattttggccaaagccattcaacaaatctctagagagtttcaaactttcacacattttttgtgtcttcctcttagccctccaaactgtttcatcctcagcgtgttttccaattccaaatttgcttttatgcttttgggtatcttatcagaagcacttcactcaactgataccaatttaccgtattagttgcttttcatgctgctgataaagacatacctgagactgggcatttacaagagaaagaggttgaatagactcacacttccacgttgctggggaggcctcgaaatcatggcagaacatgaaaggcacatatcacatggtggcatacaagagaagagaggacatgcagggaaactcccctttataaaatcatcagcaagacaggagaactcatgcagggaaactcccctttatcaaatcatcagatctcatgagactaattcactatcatgagaatagcatgggaaagacccccccccaccatgattcaattatctcccacggggtccctcccacaacacatggtaattatgggagcagcaattcatgataagatttgtgtggggacacaatcaaaccatatcaagaatgtataggaaacttaaacaaatcaagaatcaaaagacaaataaccccattaataaatgggcaaataacaagaacagacacttctgaaaagaagacttacaggtggccagcaatattttaaaagattctcatcatcactaaccatcagaaaaatgcaaatagaaaaatgttctaatttttgtcattatagattgattttttctgttttgaacttatttttgctattttttaggtttatttatgtaatttcatgtctcaaggttttgtcattgtatatatacatatgtatgtactaatacacatatgaatatttcatatctgaatcaatccataacatcagtaaatgacagtttattaagtaaataaatcagtttattatgtgaaataatgacgatatgtatatttgttttcctgttgatgaaatttaaatttgtttccaacataaatattataagcaaactgttataactatttttgtgcaagtttttctgtttatattctcacatattgataaaatatgtagaaatataagtatgcttttttattataagacttacattttcagctttatggagctaaagttgacaaataaaattgtatgtatttaaggtacaccacttgacgtattgatatacatgggaaaatgctggatggtagataagtaaacaatgctaaacagcactaattatcagggagatgcaaattaaaactgcagtgatatttcttaaaccagtcagaacagctactattaaagagccaaaaataacaggtattggtgaggattgaaggcaaaaggaacgcttggacacttgtggtgaggatgtagattagcacagcctcgatggaaaacagtatggagatttttcaaagaagtaaaagtagaactactttgattcgataaccacaaataactacctaaaggaaaaataaatcattatatcagaatgataagcagacttttgttttcctgcagaactattcataatagcacagtcatcaaacttaggaattaacctatgcctaacaacagatagttttataaagaaaatgttacatatatatacatttaaatactatccagccatattaagggatgcaatcatatcttttgcagctacatggatggaattcatcattattttaagtataataattgagaaacagaacatcatacaccacatgttctcacttataaatgagagtgaactcatatgtgcacaaggacatagagaaaggaatgatggacattggagactcagaaagatgggagagcaaaaggtgggagaatggtgagaaattacttaatgggtatgatgtacattatttggatcatggatatgttaaagccaagactactatgcaatatatatatgtaacaaaattgcagtcactccccataaatttatacatataaaataaaaacaaatacaattaaaatgattaacagttgataaacaatactgaaaattaaaatttgtgatcaataaatgaaaataatattagttgaacttcaaattttaaaacattttctactcaagtgactatcaagaaaattaaggacaagctgcaaaggaaaaaatatttgcaagtcatatatctaccaatgtaattataacaagaaccggcaaacctcaaagatgtacagatgacacatcagcataggaatgtgattttccaccagagaaatgcaaatcaagaccaaaaggagacactactatagactttctagaaagacaaaaaataaaaaagaaatactgacaatatcagagttggtgaggaagtcagtcaccctagagactaatatattgctagtgggaatgcaaaatgaaaccgtttctgggaaaatcatttacagtttcccataaaattaaacatgtccttaatccatgacctagaactctcactcctaagtatgtcctacaaaggattaaaatcatatgttcacacacgtattcagatgtttaacattgtgtgtgtgtgtgtgtgtgtgtgtgtggtgtgtgtgtgtgtgttagaaactaaaaacaacatggacgtctttgaaaatttgacacaaaccattacaggtgaactccagactttcttctgagtgacagaaggcctgcctgaaagatccccagagacacagtcgtggatttcactgtcaccctcgcatgtcactggcttgggctgggctctctctggctcttccctgaccaggaccagatgttgagctccactacctgcagttggaagtttatattttcaacaatgcactgaggtctaagttgctctgcagatggaaccaaacaaacatgggcgcctttgaacaaacagtgcctgacatttgtactgaccccaggagaactcttcccagctctcattcttcttggttctctcctgcaggccagcagccctgaagtttagcctggatctcccatgcatccacccatctccttccaagtgcattttaccacagcctccactgtttttgaagcactcttgggctttgtaattctccacactctgttgtaaaggaagtcaggtccttcaagaccagattcgggactctattttatgaccaaatttcagcctcacccctgctcctgagagagagctcctagataagattctgcaggtggagattaggagtgtttttcttcttcaatgtagttgctgagcgctcagtgcagggttggggagaaactttccactttgtcagcatgcagctcctgctggggtagaccttcttccatagaagcagggttgggaaccagggggccaatgtcctcagtgctgctgcacccagggcagagccttcatccatcagtggggctgtggaagaagtgagtctctggttctcagtagctcttgtccagaactgagcctctgcagcatgttctgtcggccccagtgtcctggcccctaaggagcagcatcctaaaatgggagctagcatatttgagaataacaacacctacacattcagaagctctttggctttctttccagctaatataatttccttttttttgtgtagcaacctgtacacacgcatattgatgcatacagacctatgacacttttttctcgataagtaaaaaattattgatcactgtgatcttttctccaagttcaccatttccctgaaggtgagcacaggtccttctgcatgtgttcaaacaaaaggcccagagactacctggtaagtgaggtgctcacctggttctggatgtttggtctgtctcctcccctctgttgccccacacaaggtcagcccactctttccaggtccgaagaagagagcacaggtttgtcctgattatatgactcacccagcttctgatgactctcctgttgccagcgtccatggcctcagtgaaggtctcctgcaaagctctggatacaccttcgccagctacgacattcactgtgtgtgacaggcccctggataagggtttgaatggatggtagggagctactctggcaatggtaacacaggctatgcacagaagtttcagggcagagtcaccatgaccagggacacgtccacgagcacagcctacatggagctgagcagtcagagatctgaggacatagatgtgtactactgtgcgagacacacagtgtgaaaacccacatcctgagagagtcagaaatcctgagggaggtggcagcagtgctaggcttgagagatgacagggattttatttgctttaaaggctttttttagaaagcgaggttaattcattacagaaaaaaggaaaatagaaatgtgtatggactctaattatgtgggaaattttccatacaacttttgttctctaagcaaaattcagggagtggaaaacaaatcaaattaataaacctgataaaagaattcctctgaaaatttagtgtgagcataagtttttgaatgggtgttgtaaatattttggaacacagctgctagatcacattttaactctacacttatctccattatataaaatatcaaaatgttttaatgttttccattttgtgcaattataattttgtgttataatcacattttaacactttaactctacacttatctccattatataaaatatcaaaatgttttaatgttttccatttcgtgcaattataattttgtgttcatgccagcaatgcatgatagatcttgttcttccgcatcctcattgccatttggcactaagagtattgtgtattttaatattctaatagattagtagtgatagctcattgctgtttaaatgcacatatttctaattaaaattttgtatttaattattttatataattgtgatgaagtgtctcgtatggtatttggattattttttattgcattgtttctttttgatcagttgtaagtttccttatatacccattatataagtcactcacaaagttaacaaaaaattgattaacaaatatgtgttttacaagtgtattctccaaattgttgttgtcgttttactcccatatcagtgtctgtgggagaaaaatatttatatacatatatatgtgtgtgtgcatatatatatatatatatatatagtgtgtgtgtgtgtaaacttagataaaataattatttcataaatcatacttttggcatcatatctaaaaactaattatgaattccactaacaggatttttctcttgtctccaatctcaggccacaatcacagcataagcatttaaatttctcctatttgatgagaagattattaacttaagatgtttagaattcttctgaatggaaggtgccttttttctaattttctgtattcaataatctgttaatatcagtattggctcatgaatgtttattttttactatggagaagatctagtgctacattatttattttatcgctcaaatcaccacagcttttttttaggttctgtgagctcatttagtttggattctgtatttttacagcatgccccatccttttgtttttgatcacttccctatttcctggtattacaagaaatactaagctcattatctctattatcttttccacacatagaatcagttatttctccaaggattactggtccctgatattaaagaattatattaaaacacaaaattatgatgttggatgtgtgtgttgttaatgtactgtcagtgtttctagaatctctaagctaacaggcctagaaaatgtgtatgtgtatattaacccatgttaactgacccatctaatctatttatgtatccaatcttctgtatgtttattgcatcaaactttagaacactggtatctacaatctactatgatgatacatgaatgtttcaagccttccttccttgcctgtccataccacctactgcaaagtgaggaacccctcccatcatttgccgttcattcaatttgttgtacaattttagaatatatgcgtcgtggtattagaattgttaacttgtacccctgttggaagtatgtttattgactagaataaagtgtttaagtgcagtttctttatactttagacttacagaacaccctgagttctaagttatataggtgagaaactttatgtgccaccttcttcagtgaggttatttgaaatatgttgtatacattttatttgacattctgtaaaagacaaaactgtagatgtcataaatatatgaggattttctagaaatttagagagagggtatgcattaggagaaacaggtactgtttgcaaacagtgaaattttttatgatctgcagtagtgaacacatgacacaatttgttaattctcacaattttatgatgtaaactgtgaatctaaatatatacaacttacaaaattatgtagcacatcatgaacatgcaaagtgtacaaaaataaaatatcaaatacatttacaccgcgtgggcagggaattgcatgagatgcaggcaacaaagaatgaagtaaccttccccatttgcacataagatgtttccattcacaagagacctttcttttatcaggttcatgtgcaaccaagtttccctgctgacaagcatttaagccagatgattcgcaacttcctttgactgagaaagatttccctcaaacttcagctcagtgcaggcacacaccatctctgaatgggcatttaccatcagacaatgcccacacctgtccccacatggacctttccctcagacaaacaaacacatcctcaggttgactcttccctcagacaagcacccctgtcttcatgtgaactcttccctcagataagcacacatgtccccacattgactttttcctcagacaagcacatatagctgacaacgaacagttatgtggcaaaatgagctcaggatagtggtaattatggactccagctctgatagtttgtagaaattgtcatttttaaaattctgactgaagactttcctttattgtagaagacagtcctttacagctctaattgcacagcctacagacaggagtccatttcctctgggcaaggtttatttttatttgtttactgtacttatttgttgataaatattgatactacaaagatagcctatagggtccacatacgagaaaaaaagagtaatgggcagatcaaccctgcaaatccagtcccaggagtctttgaccctgccctccctggaatccagagacagagatgggaagaggcctgctgagcagtgcactcatgtccccagggagaaagacatggaaatgaggcccctcctctgcaaatgaaaagtagctcatcccctgttcctgtagatcctggtgaggagccatcccacatctgtgcccttcctcagtgtccacaccatggggtctgtgcagatctgggctgctcttgtcatcactctcaatgttcaggttccccgtggatcaggccctgctgtggctgttgcctctgtgttttcagaagtcccctgtgaagttaactaatggagttagacagagaaatactacagaccaggaattctgccttttctgcaaagcctctggattcactttcactgaaaacagcataagcttgatccagcaggcttcatgacaggggtgggtgtgggtaataacaataattcaaatagaagttctcagtgggactctccttgagtaaaaagatgattaacaatcctcaaatacactcagttcaggagattctcttttaagatgattaacctgagagctcaggaaaagtccgtgtattactttgagggacacagtgaggggacatctgtgtgaactcagacaccaacctccctgcagggagacaggaggggactgcctggtagatgcttctcagaaccaccagggggtgctcaggacatcagggggcactcagaaccatcaggggatgctcaggacaccagagggcactcaggacactggggggggggtgtcactcagaaccaccagggggcactcaggacactggggggggggggtcactcagaaccaccagggggcgctcaggacactgcggggggggggggggggtcactcaaaaccaccagggggcgctcaggacactatgagggggggtggtcactcaaaaccaccagggggcgctccggacacggtggtgaggggtagctcaggatagcaggggtgctcagaaccaccagggggcgctcaggacactggggggggggggtcactcagaaccaccaggggacactcaggacactggtggcggggggggggggggtggtcactcagaaccaccagggggcactcgagacaccagggagccctcaggacactagggggagctcagaaacaccaaagggcaatcaagacaccagggggatctcagaaccaccaggaggtgctcaggacaccaggggtctctgaaccactagggggagattaggaccccagggggctcagaaccactagggggttttcaggagaccagggggcgctcaggacaccagggggcgatagggacaccaggtggttcagaaccactagagtgtgctgagaaccaccaggggtgctcagaaccccagggggctgctaaggacaatagggagtgctgagaaccaccagtgggcgctcaggacaccagggggatctcagaatcaccaggctgtgctcaggacaccggggggtgctcaggacctccaggagcgcacacgacacaaaggatagctcaggacctacagggggcgatcagaacgccagggtgcgttgaggacaacaaggggctcacaggacacaacgacgtgcttagtaaaccgggggacactcacaaccaccgggggtactcaggacaccagggggtgcccaggaaaccagggagcactgaggacaccactgctcccttaggaggcagctccacatcaggtccctgagtgggagcagggaggagggttcctcttgtatcttgccactaacatgttgggagtttttctgcttcctttgtggtttcaattattggctgattcttcggtacaaagcagagcaagtataaagctctgctttcttggattatgtaatgtttttggctttggatgctaccagaattacattgtactttgagaggattcattcatggtgtgtgcaatagtgaatgaaacctgtaattttaggggtggctttgaaagctatgttaggtgtggctgagggcagtttacaggaaatggtcatcactatagaaggctactcatttctttgcacatttgcgtaagcaattgtagtttatgaattaaaaactgcctgttttcttggtcctttttcttaaatggtcccactctaagggcagtaatgtaatcaagctgtgtttcaaagatctgcaatcaagttaagtctgtttaatgaaatgctttgtaaagaaaatgtacatctattttttagagtcacctttacattttacattgctttacaaatattaatttggtaaatttagtctcataattatcttcagtaattaaaaatcttaaagtcatgtcatgttaaattaagtaatcctaggcttctcactgtgaattagggttactaaaaattagaatagtaagagagtataatcaatttatggtgaagtttattaagaaagatgaagatatgttttttgcttaaaaatattttgttttccagtttacagggcctttctactggttttaagatgacaaccactgtttacatctgacccttttttgttgaacatctgttgagtttctattgatattccacagctagagttttaaagtaaaagctctagtatctttgtattagtgtgaatgtgtgcttgtatgtattatgtacatatatatatattttttgttatgtgttatggctacaaggtacaaaattgactttaaaataaataactattttaaattaagtcaatgagccctaatgcatctgaagtacatgtaacttaaataaatatgtaataaataagctggcttcaaaattattggtaaaataaaattggaaatattttaacaattattagaatacctcatagtttatatcaattgatcaagtgattttatatttaaaatcacagctagatattatatggtgtgaaacatttctatgaagattataaaattattaacctagttaaaaccagaatgatctttgtaatttgacaaataagatgtttaatactgttgttttaataaaaaacaggtaaatagttattggaaatacaatcatttatttaataagaattttacttaggtaaacacctgaaattcatgggttataatatgggtaacagggaaaaaactttaaaggatgagtattactgttttcataaatgatctaggtaagctatttaaaaaataaattaggttaatgtaacaaaataaaccttttaaataaacttgttctacaatttaaaaatctaaagtttaattaaataatagatattaactaaatgtttaggtcattactaattgttttaaaaaatgtatactataagaaaatatttttgtaaaaaatttgttcttacagaaagattttatttaattcagaggttacttataaaacatcctaaacataaccagtaaataagagagatgccactgcactccagcctgggtgacagagcaagattctgtctcaaaaaaaaaaaaagaaaagaaatttttagacatagaggagtacttttggtatgaaaggttaaaataaaaaaaaataattttatatgagaaagaatcttgtaactttttatcctaaaataaaaatgactttatttaagaaacagtgatgtttagaataaaactatatgctcaagtatgccataagcgttttgtgtaagtcaaactaaggtttgtaaaaagttaattaattaaaataacttcatattatgaagttgactataattaaaaaggaagtatttataatagtctttatagatttgtagagatctggctttcatataaaaatatataaatatactaaagattggttaggaatgaaaaattgtgcttaaagtattgatttactcaataaaattataagatattttaattttttaacccaaaagtttaactcttactgcatcttgccagttttattttattctcttttgagaaggcttgagaggatctcaaatttttcatgagctcctctaacattttttttcttacagcagttagcctctaacgatgttaacttctaactgttgttagcttctaactgctattattgcctgatgctaaaaatcttttatattaaagttcttaataaaatgttttatttcaatatagtattctgcactcttgggtttttttaaatgtctatatttgtctatggaaccaaaatcttcacttgtaatccaagacacattcttcctatgtctaattaatcaaatactttgtttcattagagttgacttgcaggttatctgcatggatttccccacagggaaacacagtcacactgctgaaggtgttttttcccatttggtaactggcataaaacaaattttatattttcttgaaatacttcctctgtagctgtttttaagtttttcaactacttaggaatactgagattttgagaaaatataaattattgttattacgttaatgtaactatctggcataacttttaaaggacttgtcctgctacattactgatctttgattcctaggtctaaaaaggatacacaacactttgggaggcttcagagggtggatctcctgagggcaggagttagagacgaacctggccaaaaaggcacaatctcattttaataaaaaatacaaaaattagctgggcgtggtggcgggcgcaggtaatcccaactacttgggagcctgaggcagggagaattgcttgaacctgggaggcagaggttacagtaagccgagattacaccactgcactccagcctgggtgagactctgtctcaggaaaaacaaataaatacaataaaaataaaaaagacaccgagtcttgctaaattttaaactctgacagcaattgaagccccatctagagatgtggaagaaaatgacaataaaaattaatcacacacttaagacacaaggccggaaaattgaatctactcaaccactccaggcccagggactgttacagaagaagcggtttgtaagattgtaaaagctaattttgaaagatgaaattacttgagagtttctttatacagtaaacattaatattaaaggcacactaatgccaggctagtagctgggccatgtgtcagattgacaagggtttcttgaagaattaatccactttttaatttgaaaaacttataaaagtttataagagatcatttgaaattaaattttatggtaaaagtaattataatgtaatagatttatttttcagaattgagagacagttttaacttctctcatgctgttcttataaggggctattgtttagaaaattaattcttctctttgaaaaataaaagtttttgctttctttcaaaatcactgagttctcactgggctaaataaataacttacattacagcaatctgtaatcctattttgtaatatcaagcattgtaaacttttgatatttgacaaacttcacaaaataaaattctaaattcagtcatttgacctcattattcttttatgatattaggtccccaaagccaaaattaaacatattcagcttatttggtataattaaaatatgcaggaagcaatgtcaaatttgcaaaagtgtttaactttggactatatttaaataaatgtggactatataattggactatatttatataaattaaagagtatattttccaaaattgtatgagattcaagtgatttgatatgtcttagtatattttatcagtagtatttatgattattatgtaaaatttctgtttattgccagaaataagcaaatcttctcctcaattctgtctttaaccatggctattctaaaacttcagtcatccacagttggtgttttactttgattctttatcaggtggcttatagtaatctatagaattttgaggagtactcaaatatacgattgtgacaattttataaattgtgccattggtatagagattaaaacttccatgactctcattgatacctgattcatttatgatgattgttaatctaatattaagcaggacaggacttaattgcatgaactgaattgacagaagactgaaattgtttttatggcttattctttaatgcatttgctaattacttatgttctgttttttcagaatcaggaaaagtttgtcttttaagctcttcacagttgttaacaattgagtatggtatactttactgataaaaaaataaaaacataatatcttcttatttacataatttctccaaaatttggaaactgtgagtattcttatatcaaaatagttatttgcataggttcaataaaaacctgctttcttccataacagggcacaattggagacaatggtcattttactaaggctttaacttgaattatatattttcagatttactttataaaatgaatctaacctggagagctgataaagccccttgggaaaactggcatgcacatttttttttttttacagggccccgaactgtagtaagtaaacaatttaatttctgacagacccaggactcccaggttttcttggaaacttgaaaaaagagaaagtaacccaattcacatagctatctggtggcacagataaaatattggctgggcttgaagattttaaagattctaccctttgattccttataaaaaatttccagcaaagtcaatttatggaataaaattggcctatgtacaaacaaaaaatagaaaacaaaaagagagctaatatgttaaagggttactttggctggcatcttatacaaaaaaaccagggccaagtctcataagcctaaaactgattttacaaatagattagtcctactatgattttgtgtctaataaaattggggaattatagagagaaatattatttcaaaataaactatagtgcatcagttaatagattttaaccttgtccacttgcttttcaatttatattattttctacaatttggactgaattttaaagcgtatctttgcacgagtctccaaaataatgttttcagttatttccctttttaaatatttttcctggcttgaaatcagcagaagttaaactgtgctttcttacagctagacaatgtaaattctaaaagaaaacaaaatcaatgatatggtttggctccgtgtccctacccaaatctcaccttgtattgtaataattcacacattgcaagggtggaatgaggtggagataattgaatcataggggctgttttcttcatgcttttctcctgttagtgagtgagttctcacaagatttgataattttatgaggggcttccctcttcacttaacacttctctctcctgcagtcatgtgaaatagcatgtgtttgctacccctttcatcatgattgtaagttttttgtggcctccccagccatgcagaactgtgagtcaattaaacctatttttctttaaaaattacccagcctcgtgtatgtccttatagcaacctgaaaatggactgatacaagcaacttaactacatacgaagtctccttttgtacctgcctattgtgaagagaaaataaatcttgagaccccaaaatcactaagctaaagagaagagtccagctggtgtaataggagatagaaagaaattatttaggtagatagttaggatgaaagagtctctggcaaaacttttcttctcacaagaattagctcagaaataacttcttttctaatcagacacagttcaaagagatcacttctaacaaagagcagcctgaaagatcgggctgtaaaacatagataaacaactctggcagagagggtatttctgtgtgtaatcaccaaagttcacatacataggatgggtcccaataaaaacattgggtcttaatgagcacattcctttccttttctggggtcacactgagataggaaagctgttagcttgcacggggtttgggatgcctccagctgcaaggaggtaccagggacctggcatggaaactcctcccccctttttcagcacatgcatggtggaaggagataaggaacgtggagcagaccaagctaagtccccacctgcataataaaagcatgagatggggctgccagagacttcgctctctgcagatggcacacctggtcctgcttttgcaccttatgttgataagaagccatctccccacgagcacatttataaaaatccttacgttgataagatactgtctccccacgagcacatttataaaaatccttacattttactgcggcacagcaacccatctgggaccctttctgtgacagagagattttttttccttttacacattaaatttctgctctaacctcactctttgtgtgtctgtgtccttgattttcatagccacgacacaaagaacctttggtgatattccagataacaaaggtgctttactggagagggctttgggcaacctgcctcccattctattcaaagtgattcctctgaggcccacacgagacagatacatatctgattgcttcctcttcagtatcatttatgaaaaaatgaagattcactaagtctgactaaattgtggattcagtggtaggctgataaaggacttaaaataatgcaacctactgtgtcttatctacttctaaactgcaaaaccccctttcaatttgtcctgtcttgaaggaaaaaaaatgtacattttacatatattgattgatgtctcatgtctctctaaaatgtataaaatcaagctgtacttcaatcgccttgggcacatgtctcaggacttcctgaggctggtcatgggtgggttcttaactttggcaaaataaatgtattagtctgttctcctgctactaataaaaacataaccaagcctgggtaatttataaagcaatgaggtttaatggacttatagttccacatggctgggaatgcttcaaaatcatgtcaggaaagcaagggacatcttacatggtggcagacaagagagagcttgcacaggggaactccccttgataaaaccatcagatctaatgggacttattcactatcatgagaacagcatgggaaagtgctgacttactgcaggagaactacataattttatattttcctatatgcttctttttcattacacatgtaaattttcataccatccaaatttccccttacccagcttttcctctttatatattgaaagccctaaaaattgtctttggggaatggcactaaccacacacagtttctgtgattacttttatttttcttccaggcatgtcctggaaagacataatttcctttgggaaaattaattttaatttgattaagatctgtctcagaaaccttcggtttacactaggaaagatcccaaattaggagccaattactgtaaaaatcagccataccactctgtgagtgtgtgtgtgtgtggcggggggtgtatatgtgtgtgtacatgcatgttttcatttctgtgggctttaagccatgtagttctctctgcgaagatactatttggcatgacctttgaatagagaattgtaagagaaataagaggctcctatgaattatccgaaagtttctggactcaccatgtatcttgactgtgtcattgcatctgacagtcccagggaagtgactctctggtggtttcatgaatctgtgcttgggctctctctgcagtttactgggtatagtaatgacaaatcactgtttcaagagacaatttcgaaagcattagatgctgctgagagaggattatgaaccaggggacagccccttcattctgggggagcgacattgggagaatatgctctgtgagcccaaacagcttcctcccctgcagggtgagggcagagctgcaggacaggcccagaacccactcaacacagatgtcagccctggagctgctgcagaggagtctgaggagaaaattttaccagcacctgaattacacttatttcaaacaaaaatgcatgtcctgtgagtgtttgtttccctattggaggagttctgtactcatgaagttctggacatgccagcggacaaatatcagtaaacaaacatcagaacttgaacctcagcttcccactgttgcattctccatgtgtcatctctattatttctcatgctagatcaggtatttagctatgaaatattccagctaattaacgtgtaaatagcttgaagtctactgagttaaatacatatattttctcttgtttttgccaggtgttccctcccacacctccaatagtctccactattatcatcatcttctagatcttctgcgatgccctggagattaaggatttgattccatgacagagaggaggtgcatttcgatggaactttggtgaaaaccttggtctttatcccatttcctctggggctccaccagtgcctctggaatcatggtttcagtggcttgcccctgcatggtaggtcattcctttattctgtagtgctgatgagggaggtgggtctgaacgcatttcagtagtatgggctctccttctgtctcagacactttgggaaaggaaaatttttctgagcgtcctcattctagaacaaagggattcaattgtataggaatgctgaaaatagaaaaccttcagccaaattaaggttaataagattaattgagcaatggatgattcatgaattgggcagcccccagaatcacagcagattcaaagagacttcagtgcagtcacggggtggaagaagatttatagattagaaaaatgatgtacagaaatcagaagtgaggtacagaaacagctggattggttacaggttgcttttgtcttatttaaacaaggtgtgcaccctcaagagtgtacgagtggttgaggtatggctgctggaattggccaagactccgctgttgttacaggcgcatgctccgaagttggcttttcaatctcgtccacctattcaggtaggttacagtttgtccacaaggactcaaacacagaagtacggagtccttttcaggccatatttaattcactttatcagtgcccttcagtatgtggttcctgagaatttcacatgacaacacgtttaccacactggaatttaagcaatccaacacgtttgtagctttgtcttgtaatgggctatatttcatgtggcagcctcggcctcagtttagctaacactatggcttcatttctctctacaagaactcatttcttccaagatttccatgttcctgaaaggaaaataaacctttgggacccccatatcactaagccaaagggaagtcaagctgaaaattgtttggggcaaacccacctccattctttccctaaaatgagagctactaaggtttttaaaagctacagacctccttcaaaatttgaccacaagtaaaatccttgtggacccaggacagagagagtcatttctctgctcatgtaagtcaaacgcatacctgattgctccctgtgctctactgtttcactaaatcagactaaggcctacgtgactattcctgtaaattgtgcattcagttaaaggctaatcagaaactcaaataatgcaaccatttctctcaaacctacctatgatctagaagccctctccccacttcaagttgtcctgcctttctgaactaaatcaatgtacatctgatatatatatattgattaatgtctcatgtctccctaaattgtataaaaccaagctgtgcccacaagcttgggcacatgtcgtcagcactccctgaggctgtgtcacaggcatgtccttaatcttggaaattgaacttcctaaatctattgagattagtctcagatactctttggtttacaggtttgtttttatttcataacttcaattatttgacatgctaaagaaaatttgccaaatagcgcattctcttgtttatgtgttattgttgttgcaaaaataatatattttatatataatttatcatctatgtacattaccaaattgagtagcagatttattagtaagacccaaagtaatgaaaagttcagataccaattagcaacttagaaaaacaaattatgctacatttgtttgctgaaatgctacctattatttataaaaaataaacaatacaacataaaaggtttaattctcagtatttctattgagaaaaataagccaaatagatgagtacatactatattatttcattcttataaattctagagaataaaaactagtctaaagaaatatgaaaacatcagtacttttataaagaaatggtagaagaaaaggagaaaaacaaaaatatatctataaaagagcaagaggaattctgaggtgagttgacttgtcaccttcttgaaaatagagactttctttatcaaaatttactattgtacaggttaaatatgtgaattttatcatctgtcaattaaaactcataaaatttattacaagtaaacaagtgaaattttagacaaaaaagggatgataagaaggaacaaataaatacattaaatgtcagatacaccaaaaatgtatctgcctgacgcctagttgtctctgtatttttaggtaaatgcagcaaaatcacacaggttgtcgtggcaggaagtggattctgcaaaccacactaggccgtttatctctgtcctgtagttggttcagagcaactgaggccagctgtgaggcgcataggcccaggtactaggactcactcatgccagatataagccctgagacacgtacatagcccctccatgtgtgggttcacttttacatctgtacatgaagaaaccactgactcctaaataacatcatctatacacataggtaaaaaaattaaaaatatgatagttgttaaatgtttatcgcagaacaatttcaaaataaggcagcattttcccaaatacaatcattgtcatcaaaatcccccaggacgctctcatctactctgcgccctgccttcacctcagatgtcccaccccagagcttgctatatagtaacagacatgcaaatagttgactccctctcctgatgaaaaccagcccagccctgaccctgcagctctgggagtggagccccagccttgggattcccaagtgtttgtattcagtgatcaggactgaacacacaggactcaccatggagttggggctgagctgggttttccttgttgctatattagaaggtgattcatggagaactagagatattgagtgtgaatgggcatgaatgagagaaacagtgggtatgtgtggcaatttctgacttttgtgtctctgtgtttgcaggtgtccagtgtgaggtgcagctggtggagtctgggggaggcttggtacagcctggggggtccctgagactctcctgtgcagcctctggattcaccttcagtagctacgacatgcactgggtccgccaagctacaggaaaaggtctggagtgggtctcagctattggtactgctggtgacacatactatccaggctccgtgaagggccgattcaccatctccagagaaaatgccaagaactccttgtatcttcaaatgaacagcctgagagccggggacacggctgtgtattactgtgcaagagacacagtgaggggaagtcagtatgagcccagacacaaacctccctgcagaatgcctgggggaaatcagctgcagggggcgcacaggacccactgatcagagtcatccccagaggcaggtgcagatggaggctggtttcctgtcaggatgtgggacttcatctttttagagtttctctagggaacctctctaagttcagaattctgtgcttaccaatgccatccctacatatttttaaaatgattattttaatatgaaaacctattctcttatgcacgaaacacagactgatgcttacagagatgaaaagccctcaaccattgtcaccaggatcagagtattgaggaaactcaggggtacctggtgggtcttctccactcagactcaggacagaaacctcagtgagattccctgactaggacggtctttaggaattgtgatcgcagccaatagagagtctgggcaaggatcagtgtcatgtagaacttcacaggtttcacttctgacccttctcctgacactaaagtatacaacttagtatcagcactgatctggggccccttttgctcttagcccattctatttctttttatttgttgttgttgttcttgcttttccttgtagtgttcctgctccctgtaaagtggggatgtggctcttgctgccaaagctccaggtctcaagcccattccctgcagctcaggtggggctcaggctgtggctcctgcagccacgtggaagaggctgatgggactttcctctctcccattgctcagcaccctccagtgtgtcacgtggagactcacctgcgaatggaagtggccaacagtagtgaaggggatgagcttgtgtggacaaaatgggatgtggatgtgaaatttatcctgtgctgtgcaaagtagcacagagtgagtcaccttcctcaccagtagtgttagaaagagggtgtgaaagttgtcagaatcaaaatagatccacttgtgttaaaaccctgacaaatggaactaggaatgaccatgaaggaggtttcccatgcacatactcctgataacaagatcgaccataaatggattctgcttaaccacaacctttgatagaagccaccatgaccttataaaaatcacttctacaaggacatcttcccagcaaatcacggtttaaccctatactgatgccaaccttggtattgactctacaagcaaggaaaatcctctcaaaacaatttatgcaacccacctcattttcactcataaacctatggattgacatcctggagccactgctgcatttgttgttactggtaattagccccttttacaatatttgtgactgtttttctccgatgtctcttggaaaataaataatttacaagctgatggcagtaaagaaactatttaggacatttttaacatcctgttgaatatttctgcatagcacatcggtcccctaaaatacttcgctgtattggcatgtgatgaatcagagtataatgctgaaggtaaaatgggaaatacatgggcttttgatgaatcaagtcatagggtgagaatgtctgtgtccttgaggaaggagaccttgggctgtaagttctagtgggagtacctttggcaaagggatttcatgagtttctgaacgttatgctacttttaatttaagaatgcaacttatcatttatttttacttaaatctttccagaagatatttggcagtaaggacagggtagcattcgtgtgatactgatgacttagagagttattttgtaatttctcctgtaaggtatgcacattgctcacttgatacagaagttcaaatgtcacaggcgggaaaataggaataaagcaaattttattaaatgtcacgactgtagtttttggcaaggaagtgcttcatgtcaacctgaaaatagacagacaacaataaaacatattcaaatccaaagggagtcagacctatgtccctctctcttataagtacaaggctttgccacatccaaaatatcctttaggctccagggtataaaatgcttttggactgtgaagctaacagctctcccctcagacagggataaggcatctggggaatgcagagttgtgttcatgaagaagatggcattactgtgtcttctcctgtgcctggtgatggctcccccagggtgagtgactcggatgtcagatgtgggtctatggggtgagtgtaggtacatgtgactgacggggactgattccccatgtattcacatgccctgtcccaggagcagctgcaggagtcagccctggacctgaagagcacacacttaccctctgcttcacctacaccatttctggccactccatcacaaccagtccttactactggacctggatctgccagctctcagggaggggctgcaatggatacaatgcattgctagtggtggtgggaatccatttgtcttgtggaaaatggcagcatctctttattttataaggcagaataatgttatattgtgtacacataccacattgtctttatccatttgtccatcgacagacacttagtttccatatcttggctgttgtgaatagcgctgcagtaagcacaggagagcaggtatcttcacagggtggtaatttcatcccatttaggtgtatttccataagctggatcgctggtcatatggtatttctgttttaatttatttagaagccaccacactgttttgcataatggtaatgatgggaatgtagaatgtcatagccgctacgaagaacagttttagatttgaggtataatccaaaagcaaataatgtttgatcatggttctcatatgaggctctaataaatctagtggaagtccagaaagttttcccaccttgggcaaggatgagtttgcccctaattgtctttgaggcagaatatttgcagaatgtgagatggagtatgtcggcaggattcaggatgattcagccataaatagtaatggcacagaaaaacagggagttagagacatgcagagaaagaaagagatagagagaatatgaatctcataagaggaaaatctgctggatatcagtgttgggttttcattcatagagacatcagtgtcagcaagaaaccatgaagtcaagtgaggagtggagaacatgttcagtctgaaaatcagcatattctcagaggcacccattgtcccatgacacaggcagagaatttcggaaaccagtgaagtgggagttcacaataagtgatgaagttatcatttttccaaactttcattaatatgcaaagtatttctatagatcactcatgcacatacacacaaaatgtgtttttgcatttatgggtgtctagagaaaaataagtgagaaaatttttccaggttgcagagatctgtttaagttatagattccacaggagagtgtctttgaatgaatactattctattaattaaataggacaaaattccctctgttggagcagccttccaattatgtagatttctttattgcttcttgagttgtgaaacataaacccaaggattgacttactggaattcgagtgctgtgttgataaaatttctgataagttttcttccaatgatttgagaatagctttcctgtttttttactcaaggaaatgaattttcacaaggtttcaggacatcacgtttcaggtgttttacttaaagagactcttcctgggtgcagtcagctttcttctaaccatgagctcacttcttcagcaaaccattcagtttgtgcctctattaagaattatgaagcttttaaacttcaatgcactgaaaatcatgccccttgaattaaatgttgattggcactgacatgaattgtccactcttggatatgtgtcctatgttatgggctcaacatatcagtggactgagaatcctccattagctgcctctgactgtggcactgaccagattgagaatcctcagagtcatccatgaaaaagagagtctttaggttcatggggtttttggagacattcaggtgagtggaggggagaaacaggactgggggtggccagccatttcaacaagactgggaaagattagcatctaagtttaaaggtctacatcattccaaacaccctgcatgacaggctgacaggaagaaatccaaccccacagcggctccatagcatctctttagtatacttggtagtgaagctgtttcagggaagaaacgtccactcaagggagtcagtgatgcttctctgagctacaataaacagtgtattggacccaggtttctctgagttcaatgtgatgattacactcagctgctgctccagtgagtttaaatgagcatgtggcaattcagatgagcctggctgtgtggtatgttatatgtaaatcggaactatgtaaacataaagggcatgtcggaactagtgtgagggtgagagatcttagaggccccacacctcacactcttgtgcttatttgctccaggaacctccaggttctttgagtgaaaatcaacatagatcctttcctggataaatcatccaaatatctaatctctgagaaatacacatgcacatttctccggatagaccatccaggggaaagacatatctagaaccttatctgtgttgggtaaggtagtccatctccattacagaccctcccagcagccttcctttatcatgaaagtggataaaattagccaatagagaaataatcctataatgttatagccagaaaagggaaagcaacagtttcatttctggagactctgcgtataggtcacagcccagagaaagaaaggatgactgaattattaagaatcaattgtaagaacatataatacttccaggatgcacactttgttttctcaccagtataatctgggttaaagatgaaagtgtggaaatgcacagactctatgtgaggaggagaacatagggaaactgaaagacaatggcagagaataagacaaggacagtaggaaaatctgaagcctctgacataaattttttgaagacaaggtcttggcaaatccattgacctcagattcttttatcatggggcatttgcagggttcctagctgagaaaaaaaatgcatgcacttcccaagtctccacttgtattctgtttgcctcagatcgctaagtgaaaaaaagccataaacctaggcctagtgtgtgtgtaggaggcactttttataggctagaaaatagtaagaaaggagaatatgtgttattggaatagcatatacaaaggtgtctttattctgaatttatctgtacctgcagatattctcaggtgcaacattcaactgcaagagcccagcgaagaaactaggcactccccaaatccttcaagtttttgtgttcattgtgtgtccactgactcaggaaatgtgaagcttcagaaaagggggtcccttctgtgtcacagaatcttgtctgtgggtctccctctgtaggtttagtaaggctaatcaattgttaaaagacatggtgtcagcagcctgtggtgtcactgatggagaattctaaaccaggacacagccacttcatgctgggctagagactctgaaggaaaatatttgtgagccccgacagaaacctcattgcaaggcaagagcttctgtggaagggggcacttgggagccaccaagcgcaggttccagccctggagcaggtgcacagctggggaggaggtttcctctcagtgcctgtgttttcgtttgtcaggaaaaaacaatctaaaataactgttcaaaaagtcgctgatgtgctttaaatattctatcacatcaaaaccattcatataacttaaggcactggggaactattttttaaagtgggtttctagaactataatatcttaatagtgagaatatgaaggataggcatgtttttactaattctatgggtacagattagttgaagaaactacattcctatgaataagaaattcagatttcagtgttaagtaatgttgcttacattgtgtgagtgacagggcagtggtggatctgagagtgtggcaggtgcacagaccaagtgagtcagaaatcaatatggaaaggtgagggtctgtggatatgaactgaaagtatgtaaatacttgacgaaatactaataaatggagttcaaaataacccaaaattgttctaaacacaaattccttgacaattactttgggagtagagagttcataatggactccaaactcctgctttatcttctgattcccattgtctgtgagatgagaaaatcagctctaattatgcatcacagggcaaatctgtaaatcaagagtgttcaatagaattgaagaccctgggggatcaggacatgaggcaggtgctggagacagtgtctcaggagcacccagtagatctcagaggtccctcctggacactcatgtgggacgtaagcatcactttctcagagtcaccaatgagctgtgctggtggctgatgggtccaggaaaagaccaaggcacctgctcagtgtgatggagagtgatggttccaaaaatgatccaggtggtctctatgctaatcaaatgtaggctcacagtgaggagcctgttctatatgggcttattcttcagtgaaaggacgtctgtccacaaatgtttgtaaatggagcagggcatgcatttcctcaagcaggattagggcttcgaccgtctgcatctcactcttgttaggctgatgtgtcatttatcttccctttcttatcatggattgggctttgagctaagaaaggctttgtcttatgaatatgcaaatatactgatatccactgaggtaaatatgttctgtgccctgagagaatcacctgagagaatcccctgagagcacatctcctcatgggctggacctgcaagatcctcttcttggtggcagcagccacaggtaagcagttcccaggtccaagtaatgaggaggggattgagtccagtcaagggggctttcatccactcctgtgtcctccccacaggtgcccactcccaggtgcagctggtgcaatctggggctgaggtgaagaagcctggggcctcagtgaaggtctcctgcaaggcttctggatacaccttcacctactgctacttgcactgggtatgacaggcccctggacaagggcttgaatggacaggattttagttatttgagagatttttcatacaacatttattctgtaagcaaatttcagggattgttgaatgaatcatattaacaaatctgacacagaacttcctctgaatcaatctttgtaaacatcaatttctgaatcaatgttgtaaatatttcagaacacaagcacaaattcacattttaactctacttttatctctatttaaaaaatatcaaaaaatctcattttgtgcatgtaacgttttgaatgcccaccatcaatgcatgacatttcttgtttttccacattcatgttaccatttatcatcatgagaattgtgagttttagccatgctgataggtgagtaatggcatctaatttttatttaaatgcacatgtcccaaataaaaaattcgtattaagcaatttttatataatttttgctgggatgcctttcctgatatgtggttcattattatctgcattgttttcttttcattagttgtaagtttacttgcatattgattataaaagtcacttaacaaatccaaagaattgatttaacaaatagatgacttggaagtattttctcccagtctgtggttgtctttttctctcttatcagtgggtatttcaaaaaatatatgtgtgtctgtgtgtctgtgtgtgtgtgtgtgcacagatttagacaaaaaacataaaaaattattcattcatagatcatgtatttggcattatatctgaagtctcattataaaatacactaatagtgattatttattccatgttgctaatctcaggccacaatcaactcatgagtgcttagccttcacctattgattggaggactatccacctgagatatttggaatacttccatgaggagatgtgttcttcttcccatcatttctttatttaatcatctattaacatccgtattggtttatggacatctatttcatactctgaagaagatccatgctacattattcattttcttgttcaaatctccacagctttattaggtgctgggactcatttagtttggatcgtgcatcctaacagcaaagctcatcttttgtttttgaacacttccctgtttcctgatattaggatagattctaagcttgtttctttatcacctttttcatacatagaattagccatttatataaagattgcttgtttctgattttaaagagtagtgttaaaataaaatattgtgataatgggtatgtgtgttgttaatgtggtataagtacttctgggacctctcaaccttctgttctagcaaatgtgcatgtttatatgaatcatgtcatgtccatatatccaatgttgaactatgttgcgaaaagtgatctcaagataatggtaattatcaaccccctccctaacaaggtgtagatctgcatttttttttcattgtaactcaactttgcctcatggtcaggaacagtggtttccagctctaaatgtactgattacagcgagatgtccgttttccctggaaatgtatttttaagttcttactggatgtatatgatgataatgttttctactatgaagatacctgaacagtgtccacactagagagtaagaaagagtaatgggcagattaaccctgtgcatccagacccaggaatcctctgatcctgccctccctgaaacggagacacagaggatggatgagcaatgctgagcggtgcacccaagaccacaaaaagaaagacatggaaatatgtcccctcccctcctcaagaaaggcagctcatcccctgttccctcaggcccgggcgaggagccaccccatgtctcttcccttcctcagtgtccacactgtggggtctgcactgatctgggcttcccttctcatcaccctcgtattagtggcccttgtgaatcaggtccagctgtggctgctgctcatggggctgctctcagtctgatctctctgtgtttgcagaagtcctgtgtgaagtttactgatggagtcagagggagaaagattgtacagcccagcggttcactcagccactcctgcaaagactctggatcaccttcactgattgcagcataagcttggtccagcaggctccaggaccagagttggcgtgggcagcaacagggagaaattcaagaggaagttcttacatgcacccttacgtgcacggtctcactgagatctttacttcctttatcacgtttgttctgtaaatcacaacgaatggtgcattcttcatctattatacacttgttaagtcttttttggcatcttttaaaaaactggtaactttatcctgtgtaatatccctgttaagtcctaaaagtcttttttgatgtctattttttcttaactttacacagctactatagatttattttggttcatatttttgtaatccatgttttctcatctttagtttttacatttgtgaatacgtacagtaattttctaatacatagcttctagttggggcttgctttttaaaatcaactataataagctctatttttaaactaatattatttttctgttacattgtttaaattagcatttcacaatgatgtttatttctctactaacatataatctaattcacttttataaatattatattggttaccataagttttacaataagaattgtatataattagattctataagaattgtatataattggattctaatgcagatactgtgatggccttgatatgaagaacagagacagtgtaactgtgtgctttgaattcctccttctcactgctctttcttgtttattcccagtttgcacttacatatactataaaacataatatataaattttttattcctttcatagttatataatatagcaattacaaagataaaaactgcacttcatcttgattttcccattttgtacagtcttaatttcttcgtatagatttatgttttgaatgtatatcacacggctactagcagagaaagtttgttaaaatgtgcactgaagcatgaatgtgctgacaataaattgtctcaagatctttttgtaatgacagaattttatttgcctttcacttttaatgaaaatgtaatgcacatagaattccagtttgcatttcacttgtaatttattttcttgtgtttattattttgttcatggagatgatcacacattacattctgctgggcctttattaaccacatttctatgaacctagtcagggttggatttcaagtgtatggttgccacggctatcagagttgaagtcagcttctcctgttcacaaaaagttcaggttcctccagtgatacccacttttgtgtcccggtttggctcttcccatttctttctccccagagagagcctgtctctttcatctgtggcaggtgcatcctgctgacacttttacttggtgattgtttgtggggtgaaagggcttggacacagggggatgttctccaaccttctgaccaagcatccttcttagctatgggtggtgagaatggctctgaagcatggtcttccaagcgttcctgttccttcccttccccaagtcagagtgtctctttctagccacagtggtcttccatcagtgtcctcagcttctgacccactgtccttactccacagactcaggatttcattcctcaggaaagagacgggaggtgtttctgggtagagtctccttagtgtcctctgtttccttctgttctagttgattctaccagtgcctgaaggacacaagatttaataaatgtctcccacatatcgtgaagagggattcagcattgaacggagctactgttcttcctccccagtcaacatcacaggacagcaggtggctgagttgtctggggatttctccaattctgtaggaaaagcccgcaagtgccaggagtttcacactctcacagcattagcacacacatcctcaacaactcatgaaacatttccaggttagctttttcctatcttcaataccatacaatgagtggcacctgccccaggtactctaataaatggacctagttttctctgcaggctccccattttctcagatttcaggggtttttttctctgcaacatcaactcagatatgttgaagggttcattttttgtagttcttcaagtttcttgttaatgaggtcagaagaagatcattttctcatttttttttttacattcccgtgcttagtatctgctttctaaataaaattcggaaactaagacaaaatatcaaatatccactatttggtgcattgttaaactatttgagaaatattcatgtactgaaatacaatgaacaattgaaatcaaggcatgcctcagtcacataagaatgtgaggacattatcaaataattgtgctgagtgaaggaagctaaagaattcacagtaaatctcctgtgatttcttttgtataaattgtagaaaatgcaactattctaaattaacatggagaagatctgaatttttctgagaaaagtgtggtgaggtaacaagatggtgaaataaaattacagagaagtgagagaaaaaaatttggaggttaatttaattgctaatagcacgattgaagtgctgattcaaaggctgcacacatataccaacattttccatatcgtacactataaatttgaattcactattgattgaatttttgaataaagcagtaacaaaaatgagtatattggctgaggaagagcaagaaagagatgaatattgacacttgaataatcacggactcctgaaaatacacacatgtgaacactgattgcatatttcaggtaaatactagaaaaagcaaagtcacataaagtcgttatgacaggtgggataccctgcaaatcacactaggcatgtcccacactgccctggagctgtctcaggggagcagtctcctccagtgtttagaggcacaggcacggataatagggctgacgctgtccagatgtgtgatattggacacattgcacaactgctctgttatgtatgtaattcatcttctctaaaaatgtaacattgacacttgcactgaatatattctgcaaatatgtaaacattaaataagatgatgactgctaattgatcatcaagtcacaatcacataatctgaagttatattttcctgagagataggattacctccagtgttttccgggaccctctcatctgctctgggcactgccctctcctccagcgtcccactagagcttgctatatagtaggagacatgcaaatagggccctccctctgctgataaaaaccagccgagcccagaccctgcagctctgggagaagagccccagccccagaattcccaggagtttccattcggtgatcagcactgaacacagaggactcaccatggagtttgggctgagctgggttttccttgttgctattataaaaggtgatttatggagaactagagacattgagtggacgtgagtgagataagcagtgaatatatgtggcagtttctgactaggttgtctctgtgtttgcaggtgtccagtgtcaggtgcagctggtggagtctgggggaggcttggtcaagcctggagggtccctgagactctcctgtgcagcctctggattcaccttcagtgactactacatgagctggatccgccaggctccagggaaggggctggagtgggtttcatacattagtagtagtggtagtaccatatactacgcagactctgtgaagggccgattcaccatctccagggacaacgccaagaactcactgtatctgcaaatgaacagcctgagagccgaggacacggccgtgtattactgtgcgagagacacagtgaggggaagtcagtgtgagcccagacacaaacctccctgcaggggtcccttgggaccaccagggggcgcccgggacactgagcacggggctgtctccagggcaggtgcaggtgctgctgagggctggcttcctgtcgcggtctggggcggcctcgtcgtcaaatttccccaggaacttctccagatttacaattctgtactaacatttgatgtctctaagtggaaaacgtttttgtcctttttgtttctttgtttttgtaacaagaggaaacatcctcagctccacagaagccagggtgtcactttggggacagaaataatcctttcatggtcaccaggataagagtcctgaggaatcccagggaaacctggagagtgttttccagttagactcagggcagagacctccatgggaatctctgattagaacaggccttgagctctgacgggagccaagagagaggctcgcccagggtcagagtccttaaaacctgatggttttcacagctatcccccctcgtcttgtaaactcagactgattcagttgaccctctttctgctaatccatttccttctctgtaggtttgattctcacagttcgctttcttcttctcttccctgaaaacagacgatgtgttttctgtagtcaaaatcccagggctcaggtctgcaggacctgggtaggctacggggactttctcactcaccattgtctggacactcttgtcttctgtgcatggaggcatttggaaaatgaagtggacattagccatgaagggaataatactagttttctccaataggatattgatgtagagctgatcttgtgcttctcacactgtctcagagtttggactttcacctgtgactttgagaagagctggggatgggcactccattgtgctgtgagctctgggtaacgataattgtagaatctgcctaggcagtctaaggtcaatactactggtcatcaggaaagacagctggaattcctgggaagatctgcatctgccgtccaccatggagtcccatcgtcttctgttatgctctctttgaatcagtcccacctagattatctagaacactcttcctgacttaggaaaaataatggcaggctccactaacacctgtgttatgccatgggagcaacacctaagctagtgtgtgaatgagtagatgagactgtggtctagtcaaggtgacaggtaaaattgattgttgccattatgatattttattttatatttggcaatatagtcatgctcctattataaatattttttgagacggagtcttgctctgttgccagcctggagagtgcagcagcacgatctcggctcactgcaacctcttccacctcccaggttcaagcagttctcctgcctcagcctcccgagaaactgggattacaggtgcacgccaccatgcctggctaatttttgtatttttagtatcgacagggtttcaccatgtgggccagtgtggtctcgatttcctgacctcgtgatctgcacacctcggcctcccaaagtgctgggattacaggcatgagccaccacacctggcctagttttattaatgtctgtccataccagcaactacatacctatggggacattaatttacatctgcagacagatgtgtaaatacacaagcctatacatacatgtgtagccatttatatttaacattataataaaataattctaaaatattttctaaagaattaaacttaatgatgagctaaatataaattagagtaatctataattgatttcgatcattctctatagtttgcataaatggatgtctatttctaagccttaacatagtgtattcgtcattttaaaacagtcaagaaaaaattacaaatgttcttgtcacaaaaaaagataaggatttgatgatttgaggtaatatatatgtcaattaacttgattcaattattctgtattgcattcacaaaccataacatacctttgtgccccataaatatatacaaccaaaatttctcaattttcaatgaaattttaattatatatttttaaatctgatgcctctccttggattaagccacctcctcaggcttacagggctcttccattttctcaacatgctgttataccagatgagcacaaacacattaatttcattatgcttagctttaatttttcaaaacaacatgaaggtgataattttaccaatagacgtattgcaacctactatgcatgagaccctttctgtgcttcaaggtttcttctcaggactttatatgtattgcaaattttcatttttttctgatatggaatgctgatttctctttattacagattatcagtttatttttcaaatttatctcttaaaattaattttttcaaagtcccactcaaaccagggtattattagaactttgaagtgtaatagttggaccaactttgagaatacattcaatttagttcacgtgctctcaagtatcttttcttctttaaaagttgttgtcagttgtaatatcacacaaaatattagtaatttatactaatgacacaggttaaaatattgtataaataatttaattacatttgattggaaaaaaggaatatatgttcctcatatcttgacttttttttcttctctatgagatgcatgtttattaattattaagtttaagatgttacccttgtctttttgatttctgggatttaattttagtacatatacttgaatgcattgtattaattcatataataatgttcatattttggatagggttttaatattaattttgttattactgaattttaaactattctacactttttcattttttgtttttatgcgataaaatttacatataagaaaatatgcatagatctggaatgtatcactagagagtttctggcaaatgtgaatacccttgtccccagcacctaaggtagctgaagagcaagtccatccccacatcgcgggtctttccctgtgcctgcggtcaactcctgcatggggaaatgttttgatttctcacactacagatccatttttttccgttttgaactttatataaatggaatcaaacattatagaccttttttttgaaaggggcttcgatatttttgagattaattcatgctatttaatgtataaaattagatcaacatattgtcatttattcaattcatggactgactctgatatgaaacctcaaagttttcatgtatatatggagacagggagaggaaggagaaagattttatatctgagtcagtccattaagtaaataaatgagaatattttgatttattttcctgttgatgtactttaaatttgtttccattttatgaatattataggcaaagccgttacaaatatattagtgtaggttttcctatattgtctcatttttgttgagaaaatatgaagtatatatttctttttttatttttgattactatttatttatattttatattttactttaagttctgggatacatgtgctgaacatgcaggcttcttacgtaagtatgcatgtgccgtggcggtttgctgcacctatcaacctgtcatctaggtttgaagcacctcatgcattaggtatttgtcctaatgctctccctcccctttcctaatgcttttcctcccctgacacatcccagtgtgtgatgttcccctccttgtgtccatgtgttctcattgttcaactcccacttatgagtgagaacatgtggtgtttggttttctgttcctgtgttagtttgccgaggatgatgatttccagcttcatccatgtccctgcaaaggacatggaaatcattcttttttatggctgcatagtagttcatggtgtacatatgccacattttttcatacagtctatcattgatggacatttgagttggttccatgtctttgctattgtaaatagtgctgcaataaacatacatgtgcatatgtctttatagtagaatgatttataatcctttgggtatatagccggtaacaggactgctgggtcaaatggtgtttctcgttctagatccttgaggaatttccacactgtcttccacaatggttgaactgatttacactccccctcaacagtgtaaaagtgttcctatttctccacattctcaccagcatctgttgtttccagactttttaatgatcaacactctaactggcatgagatggtgtctcattgtgattttcatttgcatttctctaatgaccagtgataatgagctttttttcatatgtttgttagctgcataaatgtctttttttgagaagtgtctgttcatgtccttcgctcactttttgatggggttgttttttttttgtaaatttgtttaagttccttgtagattctggatattagacctttgtcagatggatagattgcaaaaattttctcccattctgtaggttgcctgttcattctgatgatagtttcttttgctgagcagaagctctttggtttaattagatcccatttgtcagttttggcttttgtcgtaattgctttggtgttttagtcatgaagcctttgcccatgcctatgtcctgaatgatactgcctatgttttcttctagggtttttgtggttttagattttacatttaagtctttaatgcatctagagttaatttttgtataaggtataaggaagggatccagtttcagttttctccatatggctacccagttttcccagcaccatttattaaatagggatcatttccccatcgcttgtttttgtcaggtttgttgaagatcagatggttgtagatgtgtggtgttatttctgaggcctctgctctgttccattggtctatataactgttttggcaccactaccatgctgtttttgttactgtagccttatagtataatttgaagtcaggtagcatgatgccttcagctttgttctttttgcttaggactatcttggctatacaggctgtttttagttccatatgaagtttaaggtagttttttctggctctgtgaagaaagtcaatggtagcttgatgggaatagcattgattgtataaattactttgggcactatggtcattttcacaatattgattcttcctatccatgagcatggtatttatttattataaaagtaactttaattttttcagttttaatgaggaacaattgaaatatttttaaatgtatatgtttaaggtgcaccacttcatgttttgatattgtgttagtccattctcacactgctataaagaaatgcctgagactgagtaatgtgaaacaaaaaaatagatgtttaattggctcatttttctgcagactgtacaggaagtgtagtggcttctccttctggtgagactcaggaaagttagaatcatagcagaagacaaatagtagtagacacatcacatggccagagcaggggccacaggaagagagggaggtctacacagttagacaaccagatcttatgataactcacacaatattatgagaacagcgccaagagtcagtgctaaaccattcatgaaagacccaccccatgacccaagcatctcccactgggtcccagcttcaggattgaggattataatacaacacgagattcaggccaggacgagttgcaaactgtatcagatacacattgtaaaatgctcatcatgatcaaggtaatttgtgtgcctatcatcccacatacattttttttttaaatggagtgtgtgtgtgtgtgtgtgtgtgtgtgtgtgtgtgatgagaatatctaagatctaccctttcagcaaaaatcacttttacaacacagtattaaatacaggaacattgctgtagattagatctccagaactcattcaacctgcacacctgaaattctgtaccctttaaacatcacccaatttccctctcctcccacatcctgggacccattattttactttctgctttcaagagcttgggtgttttagataccacatgtaaatgagataatgcagcatttgtctttctgcatctggcttattccacttagcatcatgtcctccaggcccatccgtgttgttgcaaatgtcagaatttccttcttttcaaagcctaataaaattcagttttatgtgtacacattttctttatacattcatcagtctgtggtcattaaattattttacaaatctacactattataaataaccttgcaatcagcatgtgtttaacataataattttacttatttgaatacataacaagaagtgggatcaccagatgatatgatagctttatttttcaatttattgagtaaccaatcctaccacaccctaaaaggattctcttttcaccacattcttgccaatatgtgttatatgtcttgctgatgatagccattttaagcagagtgaggtgataactcatcatgattttgatttgaattcctctgataattagtaatgttgagaaccctttgaggctctgtttttcatgtgtgtgttttctgaagaaaaacctatccagtttttgccctttttatcagatcatttgttatttgctattgagttgcatgagttatttatacttttggatagaacttatgtcaggtatataattgcacatagtttttttcctgtgcttttttctattaaattcaaagaaatcatttctgaatcaatgacaggaagtttttttccatgtgttctatgagtttgtggcttcaggttatgttcatttttagtttatttttgaatacggtgttagagaaggtctaattttatttcttttgcatatggatgttaagcttttacatcatatattgaggagactgtccatccttcactgtgtgttcttgggatacaaaatcaggaagatgcataatttaaaaagaaaacatcagatgaatattcctggtgaatatagaccgaaaagttctcaacaaaatactagcaaatagaatccagaagcactttaaaatgtaatacctcatgatcaagtaggctttacccctggaaggcaaggttcattcaacatccacaattcagtaactgtgattcaccatgtaagcagaataaaagcaaaaaccatatgattatctcaatagatgctgagaaagcttttgataggatccaacatccgctcataataaaagccctcaacagactaggcatcaaaaaaacttacctcgaaataataagagccatctatgaccaatccacagtcaacattatactgagtgagcaaaagctcaaaaccctttagaagtgaaagaagaccaagatgccctctcaccactgctattgaacatagtactagaaaccctagtcagagcaaccaagcaatatcaaaataaaaggcagctgatatggtttgtacttgtgtccccactcaaattaaatgtcaaattgtaatacgcagtgttgagggtggggcctgatgaaaggtggttagatcatggggatgagtctctctctcgtgctgatcccatgatagagccctcaggagatctggtttcaaagtacgtggcacctccctcgtctttcttcctcctgctccagccaggtaggacatgatgcttccctttctgtactgattgtcaggatcctgaggcctccccagccatgcttcctgtatagcctgaagaaccatgaaacaattaaaaatctttataaattacacagtctcaggtgtttctttatagtttgcgaatggactaatacagaatccaaataggaaaagaagaactcaatgtatctctccaaactgatgatataattctatacctagaaaattctaaagaccctgccaaaataattctagaatagataaacaattttggtaaagtgttgggatacaaaatcaatgtacaaaaatcactagcatttctataccccaactatgtccaagctgagactgaaatcaagaacacaatcctatcccacttacaatattcacacacacaaaatatgaaatgcctggaaatacaggtaacaaacaaggtgaaggatctctgcaaggagaactacaaaatacagcagaaataaataaataaatcgtacatgacacatgactcatctgacaaagggctaatatccagaatctacaatgaacttaaacaaatttacaagaaaaacaaacaaccccatcaaaaagcgggcaaaggatatgaatagacacttctcaaaagaagacatttatggagccaacagacacatgaaaaaatgctcatcatcactggccatcagaggaatgcaaatcaaaaccacaatgagataccatctcacaccagctagaatggcgatcattaaaaagtcagggaacaacaggcgctggaggggatgtggagaaataggaacacttttacactgctggtgggactgtaaactagttcaaccattgtggaagacagtgtggcgatcctcaaggatctagaactagaaataccatttgacccagcagtcccattacttgctatatacccaaaggattataaatcatgctgctataaagacacatgcacacttatgtttattgtgtcactattgacaatagcaaagacttggagccagcccaaatgtccaccagtgatagactggattaagaaaatgtggcacatatacaccatggaatactatgcagccataaaaaaggatgagttcatgtcctttgtagggacatggatgaaaatggaaaccatcattctgtgcaaactatcacaaggacagaaaaccaaacactgcatgttctcattcataggtgggaactgaacagtgagaacatttggactcaaggtggggaacatcacacaccggggcccgtcatggggtcgtgggagtggggagggatagcattaggagatatacctaatgtaatgttaatgggtgcagcacaccaacatagcacatgtatacatatgtagcaaacctgcacattgtgcacatggaccctagaacttaaagtattatttaaaaagaaagaaaaaaactattaatttttctgaaccatgaacatggaatatttcagatatattttcaatttgtgtgtgttcactttattttttattatcaatcatttctggttttcttttagaaatctttcacttatttggtaatatgaaatataatttttagctattataaacaaaatgctttattgattttttgctgtttgcatttagcaatgccaccaatttttgtatgtaggtgttgtattctgcaaatttacagaattttttatcaattataacagtttttccagcaccatttattaaatagggaatcgtttccccatttcttgtttttgtcaggtttgtcaaagatcagatggtcgtagatatgcagcattatttctgagggctctgttctgttccattggtctatatctctgttttggtaccagtaccatgctgttttggttactgtagccttgtagcatagcttgaagtcaggtagcgtgatgcctccatctttgttgttttggcttaggattgagttggcaatgcaggctcttttttgttccatatgaactttaaagtagttttttccaattctgtgaagaaagtcattgatggggatggcatcgaatctataaattaccttgggcagtatggccattttcacgatattgattcttgctacccatgagcatggaatgttcttccatttctttgtgtcctcttttatttcattgagcagtggtttgtagttctccttgaagaggtccttcacatcccttgtaagttggattcctaggtgttttattctctttgaagcaattgtgaatgggagttcactcatgatttggctctctgtttgtctgttattggtgtataagaatgctagtgatttttgcacactgattttgtaccctgagacttcactgatgttgcctattagcttagggagatttggggctgagacaatggggttttctagatatacaatcatgtcatctgcaaacagggacaatttgacttcctcttttcctaatcgaataccctttatttccttctcctgcctgattgccctggccagaatatgtagaaagctgaaactggatcccttccttgcaccttatacaaaaattaattcaagatggattaaagacttaaatgttagatctaaaaccataaaaaccctagaagaaaacctaagcaataccattcaggacataggcatgggcaaggacttcatgtctaaaacagcaaaagcaatggcaacaaaagccaaaattgacaaatgggatctaattaagctaaagagcttctgcacagcaaaagaaactatcatcagagtgaacaggcaaccaacagaatgggagaaaacttttgcgatctactcatctgacaaagggctaatatccagaatctacaatgaactcaaacaaatttacaagaaaaaaacaaacaaccccatcaaaaagtgggtgaaggatatgaacagacacttctcaaaagaagacatttatgcagccaacagacacatgaaaaaatgctcatcatcactggccatcagagaaatgcaaatcaaaaccacaatgagataccatctcacaccagttgggatggcgatcattaaaaagtcagggaacaacaggcgctggagaggatatggagaaataggaacacttttacactgttggtgggactgtaaactagttcaaccattgtggaagacagtgtggcgatcctcaaggatctagaactagaaataccatttgacccagcagtcccattacttgctatatacccaaaggattataaatcatgctgctataaagacacatgcacacttatgtttattgtgtcactattgacaatagcaaagacttggagccaacccaaatgtccaccagtgatagactggattaagaaaatgtggcacatatacaccatggaatactatgcagccataaaaaaggatgagttcatgtcctttgtggggacatggatgaaaatggaaaccatcattctgtgcaaactatcacaaggacagaaaaccaaacactgcatgttctcattcataggtgggaactgaacaatgagaacatttggtctcaaggtggggaacatcacacaccggggcccgtcatggggtcgtgggagtggggagggatagcattaggagatatacctaatggtaaatgacaagttaataggtgcagcacaccaacgtggcacacgtatacatatgtaactaacctgcacattgtgcacatgtaccctaaaacttaaagtataataaaaaaaagaaaaaagagacccaattgttgacaaagttatgaaaaagatagtttttaaggagtctttaagtaatattgtattttctgcaaacagacaatttgatttcccctattccaaatttcaggacatttcttcttttttcttgtcaaattgttctggctagaattacagtaccatgtagaagtggtggaaaagagcatttttgtcttgttcaacatcttagagaaaaggctttcagtttttccagccttggtataatgcaagctgtgggtttcacatatctggactttattattttgagatatgtttcttgtataccaagtttgttgagaatttctataaggaatggaggttgaatttttttctatgactttcttaaagcaattaatcataaaataataataagcaggtcaatacaagatccataaattagtggaagctagttatttgcactgctgccatagagtaggatcactacacaactcatggtgttgatgggaaactataattctgcaataattaaagactagtgatttacactgggctctattgagagatttggttgtcaactacagaaatcgagatgaaggggcactgagaaacatttcgcttcatatcatctcaacttctaatatcaatttttagtactaatacagtcctattttctcagtatactgtctcacaggttatagtatatgtcttagaaaattaagggttgtttcattctaataattaactcagaaaaattcatttcctattatggatgacaagtgtaaattcatatcttaataattacccacactccaaaacactactacaggcaaaggcaagagaaaggcaggtatagatgagattctctgaggtcagttatgtaaatacccaaggactattgtctatgaccttgaatgtcactttcttcccttccatgagctacatccaggatattctgtgaatctgagagcgttgagcatgtttaattattttatctcactgccccttagtcttgctttctccagttgacaaccaaatctctcaacaataggcccagcgtaaatcaccagacttcaattattgtagaactatggtttcccaacaacattatgagttacaaaatgatactactttatggcagcagtgaaaatgatgaacttccactaacttatgaatctctgaatggctagcatggaggtgtgtatgtatcagcgcactgttctagaaatgttccgtttctgtccattattttatgtagtaatgaggacaacgtgaactaaagggagtatccatggccttataagcacagagaccacatccagtgcaggtgcagagcaaggctgcaacagtcagcaagttgctctctgaagagtcttccaattcccttgcccaaagcatctgctcattcatgggctgagaaaagggaagtcatgcatgcagtctactctctctacagagctgacaggggacacggacaacatcgattattcatggaattttcccataggaatgcagctgtgtgcacacacacataatacatttttaaatgttttttttatttatcctctccaattttaaaaaagtcatcaccttttctcctaatcaaagaggattttgaccagaatgcttggtgggagccccctgctctcccagatgcccacccttatttctcttgaagtgaagaacggcagctctcttgatttctactctcatcctctaggactaaaaccagaaggttccacgccccctgggtgaacatccaagaagaccctgtctgtagcagcaggagcctcaagccttgactgagagctatggtcctgaaatgagacagtgtcccccatggagagcacacgtggacgcccacaactgagggctcactgctcttcaccacagatgcgctcccttactgagtcctgagacctgagtgcaccccatagggtagggctcagaagaggggatgcaaatctccaccagctccacccttctctgtgttgaaaagccgagcatggggacctagttcagtgactcctgtgccccaccacatggagctttactccacgcttctcctgctgactgtcccttcctgtgagttcagtggtcagggaatccttcaggggtgaaacacctgttcttttctttgtgggcttcatcttcttatgctttctccacaggggtcttatcccaggtcaccttgaaggagtctggtcctgcactggtgaaacccacacagaccctcatgctgacctgcaccttctctgggttctcactcagcacttctggaatgggtgtgggttagatctgtcagccctcagcaaaggccctggagtggcttgcacacatttattagaatgataataaatactacagcccatctctgaagagtaggctcattatctccaaggacacctccaagaatgaagtggttctaacagtgatcaacatggacattgtggacacagccacacattactgtgcaaggagaccacagagacagagcccagggtgcctcttgtacaagaacccaggctgcttctcagtggcgctccctccccacctctgcagaacaggaaagtgtggctgagatgccatttcctgtcagggtctgggtgtcttatcctatctgactcagagccttgtcttcctccctcttctttagtaataaatggcatgacccctgttagtggttcatgcaagcagaggctgtatcctgtttgacaaagattcagcatgaaaggttcctgttacttgagccagatgcatcactgatatgtggccaccagtttcttagactcataccactttaagggaccaaatacaaatgtccatagcatatgccattcttaaactgcagaaatgatgtcaaagaagaatgtggagataagagagcaggaggaattatgaaaatctggatagcatcttctcttctagggtggaaggtatgctagtaaagtaatttaatgaaacaatcagacagatgcaatatgtcctcatcatggagtgtctcacatgggcagtgcacaaataaatttctaaaaattccataaggtagatgtgatggatgaggcttatttccacacagggagcccacaaatatccagagaagtaaaaaatctgacacttggaaagaaaattgcctcatcttgacatcagaaacccatttcaacatgtccgaggggcaatgtggaaaagaaatggaaacttcaaaaacacatttcttatgaaatgtctagctcatgtttgaacataaaaacagaattgtccatgattttagaaaaaccaacccatgacagcgagtcactacactcagaaacaccactgagtcaacagacttcagtctgtgagcaggtcagtactgaggccccaggtgaatcaaggctctcacgtacattgtacagaacccagaattgagccacacaatctataaccaagtcttctttgacaaactttacaaaaattaacaaaaaaatacaccagagaaattcaatatatgaaattcaatatacccattcaatatatggtgctggggaaattggttagccacgtgcagaagaacaaaactagacccccaccctcaacacatatatactcaacacaaaatgaattaaagacttacatataagacctcaaactataaatctactcaaacaaaacaccaggacaactcttctgggctttggcctaggtaaagaatttatgactaagaccccaaaagcaaatccaagaaaaaaatagacaaatgggacttaattaacctaaagcatttttcacagcaccggagtgaacagacaagttgcagagcgaaagaaaatttttccacaccacacctgtgacagggaactaatatgaagaatttgcaaggaactcaaactactctacaacaacaacagcaacaagaaccaaataactccgttaaaattagcagaggacatgagtagacattttcaaaagaacacataaaaatggataataaatatataaactacgctcaacatcactcatcatcagggaaatgcaaattaaaaccacaataagatatcatcttccaccagtcacaatgactattactaaaaactcaaaaatatcagatgttggtgaagatggaaaggaaagggaactcttagacactgttgatgaggatgtggatgaggacaacttctatggaaaatggtatggagatttcccaaaaaactagaaatagaactcccctttgatccagcaatcccactactgggtttactacccaaaggaaaataattttttatttccaaaagatatccacacttctatgtttatcacaaaactattatcaacagcacatatgtcaacctgagtgtccaccaacagatgattttataaaagaatatagcatatatgcacaattcaatactagtcagccacaataaggaatgaaactgtcttttgcagcaatatgcatagaactggaagacaacataattagtgacctaactcacaaacagagagtcacatgtcacatgttattatttataagtggaaggtaacaacgtgtccacaaggatatggagagagaaatgatggacaccagagacttagaaggatgggaggtggaaggtgggagcatgaggagacattacctagtgggtacaatgtacattatttgggtgatagtacactaaaagccaagaccactatggaatatagccatgtccaaaagtggcattcgtagtccttaagtttatacaagtaaatgtacacacaaataaaattaaaaatataaaataattaacagttgaccaatgatcttaaaagttgatttaaaatataatcaataaatgaaatgaatatcagttgaacctcattaaatttgaaaacgttttatactcaaatgactataagaaaatgaatgtcaagtttcagatgagaaactgtttgcaaatcattagccaccaacataagtataataagaaccctcagaactcaactgtgaaaaaaagaaacaacccatggatagaataggcaaaggtttgtgcagacatttcatcaaataagatgtacagatgacacataggcatataaatgggctcgcaacaggattttccattcgaaaaattcaaatcaagccgacagtgagacactactatacaatttttagaaattaagaagaaatacagataataccaatgctggtgagcatatcagggtccaagactctaaaacgttgcaaacaggaatgcaaaatgaaactgctactcaggaaaataatttatagttttttctaaaatcaaacattttcttaatatatgacctaaatatcccactcctgaatatttgtgtcagagaaatacaatcttagattcacaacaaacttccatttaaatgttcaatatattgtgctcacgtgtgtgtgtgcacgatagaaacaaaaagtaacatgaatgtctcaaaatttgaataggtaaaaagtaggaagtgtctattaattgaataccatcagcaataaaaaataacaaaatgactgatacacaaaccattacaggtgaactccagacatgatgctaagtgagagaagccagtctcaatgatcaaagggacacatctgtaagcaccacggtcatcctcaggtgtcagtggtttgggctgggctctctgtctctttcctgaccagacccagatgttgagctccgccacttgcagatggaaaattctactattttcaacaatgcactgaggtttgaactgcttcacagactgaacgaaacaaacacgggctcctttgaacagtgtgcagcatttgttccaaccacaagagaatgtctcccagctctgccccttctcagttttccctgcaagccagcagccctgcagtttagcctgcatctcccatgcatgcacccatctccttccaagggccttactccacaacctccacttattttgagtgcactgactggctttgaacttttccacattctgttgttattgaagttaggatgtttagagccatattaaggatcatattttatgactgaattccagtgccccctctctcctgggacagagcacgtaaccaacattctgcatgtggagacaaagatgagcttttttcttcctcagcctaggagatgagcgctcagtggagggttggatagaagcttcccaccttctcagcactccagttctggtggggagaacctctgccataggagcagagctagaaaccagggaccgaatgttcccagtgacactggacccagggtagagcctccatccacgagtggggctccatggaagaagcgagtctctggctctcagtagcttttgtccagaactgagccttaggatcgtgtactgtgggcagagtcagagggccaatgtcctggctcctggggaacagtttcctctgaagggagctgggtagaaggtgtcctgtcttcttggctacatctgtttgcagtggagtttacatcatgctgagttgggatgtggaaggaaggaggagcatcttagatcaattatgatggctagacttactgaattttgtagattttcttgaataaatgtttcttcacttgctgtatgctgtgagagcctttccaaaccctgtattttttcaaaataattttcactggtctcatgagggcatggattcattgagcccctcatgctatcaaagagaaatagaactttttttgttcactttttagagaacatccatgggttataaaacaatgggttgacttctcttccaaaactttacagataccgtcaattttcctcttgcttgtaaggttttatccagaagaatgctgtcatcattttttctgcttttttggaaggaatgccccttctactcacctcaaattgcctgcatgtatttctatttttctttggttttcagcagttttaataagatttagctaaatgtgtgtggggggagcagggagtgtcattctgctgttctgtgttctctgagatgcatggattcacggtttactctgtctccattttggggaacacaattagaaaaaatgtcagtgtgagcccagaaacaagcctccctgaagtgggcagaggaccacctgggggcgctcaggacccactgagcacaagagccagccccagggcaggtgcagacgggggttaagatctggtttcccgtcagccctgtggcttcctctccataaaacagttccctcgggggcacgtctctggattccttatcttgttcttactgtgaagtctctgaagaataaacatttgttgtaacaagagaaaaattttctcccatgcaccaaaggcagagtcacctacagtcaattagtcctgtttctcaatgttaataaactatcaatgtttctgaaggtacattgtacagaacccagaattcagccacacaatgtatagccaagtgatattgacaaacttaacaaaatatacaccagggaaaggacgtcccattcaataaatggtacttgggaaaatggatagaaacatgcagaagaacaaaactagatccccaccctcaacacattagtcaggtctctaaaatgcaggagtacatatctaaaatttattattttattgtgcatttttacgtgttccagaaggtgggagaaatttctttctgtgaagagcatcccaaagtcaggcactcctctagaacacgtgtttaatccttgtctttggcttattgatgagctctgttggctgcaataacttctgccatccgggctgactttgcatcatgtagaggagcaaattctgaatgaaagtttgcactactcaattgagtgcataacctacagttttgttactgatgtatgattcatcagagatgatatcagatcaaggatttcaatgagaatctaatctaaaagatgtaaacaaattttcctaatttagataaaattactgtgagcacactgctagtattcagccatgtctcctatcacattgaatctacactaagtttgacctaaaagctagcacttgttctcatgttccaatatgttatttttattttaatgtattcagattactatgtgttgctattttacccaaagtgaaggaaagcaattttaactgactgaaaatgagaaaaagcacaacctaatgaaatggaagtcaggacatgagtgtctccagccttgtctatttcaaaaattcacgtacgcagggggatttctttcctcaattttacacagagaaacttccaaaatgtttgtttcctctcccatggactctatcatcagtttctatgtcagtttgcttagaattttggcctccagctccaaccaatttggtgcaaaaacatgatttcattcttttttatagctgcagagtattgcactgtgtataagtaccatgttttctttatgcagtctataactgatgggcgtctaggttgattccctgtattaggtaatgtgaattgcacagagataaacacatgagtggatgtgtctttgtgttacaatgattggttttctcttgggcatatacccagtaatgagattgctgaggggaatagtagctctgttttaagttctttgagaaatctctagactgactgaattgttttctctgtgaatggtgataattatgtcaatatttgtcaaattttgaatgtattgtttgaagattgttatttgtcaatattacctcattaaaactattaaaaatggaagtgtataatttggtagaaaaggattaaaagaaagataaaaataatacaagaaaagtcacagactcctgaatccacatgtgaattagcactcagtttttctatattatttataaaaacactaagatacagccaaataatatcatgatatccttataagaagagtgtttcgtaaacctcactgggaatttctagctctgtcctagagttaatttagggagcagtcggatccagtcctgagcaacacaggccagacactgagacttaccacatcttaccagatgtgagctcttagacacgtcacatggcctctccatgcttgggggtttaccttcacatctgtaaatgaaggaaacattgactgccacagaacatacttcatgtgcatctatacagtagaaatgctaataagaattaattgtttatgaagtgtaatcactctgggacacagcccactcagaggcatcccttccagaacccgctatatagtaggagacatgcaaatagggccctccctctgctgatgaaaaccagcccagccctgaccctgcagctctgggagaggagccccagccctgagattcccaggtgtttccattcagtgatcagcactgaacacagaggactcaccatggagttgggactgagctggattttccttttggctattttaaaaggtgattcatggagaaatagagagattgagtgtgagtggacatgagtggatttgtgtggcagtttctgaccttggtgtctctgtgtttgcaggtgtccagtgtgaagtgcagctggtggagtctgggggaggcttggtacagcctggcaggtccctgagactctcctgtgcagcctctggattcacctttgatgattatgccatgcactgggtccggcaagctccagggaagggcctggagtgggtctcaggtattagttggaatagtggtagcataggctatgcggactctgtgaagggccgattcaccatctccagagacaacgccaagaactccctgtatctgcaaatgaacagtctgagagctgaggacacggccttgtattactgtgcaaaagatacacagtgaggggaagtcagcgagagcccagacaaaaacctcctgcaggaagacaggaggggcctgggctgcagagggcactcaagacacactgaaaacacggttaacactgggacaagttgctcaggaaggttaagggctggtttcctttcagagtctttgctgtttctgtatctaacagtttccccaggaaccctgtctagatttgcgatcttgatctgcttaaactgtctctgtgtcatttttcttacctgtgactttaggggagctgatcgtggacactccagtgtgtggagatttcctggtgacagcaattgtgtgttctgtctaagcatgtctagggccggtcatcaggaaggacaggaaggacaggctggaattcttggaaacagctgcacctgccatccaccagggaactttattgtcttctgttctgctaaaattaaatcaggcacaccaagtttaactagcactatcttcctagcttaagaaaattgatggcaggtttcaataacacctatattaaaccttcagagcaacacctacattagtgtctgatttgataattgagactatgttctagccaagcagacacataaaactggtgattgccatgcttagttcatatttcatatttatcaatagaatctggctggtgttataaacagatttgccaacacatgtgtgttagtgtttgtcttcggagaggcacattctatgactggattaagtttgtgtacaggttcctaaggaacctgttcatgcttttgagaggaaatgcagagggggtggaaggcggctggggaagctgaaggtatacgagggaagtcagtccctgagtgaaggagagagggaggagaactgggtagaactttcctaaacttctgtgctggtctaggaaggtccagcaagatcactgagtcagattcgtgtcaaagtttcccatcggggacccccgtgactcccagcagtggctctgctcagatcagcacagagctcgttcttctcctgagagtggagcagaggatgtggctccagcaccagccatggcatggacgtcagagagcagccccaggcacctgagtcgggtgcattgtgccccctgcaggtggacggagggaggtgctgactcagggcccacacgctgtgggttctatacagaacacacacttttacttcatttctgtggatgacatagaaacaaacatgcagtctattaacagcggtgattcctacatttgccccaattgctttattccttgattccgcagaatatcctgacgcagaattgtctttctctcgtggaattgcgacgtgtttaggacgtgtgttccccactttcagtgttctgctccatgaacagagatcctgagtagagtacagctgaccctccttccacactgttcctctcctccccacaggaagagcagataattacctgaggctgaatctgaggtgggatctgtcctctgaacctcagagcctgcagagacccccggctgcagattcatggagtcaggtgtttgtacatgtgggaaacttgagctgttcttttgtcagtgaacactccttagaactaattgtgggttcagaattaggacacccattgatctatcacacctcagctcattctgccactcagaatctccagaaattcaggaaatggttcaatttacatgtttgtgacacattgttctcatttcatttagttgtgagtttggtcagcaaaagtgctaccatttatgtgtcccaacctgatgaagctaacttgcttcaccagatgttgggagctcctgaattttatcctaagcccctctctctccacttcatgtgaaattcggtttgacctggaattctggtgtgttgatttagccagatttccccatactgagtgtctgattttcctggatatctgatcagtttccttgtccttcaccataacttgggtgacatctgatcaccctgggctaacttcaacaaaaatcctggcaggttgccttaagcaggatttacctcactcctgatgtttcttcttgattttccatcctttgccccaaccctgctgcatgcctataaatccccacgttctcactctgtatttggagttctgctgaatctctccctcattgcaaaatcccactgccctggtccctacacctatcatgagggccctggataaagtcttccttactgtgctgtagaaagtgtctttgtatatacattttttctttaacaaatctgcctttagtatttcctaattgatcaaggaacctcaaacattgaatgaaagtgaggttttccattttactaacatatgtgtatctgtgaatttcaatttcaatgtgtggtgtccagaagtcctgagcaccaacagttgtgcttctctgtccaattatttgattctgaaacctgggagtcatcccaacacaggtaaatatgtgattttttttttttttttggtttttactgtttagtgactgacttatttcacttacactgaagcttcatgaacacaatgatgaaaagtagagagaggacttgtttgaaaatgccagatttatggtagactttaccacccacgtgtgtctggaggtcttcttaaggttccaagaacaggacatttttcccacaacaagacaaggatgagaacctctgagctgtgaggatggaggacaggcagggccatgtgtggacaaggacgggctgctgctatgtccagggtgttctctactagcaaccactccatctccttcctcactctgtggtatttgtcagatgggaaacatgcctagaatttatctttgacatctggatggaagcccaggcaagaggcatttgacagcttattcgtgagcctacttctttaaggaatgccagatcccttgctctccttcctagttcttaacccctttaactcccttcccctcctgcacccatccactgcctatttacagccacgtccccacacccttcactgtagcaccattttcttgggctcctgggaaacacaacagctttggtttaactcacagctcaggcacactcacgggtcctttcagaggctctcaacttccctcctacagtccctcagctcctcctggggtcctaacttggccatctctatcctctctgctgagcctggccatacacaatccatcccatctggatatgtgtatagcagtgggttaactcagcaggcatgaatagttcaaaccctccacgttcctaaaaaggtaaataactaaaaaataaaaacaaaagtaaacctttgttcatttatggctgtctgttacctcctgggatgagatctccgagtccatgaaatcttacacctgataaaagtgtctgcagatgtctgcagccttgggacatgctgtacgagtttaatcacagtgatttatagtgaacgcctgcttttgttttgctggggagggctgtggtctgagtattgtggtcagttacccaggtgttccatagtctatgattcattccccaaacacagccctggacaagaaaactcaggggcactcccctgggtgttgacacttcacacatgtcatcttacctcatagctggagcattacacatgtgcagaaggctccacagtgggaggacccctgagagcttgtgcctggattctcctgagcttcactctttgtgccttttttttccatgtattttcaattgtatcattttgctgtaataaactgttcctgtgaatacgagttttcatgagtcctgtgtttttactgagttttgagcctgagggtggcagatgcaacttctcaatgcagttgtatcagaagaaggatttcctagagagatcctaagtgacacatggctgaagtattgttcagaaaacataagtattcaggtgtggaatggcaaaatctgatacttgggtggcaacagaattacccggtctgagacagcagctgaactgaagtagatgtctggagataaatgcaatttagaaacgataactcatactcccaaagagctggctcaatcgatacataaggaaaaataaaatgataaaaaataacctaaatatgcaattactatttgtgagaacatccgggagagtgattgcagggaaagtggcctgcgccgacctcagattttggccaatgtcatttctggctgatgggctccagggcactacctaagggagcaattatgctgcaatgacagacagaagcttcgcaagctctctccacccagaaggtggttcaggtggtgaagtgcggggactggtgagccacaaaacactgaaatgagggaggaaagtgagaaagtgaaaggcttttgagctttttctttagcttaataatttttgttaattattaacaaaataattggacaatgactaatgtaaaagtggaccgtgttttgagtcccttagaacggaggagaatgcagcggtcaatgttgtgcccagagattactatagaacaatagtaggtggttgaacatgctccaaacacaaagcctcttgttgctgatgggacagctgccctcgtctactgcacaacagcttctccaaagtgtgtttaccctgagcattgagattgcctttctcttgtaagtgaaaaaatcggaaaactccaaataaaggaggagttgtaacgctctatgtgtaagaaattctaatgtggatttatgataactgggatatgcatccacttatctttttatctgtaaaaattcatgggtgaaagtgcaattttgttacatggatatattgttcagtgatgaagtctgggctttgaggagagtcatcatctggatggtgtatattgtacccagcaagtaatttctcatcccacacaccactcccaccatccaaaccttccaagtttccaatatttattatgccacactctatattcatgtgtgcacattatttagttcttacttatatatgacatgtggtattcaactttattcttctgagttatttaacttaagatagcagcctacagtttcatccatgatactgtaaaatacataatttcattttttattattgagtagtaattaaatgtgtgtatatatattcacaaatatatataatgtatttgtgagggtgtgtatgtgtgtatatatgtgcatatatacatatacaacatgttttctttatccaatcattcattaaaaacacttagtttggtaccgcatatgtgctattgtgaataaggcaacagcaaacataaatgcagcatctatcgaatataaaattcatttttctttgagtcgataccaagtagtggatttgccgaattaaatattagttccatttaataagagaacttaccaacatctgtttcttgtttagtttagtttttatttttgactttttaataatagttattctgactggtttaatatggcttctcgttttgacttcaaattgcatttctgtgatgattaatgacattgattgttttttcatatcctggttgatgatttttatggcctcttttgaaaaataaatgtctgatatttgctcactttttaatgtggctatttgtgctttttgtgttgctttagtttcttgtagattccaaatattagctctttgtcagatgtagtgtttaaaaatatttttcgtcattctgtaggttttctgttaactttgttgattatttattttgctgatcagatgttttgcttcttatttgtattaagtccaaataacctattttggtttagttgtgtttacttttaaggtcatagtcatgaattctttgcctagcacaatgttcagaaaaacacttcctaggatttcatttatgactttcagactctcaggcctcccagtcaagtcttttatccatattggtgtaatgtttgtatgtagtgagacatatgggtccagttttattcttctgcaaatagctgttcagtttttcctgcacaatttattgaacaaggtgacattttcccagggtatgctttttgtctggttggtcacagtcagttggctgcaggcacatgactgtatttctggaatgtctattctgttccaagtatctatggttctctggttgattgttacttgtgtataaaaatcctactggcttttgtatgcttttttatcctttattctaaaacttcactgaattaattcatcaattctaggagtacttctaaagaatattagtttttaagtacaaaatcatattgtcagcaaacacacacaaaaaactgacttcttcttttccaatttgggtgcctttatttctttctggtgtcttatttctctggctaggatttcaagttctatattgattaagagtggtgaaagtgggcatccttgacgtgttctgagtcttaggaggaatactttcaacatattgctactcagtataatgttgtatgtgagtttgtcatatatgatttttattaatttgaggtatgttttccttctattctaattttgttgagggttttttatcataaagaaatcctaaatgttatcaaatttttttttctggacctattgacatgattatatgttttttgtttatgtggtggatcacagttattgagacatgaacgttgaactatccttgcatccctgaaatgaaacttagcagattgtagcatattatctttttgatatgtagttggacttgattttcttgtgtcttgttgaggatttttccatctatagtcatcagtgatattgatctgtagtattcatttttgggtccttgcatggatgtggtatcaggctattagtggctttgtagaatgagttagggagaaaaaccctctcctcgtttttttggaaaaagtttcagtagaattactagcagatctttttgtatattggacagaattcaccttttaaaataatatgctttacggctttgatgttgagatttttttaaattactgcttcgatgtcactaatttttgttggtcctttcaggatttttatttcttcctatttcaatcttgggagattatatatttccagacatttatctattcaccctaaattttctagtttatgagcctggagatgttcatagtagactatgttgatcattatatttctatggcatcagttgtaatcttttcttttttgtttctcattctgcttatttaaattgtctgtctactttacttgcctaatctagctagtggtctgtaagttttgtttatcatctcaaaaacccaatgttttattgtattggttctttgtatttcttggttcttaactttatctagttctgctctggtctttgttatttgttttcttctgctgtgtgtttggtttgatgttgtttttctagttatttgatacgtaatgttaggttgttaatttgtgatctttctttttgatgtggtcatttaacattataatcttatcccttagcacagcttttgctgtaaaccagaggttttggtatgctgtttctctatttttattcatttcacaacatgttacaatctttttaaattttatcattgacccaaagttcattcagttgcaggttgttaaattttcattgtgtgtgtagtcttgaatattcttctagggtttgatttctggctttatattactgtggtctgagaagatatttcatttttaaaaagttattgagtcttttatttctggcatagtatataatccatgtttgaaaatattccttgctaatgggaataatgtatattctgcagtcattaggttaaatgttctgttaatgtctgttaggttcatttggtctagagtccaatttaagtctagtgtttctttgttgattttctgtcttaatgttttgcctagtattatcatttgggcattgaaatccatcacaattgtattgttacctgtgttcttccttaggtctaatagtatttgttttatgaacatgggttttctggtgcagagtgcatatatatttagaattgtcatttttaatcaatcattttatcattatataatgactttctttgtctttacttactggtgtttatttaaagtttttttatatgatatagatagtcttgcttgcttttggtttccaattgcatgaaatatattttttcaccctcttgatcttgaatctacgtatttttaccaattaagtgagtttcctgtcagcagcataaatttcaaaactcttttttattctttccactaatctatatattttaggtgaagaatttaactcatttatattcaaacttaatacagatatgtgaggtctggcttctgttgtcatgttaattattaactagtggctttgtagtcttaattgtgtaatagttttatgagtgaattttataattttgtgttgtttatgatggtgagtactgacctattgcttccatgtctaggtctcccttgagcatttcttgtaggtgcggtctggtgtaaataaatgtccttggcattttcttaccttagaaatactttatttctccttcatttatgaagcttagtttagaaggatacaaaattaatttctgacatagaattttttctttttttttctttaagtagtctgaaattgggagtccaatctcttctatcttataactttatgctgagaagtacactgtcagcatgatagaatttcagataaattattagacacttttctattgtgaattttaggatttttttcttcctatttactttagatagtctgaggactatagatcttggtaatgtctgtcttccagtgtcttctcatgtagttttctgaaccacttttatctgcatatgcaaatatctagcaagactagtgatgttttcctcaattacttcatcaaattggtcctctaaaactttttactaattttctccctcaggaatatccatgattattggctaagttgttttacataatcctatacttcccaatgattttgttcatttttttgttattttcatctgactgggttaatgcgaaatatctgtctcttaggtttgatgttctttcttctttttagtgtagcccattgtgaaagttttaaactattttttgtaattaaaattcaatgaagtctttactccctgaagctttatttttaaaatattaaagtcttaagtaaatcttgaattgttctgatttttttttttttttttttgacacggagtctcatactgtcacccaggctggagtgcagtggcgcgatcttggctcactgcaacctctgcctcccgggttcatgcaattctccttccttagcgtcccgagtagctgggactacaggcacacaccatcacacccagctaattttttgtatattgagtagagacagggtttcactatgttggccagactggtctccaactcctgacctcgtgatctccgctccttggcctcccgaagtgctgggattacaggcataagccaccacgcccggcctgagttattctgatttatttgtgttggttctcaaatttcttttggatttaattgagattccttgaggtcaacattttgaattatttatctgacatttcaaatatatcatgttgtgtaaattctatttctggagagttaaggtgatatccggcgtcttgtaattgtgttttttcatacttccacaattgcttacctgcttgcttttcattggctaaactatctcttactgtttttgaattcattttgattttcatgaaaatttcattccctttagaatgtgaatataacgtatattatgtgggtcttttgatttggttcttggtttactcattggcaaaggctctgtaagagtttcttgtatatagatagtcattatttagtggctttctgaaactatggttgtagtaataatctactgggcctgtgagcaggctcactgcctcctgcaggccctaaatagtggaggcctcagaaaccatttcttatttgcaatgcacttgtttcagcacattttatattgggatgttaagttcacctacacattagtatgtgtccttacagatttgagctgactgtggtagaagcagatgagtacatgcttgatatctgtacacagggagaagctctctgttgcctcaggcgatggactggtctatgaagtgcacagtgacttgagttctctgatcagcccctgagtgggggatgaagctggacagagatgagccaccgagcctggcaagcaaaagcgccagccttgatggaaatggcgagctgaggggcatctactcagtgtggtttcttttgttattaagagctttagtgtggtggctttttcaaattcccgttgtagtagtaacatactgagcatgtgagcaggcccgcggtcttttgcggggttggaatcacagaagtattgagaagctaatctcattttcaactgctgtacactggtggtattgagtttgtatgaggtcatgcagtttgaacgtcaggccagtaggtggtgctcgcaggtaagagccggctatggtggcagcagaagggtttatgctttaccggtggttaaagtgggaaatttgtcatgttccagatcttagagaaaagacttttagctatttctcattcattataatgctgcctgaaagtctctcgaacataactttttattatgtcgagatgtgttctttctatacccattttttacattttttttcctgaaaggatgttgagtttcatcaaatgatttttcagcatcaattgaaaaaaactatatgtcgattaaagatctaaatgtaaaatctaaaactataaaaactctggataataacctaggaaatacaatttaggacattagaactggcaaagacattatgaagaaaatgcaattttaacaaaatcaaaaaatggcaaatgagccctaagtaaactaaagagcttctgcatagcaaaagatactatcaacagagcaaacaggcaacctaaagaatggaaaataaaatatttgcaatctatacatctgacagggtctaatatttatagcatacatgcaattaaacaaacatacaagaaaaaaagtgcccaaaggacatgaaaagacacttataaaaagacctacatgtggccaacaagcataggaaaaaatgctgactatcactatcattagagaaatacatattaaaaccacaatgaggtaccatctcacatcagtcagaatggctaatcttaaaaaaataataacagatgctgctaaggttgcaggaaaaagggaacatttatacacttctagtgcaagtataaattagttcaaccattgtggaaagcagtgccatgatccctccaataacctaaaacagaagtttcatttgacccaacaatcctacaactggacatatacctaaaggagtataaacgtataggttcattccagcactattcacaatagcatagacatggaatttacctaaatgcctgtcactggcataatggatagagaaaaatgtgatacatataaccatggaatactatgcagctaagaaaagaatgaaatcatgttctttgtaggaatatgatggaactggtagtcattactcttagaaaactaattcaggaacagaaaaccagatactatatgttctcacttattttttggagataaataatgagaaatattctctcagggcctgagtcttccatattcaaaaaaaaattctaaaataagtgttcaacaagttgccgacatgcctttaaatatcctgtttcatctggaccccttatatcactcaataaagccatgagaactatatttaaaagtgggattctatgataataaataacttaacagtaagaataggaaggatatggatggttttactaatttaatgggtacataactgtggtatacactatattcctatgaataagatattctgatttcagagctaagtattgtttcctacgttgtgtgtgtgacttggttgtgttggatttgagagtgtagcacgtgcacagaccatgtggatcagaaatccacatgtaaagatgacaatctatggatgtgaactacaagtatgtaagtacttcaagtaattctatttaatggagtttgaaataaaactcaaacttattcaaaacactaattacttggtatttattttgagatctatgagtttatcaagaaattcaaattcctatttctatttaaactcccgattcctactctcagtgggagggaaaactcacagccaatcacacatcacaggacaaatctgtaaacgaagagtcattcctctgaaggtcctgggtgttcaggactctcaggcaggtgctgaggaccctgtcttgggagtgcccagcagatctcagaaccctacatggggcctgctggacactcatgtgggataactagtcgccacttattcagagttaccagtgagctttgactgttccgaatgggaccagcatggagtcaaggtgcctgctcaatgtcagagacagcgatggtctcagaaacaatccaggtaatctctaggccaataaaatgtggattcacagtgagaagtacatcctggaggtggagcttgttcttcagtgggaagagtgctgtgcacagaaagcttagaaatggggaagggggtgcgtttcctcaggcaggattagggcttcgtccctcagcgtcccactcttgtatggctgatgtggcatctgtgttttctttctcatactagataaggctttgagctgtgaaataccctgcctcatgaatatgcaaataacctgagctcttctgaggtaaatataggtatattggtgccctgagagcatcactcaacaaccacatctgtcctctagagaaaaccctgtgagcacagctcctcaccatggactggacctggaggatcctcttcttggtggcagcagctacaagtaaggggcttcctagtctcaaagctgaggaacggatcctggttcagtcaaagaggattttattctctcctgtgttctctccacaggtgcccactcccaggtgcagctggtgcagtctggggctgaggtgaagaagcctggggcctcagtgaaggtctcctgcaaggcttctggatacaccttcaccagttatgatatcaactgggtgcgacaggccactggacaagggcttgagtggatgggatggatgaaccctaacagtggtaacacaggctatgcacagaagttccagggcagagtcaccatgaccaggaacacctccataagcacagcctacatggagctgagcagcctgagatctgaggacacggccgtgtattactgtgcgagaggcacagtgtgaaaaaccacatcctcagagagtcagaaaccctaggggagaaggcagctgtgctgggctgaggagatgacaggggttatcaggtttaaggcttttttgaaaatgggttatatatttgagaaaaaaataacaatagaaacaagtacacactctaattttaagagatatattcaattcaagaattgtagaagccgaattcacagtgggaaaggccacactcaataaagttgataaaaacattccaggaaggtgctactgtgaacaagttttcaaattagatgaataaataatttggagcaatgttatttgatcatgaggtgagacagtatgattcttaaaaagtggaaaaaattctttcaaatgtttctgccactctttatcataaaattaattttagagcagttttaggattacaatgaaattgcacagaaggcatgagaattcccatgactccctgccctacacaggcagagcctcctccactatgaccatccagcaccacagtcacaaatcagttacaatggaggaatctccaaggacatttgattctttcttttttggtgatgccctaatataacaagcctaatttatctcggaataccacaagttttgttcagtggatttctaggaatcatattagttagagggaaagttggtgaggctcttactatttgaactcattcttccaaaatccacaaaacatatattaatttaaagcttatcttacttctggtttacaggatccttcccagagagtaagatttttaagattttagaggcaggttcatgtctctaaaaggccagcaagttctggggaatcccataatgaacatcctttcatgggaattggagaccctggcaatgagagactccatgtataatgccctagagttggattagatgcactgtgagctcttgggtggtggttctgaaaaaggtggtctgtgcagtaaatgcaaacacatgcacgggacacaggaaggagcaaaagcttccctttacaaagtgtgtgggcacctggaagaaaccctcacaagggcacgtctcacccttaatgactgcacattagccaggggcatgatcatgattggtcttacaaggaaagagcaccactgaggtcataggttatgaaaatgtcatcctccagctgagaaattccatctgctggcatgtgcgtgtcaaccccgtggagggtgcactctgggagttgacgagatgcatagaaacctcctgtcatgaattatcgtctaccacacagtcagaatcaacctgtgctccagaaagagatacatgcctgtagaaataaacagagcttaaggattttcttacctgctgaatatagtgcccaaaaccacactttcaggaagattagctcagaaatgtttacaaagtgactgaagggcagtggcgggtgaggtgatgggacagcctcagggctgcacttgaggagggctccctctcccatgcaggcttttcctccaggagctgcatcaggaactcacagaggataagggagaattctgagaacatgctactgtggtactgcctagagaggaaggataaatgatgacaaatacatctctgagtaacatatgggcatttgttcatgaaaactgttttttctgaaagcttatgaaggtcttgaaatgcccctgattagctgaggacaaacatttaaaccctccttccacagggagttcaagcaggctggatgtgtcctgctatggatgatcttccccagccccttcctcttcccagctcatccctggctctctgtgtaaaaagttttcatcagtggaaggtggttgatgaagtgaggtcttcaatttcctcatcttctctgtggtcatgttattttcctcatctgaggtttaaaaactcacctgcatgcagcacatgacaggctaaaatctcttgtggacaaaacagtaacaaaggcacccaccatggttgagcacccgtgttgctgacagtgaccaccaagggtcaacgtcctcttcacaatcctgtgtcagagcagcacttgagtgatttcactagcaacttcccaggagaatcggcttaaaactacttgtcgcattttccatacagatataacacatctattttcctgaagaaatagaaagagctgaatgctgaatacactgtatgtctgctggttctgcaagtttgtgactatcactttctaatttctgatctgtgtggaccaccctccagatttttctcactggtgtgaccagccttctggatgtcaaatataattaactttttttcatataaaagtcaacacaagctcctcatggtttcggtgctcactgactactttaaacttacacaatatgtttctttattagttttgttttctggtatctctactcagcatcttcaacacacccatgttaagatgcttgtacaggtaattgttaattttaaatttactggtgtttagtttaattaaataggcaggcaatagcttagaatttagaaacaacaatgtaaaggaaaagtaaatgcaataaaatttaacataagaaaaccagcagctgaaaggaagggaaatctattctgccacctaagagggtatggtgacctcatagtacaacgaacttctgcagtttaatcgatactgctcacaagtgatagcattctctctctttatatcagagcattccctaacatgtacaataaagagtgagcagatacctccaaccagactgaccagtacctctccctgagtgcctcagctgatagagatagacatcacatttgtctaacaaaataattacaggctgtaaggatacccaccagtcatatggagataatttgaaaaacttagtcaaagcccaaaccttataggtagtcatttatacttagaagaattaactcttatcttcacatgtatttttcttaatcatagagaagctactagagtcactgtccaagttactgaatatcttattcctagaatgagacattgcacaatgtgttctgacatgagggaatgtagctatagttaaaggataggagatgtgatcacggaaacacgagtctgcgatccagcagttctttctccctcacatttgcccagaaacaaagaccccagcagaaaaatggaagggttgacttcagtctccaaagtatgatgtgagatatacgtcaggtatttcatgccattgttttatagtaggaaatttaatctctaaagaaggtcattttcaggataatactattctccaggatacttaaatgcccgaaaacagagagcgctacagtgcccagtgtccaggagctacctggcacgggtctggaaaccagtggacagaaatatcagtttctcttaccacatgtatgttggaaatttgaagaatgtttctttccttcttcgtaatcataggctgcaatggactggaggtcccagtacataagaggaaatgtgtctccagtaggaacacaattagtcccataaaataattgtgctcacactgtggtgcccacactgttggaccagctgactgagaaagtgttgtaagagctgcagtgtctactgattcctatcatatttggggctacattcgcagctaccaacggaaagagagagaagtaaaactggcttaggtagagtctatggatttgctttctttccttcaaactgaagtaaaaaaaaaaatcacatcaactaaaatggggacgatgatgaagtgatcaaggacaagagccactcagtgttttaggtgggttttaacctaaagtcccacaacatgtgagaacctgaactctggagtccggggcatctctggggagaatgtggaaggtgggcgggaggaaacagtgattcatgtctagggaaatttcagggctacctgctctgggggaaaggaaagcctgagcctctccgacagtgtcctctgttaaaattgttggctgacttattgtattcttcaacaccaatatttttttagtcctcttttaattttgtttttattattatactttaagttctagggtacatgtgcacaatgtgcaggttagttacatatgtatacatgtgccatgttggtgtgccgcacccattaactcgtcatttaacattaggtatatctcctaatgctatccctcccccctccccccacaccacaacagaccccagtgtgtgatgttccccttcctgtgtccatgtgttctcattgttcaattcccacctatgagtgagaacatgtggtgtttggttttttgtccttgcgatagtttgctgagaatgatggtttccagcttcatccatgtccctacaaaggacatgaactcatcattttttatggctgcataggattccatggtgcatatgtgccacattttcttaatccagtctatcattgttggacgtttggcttggttccaagtctttgctattgtgaatagtgacacaataaacatacatgtgcatgtgcctttatagcagcatgatttataatcctttgggtatatacccagtaatgggatggctgggtcaaatggtatttctagttctagatccctgaggaatcgccacactgtcttccacaatggttgaactaatttacagtcccaccaacagtgtaaaagtgttcctatttctccacatcctctccagcacctgttgtttcctgactttttaatgatcgccactgtaactggtgtgaggtggtatctcattgtggttttgatttgcatttctctgatggccagtgatgatgagcattttttcatgtgtctgttggctgcataaatgtcttcttttgagacgtgtctgttcatatccttcacccactttttgatggggttgtttgttttgttcttgtaaatttgtttgagttcattgtagattctggatattagccctttgtcagatgagtagattgcaaaaattttctcccattctgttggttgcctggtcactctgacgatagtttcttttgctgtgcaaaagctctttcgtttaattagatcccatttgtcaattctggcttttgttgccattgcttttgctgttttagacatgaagtccttgctcatgcctatgtcctgaatggtattgcctaggttttcttctagggtttttatggttttaggtctaacatttaagtctttaatccatcttgaattaattttcgtataaggtgtaaggaagagatccagtttcagctttcctcatatggctagccagtttttccagcaccatttattaaatagggaatcgtttccccatttcttgtttttgtcaggtttgtcaaagatcacatgcttgtagatatgcggcattatttctgagggctctgttctgttccattggtctatatctctgttttggtaccagtaccatgctgttttggttactgtaacctcgtagtatagtttgaagtcaggtagcgtgatgcctccagctttgttcttttggcttaggattgacttgacattgcaggctcttttttggttccatatgaactttaaagtagtttttcccaattctgtgaagaaagtcattggtagcttgatggggatgtcattgaatctataaattaccttgggcagtatggccattttcacaatgttgattcttcctacccatgagcatggaatgttcttccatttgtttgtatcatcttttatttcattgagcagtggtttgtagttctccttgaagaggtccttcacatcccttgtaagttggattcctaggtattttattctctttgaagcaattgtgaatgggagttcactcatgatttggctctctgtctgttattggtgtataagaatgcttgtgattttttcacattgattttgtatcccgagactttgctgaagttgcttatcagcttaaggagattttgggctgagacgatggggttttctagatacacaatcatgtcatctgcaaacagggacaatttgacttcctcttttcctagttgaataccctttatttccttctcctgcctgattgccctggccagaacttccaacactatgttgaataggagtggtgagagagggcatccctgtcttgtttcaattttcaaagggaattcttccagtttttgcccattcaatatgttattggctgtgggtttgtcatagatagctcttattattttgagatatgtcccatcaatacctaatttattgaagagtttttagtatgaagggttgctgaattttgtcaaaggccttttctgcatctatcgagataatcatatggtttttgtcgttggttctgtttatatgctggattatgtttattgatttgcatatgttgaaccagccttgcatcctagggatgaagcccacttgattatggtggataagctttttgatgtgctgctggatttggtttgccagtattctattgaggatttttgcatcgatgttcatcagggatattggtttaaaattctctttttttgttgtgtctctgccaggctttggtatcaggatgatgctggcctcataaaatgagttggggaggattccctctttttctattgattggaatagtttcagaaggaatgctaccagctcctccttgcacctctggtagaatttggctgtgaatccgtctggtcctggacttttttaggcaggaatttccttgtcctaataagcccaggagtgctacaggagaccagggcttatttcatccctcagcggcgaccgtaaaagacagccatcccgaaagcagccatttcagaggcctcccctcagggatgcattctctttctcagggatgttccttgctgagaaaaagaattcagtgatatttctcccatttgcttttgaaagaacagaaatatggctctgttccacctggctcaccagcagtcagagtttagggttatctcccttgttgcctgaacattgctgttattctgttcttttttcaaagtgcccagatttcatattgttcaaacctacatgctctacaaacaatttgtgcagttaacgcaatcatcacagggtcctgaggctacatacgtcctcctcagtttacaaagattatgggattaagagactaaagtaaagacaggcataggaaatcacaagggcattgattggggaagtgataagtgtccatgaaatcttcacaatttatgttcagagattgcagtaaagacaggcataagaaattataaaaggattaatttggggaactaataaatgtccatgaaatcttcacaatttatgttcttctgccatggcttcagccagtccctccgtttggggtccctgacttcccacaacagtttattaactttgtatgactaataatgtaaaatgttccccatatttttagcaatgttttacttatttgtgaaaggtgtgtttattaatttttcattttaaggtgtcacatttatctttcttgtttctgggatttcattctagtagatatagctgaatgcattttaacaattattgtaatcatctcacattttatatttggatttgcatatacattttattaagattttgattttgatataaaatattttcttacaattgtctcttttctatttttatgagataaaattaatgtatgcataattgcatacatcttcaatgtacagtttcagggtttctgacatatgtgcacacatttgtctccagcacctaagttaggatgaggagcaggtcagtctccacaacaagtgtcctcttcagtgcttccagtcagctctcacataaggatttttatttaatttcaagttttcattttcactaatcatcagagaaatgcaaatagaaaaacgttctggtttctgtcactacagttcaattttttcctgttttgggcatcacataaatggaatcaaatgttatagttcattttttgtaaggggctacttttgctatttgtgaggttcattcatgtatttgcatctaccaaggttttgtcatcatatatatacacacacacacttatatatgtactaatgcacatataggtatttcatatctcaatcagtccattacgttaataaatgacagtttattaagtaaatccattcattaagtgaataagtgacaaaaaatatatctattttcctgttgatggaatttagtttccaaaataaatatcgtaaacacatctgttataaatatctttgtacaagttcttctgcttatatctcccatttttattgataaaatatgtataaatataagtatgcattataacttttcagctttatggagctataactgacaaataaaattgtatgaatttaaggtacaccacttgaggtattgatatacatggggaaatattcatcgtgatcaaagtaattggcatgcctatcatctcagagaatatcattttatgcctttaatttattgtgagtctgtgatgaaaacacctaagatctactcttctggaaacagataagtttataatataatattcattagtatagttacattgctgtatgtttcatctccagaactccttcaacctgtgtatcagtccattctcaaactactttagagaactacctgagactgggaaatacatgaagagaagggagttagttcactcacagttctgcaggcttagcaggaacttatagggaggcatcaggaaaattacgatgattgtggaaagtgaaggggaagcaaggaccgtcttcacatgctggcaggggagagagagaaagagcaaggggagatgcgccacacttttaaacctcaagatcttgtgagaactctaacacaagaagagcaaaggggaaagccgcctccatgattcagtcactccccatcagacccctcctacaacacttgaggatgaaaatttgacatgagatttgggtggaaacgctgagccaaacagtatcattatacccggccactcacaaatctcatatccctctcacattgcaaaatataattatcccttctcaacagtctcccagtcttcactcaattcagcattaacacaaacttctacagtccaaagtctcctctgagacaaggtaagtttcttggatgtataaccctgtaaaataaaaaacaagttagttacttccaagctaatatgagatgaatgcactgggtaaatgttcccattctaaatgggagaaattggccactacaaatgggctacaggccccatggctagtccaaacactagcagggcagtcatcaaatcttaaagctccaaaaaaatttccttttactccatgtctcacatccaggacacgttgatataagaggtgatctcccaaggcctttggaagctccacccttgtggctctgcatgttagactccccatagctgctttcataggctggcattgagttgctatgtcttttccaggcacaccatacaagctgctggtggttctaccattctggggtctgaaggacagtggtcctcttctcacagatccactagacagtgcccaagtggggactctgtgtgtggaatccaacaccatattttccttctacactggcctagtagaggtactccattagagctcagcccctgcatgagacttctgcctggatatccaggcattatcatacatcatctgaaatctaggaggaggttcccaaacctcaactcttgcctcatgtgcaccagcaggctcaacaccacgtggaagcaaccaaagcttagggcttgcaccctctggagcaatggcctgagctggaccttgaccccttttagccatggctggcacaggacagacagggatgcaaggcgccatgtcccgaggctgcacagagcagtggcgtcctgggcttggacaaagaaaccatttttctctcctgggcttctggacctgtgatgggaggggctgccacaaagatctctgaaatgccctgcggacattttttcccaccggggtccttgttacttatgcaaatttctgcagccagtttgaatttctccccataaaatgaggttttttgtctaccacatggtcaggctacaatgttttatcaaacttttatgctccgcttcccttttaaacgtaagttccaatttcagaccatctctttatgaatgcacatggcttatgttttcagaaacagccaggtcaactcttcaatgctttggtgcttagaaatttcttctgccagatataccttaaattatgtctctgtagctcaacatttcacagatctctagggtagggggaaaatgccactagtctttttgctaaagcatagcaagtgtgaccttcactccagttcgcaataagttcttcaccttcatctgacaccacctcagactggacttcattgcccatatcactatcagcattttggtaaaacccattcaacgagcctctaggcagtttcaaacttttccacatcttcctgtcttcttgtgagcactccaagcttttccaacctctgcccattacccagttacaaagtcacttccacattttcaggtatcttaatagcagtatcccactcctggtgcaagttttctgtattagtccattttcacattgctataaagactacctcagactgggtaatttatgaagagaagagttttagttaactctcagctctgcccgctaaacgggaagcattattgggaggcatcaggacgaacaatgatggtggaaggtgaacgggaagcaagaaccttcttcacatggtggcaggagagagagagcaagtgagcggggaggtgccacacttttaaaccatcagatctcttgagaactttatcacgagaacagcgaagaggaagacaatcccatgaccaaatcactttatcttaggcccttccttcaacatgcagggtctacaatctggcatgagatttgagtcggaacacggagccaaaccatatcaaccttcataacgggaagtttttaccctttgaccaacaatacccaattttttcctcctcccagcccctgcgacctactattctactctgcttccaagagcttgaatattttatactttagattctatatataaatgagatcatgcagcttttgtctttctgtgtctggcttattccacttagcataatgttttctatttgttgcaaatataagaatttctttgtttttaaaggctgaataatactcagttttatgtaggtataagccacattttatctgttcattcgtagatggacattgactcgttttccttatctagactattatgaataatctcacaatggacatagatttgtcacactcagtttattttctctagatgtatgctcagaagtggggatgctctatgtccagttcactgagtaatcttcatgttgtttttcatactggctgtaataattcacattttgttccaaaccatacatggatacctttgtaccacatattcaggtctttgtgtaactcttgaatccatttttagctgatttctgtgtattgtgtgaggtgagttctatctatttcttctgcatatggatgcccgtttttcacaccactcgttgaagagactgtcctttctctactgtgtgtcttgggaacttgacaaagatcagtttattaggaagaaatgggttggtttccaggttgtgtttaatgttccattggattatatgtctgtttaaatgccagcattataccattttgatttatatagatttgattttgaaattatagattatgatatattcagctttgttatttatgcccaaaattactttggctatttgaagtcttttatatttttatataaattggagctttttaaaaacattttgtaaaatcatgccatggagattatttatttattttattggcatatagtagatatacctattttatgggaacatgtaatatattgatacatttataaatgtgtaaagattagtgtaagatttacatatctgtcacattaaaaatgtaccctttccttgtgctgagcacatttgaatgactcctttcgctattttaatgttgtgcattagattattattaactatagtgaccttactgatctatcaaacatttaggtcttatttctcctctataaatgtatatttgtatacagtaatcaacctctccttatctccttctctcttctatccatccaggattctggtaagcaacagtctattctatcttcaggcgatccagtattttagttttgatgtaaaataagaagatgcaatatttgtctctcttttattggcttatttatcttaacataatgacttccagttccattcatattatagcaaatgacagaatattgggtttcatggctgaataatatcctatcgcatacatagattacatttactctatccatttgtccacctacagacactgaggtgctttcacatctgggctattgtgaaagagctgcaaagaacatgggaggggacatgccttcatgaggtggtggtggttttatcttctttagaacatacccagaagaggatttgccaagtcataaggtatttctgtttttaatttattttggaatcttcatactactttgcacatagtggaaacacaaatggagtaaacattaaaaaagcagtttcggttttgatgtataatccagaaacaaataatgtttgaccatgattctcattaggagtctctaatggatctggtggaaatgcaggaagttttctaaccttgttcaggaaattatgagtttgcacctttttctttttgaggcttgaaattggcatgattcatgatgcatactgttgggaggtttcagaatgatatggcaaaaatcataatgaaaaggcaagacagagagagagggagagagagagagtcaggcctagaaagagaaaaaataattttctcaacaggagaaagtgctggatatctgtatcagtgttgagttttgctcatagacacatctgtaccgagtgaggaaccatgaagtcaagggaggggtctagaacttgttcaagtgaagcatcagcatatttctcacaggcaccaatttccaccacatcacaagggtgatgcatttttgaatgccattaaatatgagttcacagtcagtaatcatgtttccatgaaattcagttaaaataccaagggtgtgtccagatcactcatgcacaaatacacaaaatttgctttttcatgtgtggctatctagagacaaagtgcactgaggagacttcagcaggttacagagatttgcttaagtttggaaaaccatagaagagtgcctttaagtgaaggttggtatataaattaaataggtcaaaatcccctctatggagtagcgttccaattgtgtggaatttttaattccttattcagttgtaaaacataatccctaggactgactccgtggagttttactgctgtgttgacaaaaatatctaacaagcttccttccagtgtttcaagggaagtttttctctaaattttttccaatgtataaattttcctggctaaagatagtaaaaggctgttaaaaacacaactggaatggcagctttaatcttttgctgattgataggagtgagcataatacatgaatctctttgagtgttctgcctcatccaaatacaataggtcaaaggctagtactggaggtaagatttccaaatgtgtttttttccagctaccaagtcataggaaaataacagatacatccttgagacagaggaccataatgccacaatgctggtaggagtacatgtagacaagggagttcaagggtttcttaaaactgataattttaatgtaagaataccattcttttaaacttatgtggaagactgtgggaggttataacaatgccatattttagtatcagccctgcctcacagaatcattttataacagttcctttcatgagtgtgcttcactcggttcatgcaaaaacctggcagatcacaggctaaaaacagaaaatatagaagcttttaatcaactgaaagagctgtagcctttgtcaaggaattattggaagacacagagaacacagatagatgataaataaaatacattcatatcccgttaagtgtggaaattgaggaaagtttacataaatgtgtccaagtggcaaactgtttatttaatctggtaaccaatttttctataaattgtagagttgaaatgcaacaaatacatatttgaaatgatctggcacaaattaagcaaatatggtaactatgtattttcactcatttttatttaagatcagcggctcagcattgatatttttgataatatctgtgactcagcagctttaccttttgaggatatgatctggtatggcagttttcttagcttcaatgttacctctttttgcattgacttccacctttatatctgccaggaatctggggaaaaggagtgcctgtaaacgttccctaacttgcccattttggtgggttttccagaatgtgtgagatgctttttttttttttttcaaagcatcctgaacccatgcactgccctgaaacatgtttatttcctagtttaacaaattggcacttctaataaatgcaatctcttctgccatctgtgctgattttacatcagatagaggactgtgttctaaaggaaatcttatattagtaagagcaattttgtcattaacctagagttttattattgaggtgtgattcataacatataatattaggtagaggttctcagtggcagtgtctaaatctcttgggtgtacagtgtcttccccgttaacatgaagcatttacgagcacagtcatagtttccagccatgcttctccctgtctcacaatcaccacaaactaactatgaccacaactggaacttggtgagttattctttaataagttttaagtttgtctttaatctttatgcctctagattattatgtgagacataatctttatgcctctagattattgtgtaaagctatttcagaagaaagttaaaaagaacattttaactgactaaacaacacaggaaatcattaataaaatgcaaagtgtagatgtgagaggctccaggcctggataatgcaagagttcatgtatgcaggcagtttctttgcccaattatactgatacaaccagcatgtcagcttcatgccccatttgactcctattatgcaagcgcatggaaatgacatgctcaagggtcacacacagatatgaaaactggtgggagcaggagaggagacgactctgcacttctcctctgaaggaccaggaaagcctggacagaccatctccccagcctccatgactgcgcgacgtgcccacatggacactcatctctgacaagataagaagactccattgatgaggctgaacattttatgatttaaattactagagacttacattgaggtttcaataactaatttttataacccaaatttacttacccccatgttgttacctctttcttcagtgaaaaattgcttttgctgtaattgagttttaggaagattcccagtgttcacaactgagcttccaagagagtgttgagaacaaaaactgaatgagggcagagaaacccatctttactgtgttcaccactaaactcaagtggactcggcactgcctttgatcactgttgcttctctgcagagttcaggtttgtatttctcacaattctaacacagactctccctctcctcaaaggtttggcctccactggctgtaaggtcacactgttctgaatttcttgtctgaaccgttttatgagggtggtgatgagccatttaatggaaattttatatcatctcagcatgaatcctatgggcggtcacgaattattattctgattatggtaattgatttttctcagcatattcattactagtgatattcaaaaaccctttttatttaaatctttgatgcttcatttttgttgctatgacactttttcttctactgagtcttcccactagcattataacatgacctaatatccagggctcagttgttatataacaaccacatatgtcaaaagctatgcattcttttcacagcagacataattttctcttttctggagatgaacacacactggctgagctacccccactcacaagaacatatggaaaatcatgacatttttatttacttgactaataaattatgtcattctctcttcaaattctttatcccccagaatgccatgacaaactcttctgcatctgttcaaaccataaactcagaaaccacatggtgagtaaaagctcacttgattcgggatattgggtcaagctcttcccctccaatgtcccacagcattgggacctcagcccacctgtccaggttctatcaagagagtttagctccttcacagtgaaggaaacaattgagttaagagggaacctgcagaagatagacaatattgaaaaccattcatatgacaagggattactatcaagcatataaaataaactcaacccaactgcaaataataatgtggctaataatggaggaataacattaatacatatttctcaaaagaagaaaagaaaaagggcagatagatgatagatagataaatagatatattagtatgtatacatacatatatcgctagaaaacactaatattcaggaaaatgcacattcacaatgagatgtcttttcatcctttatctttgcttgagagtcagaaaatctaaataaataaataaataaaacaggagctggccaggattcatagaaagggaaactcttatagaccattggtggaaatggaaattagtgaagccatcatgggaaaaaatagaactaccatataattcacaatccaactgctgagtatgtatctatttaaatcattaaagtaaaaaactaatattgaagagatacatgtacacccatgtttattgcagcactatccaccatagctaacatatgaaatcaacatatgtgtccatcaacagatgaatggataaataaaatgtgttatatttacacaatggaatattgttcagtcttaaaaatgaaattctgctgttagaagcaacatggatggaactggacaccatcatgttgagtgaaacaagacagacacagaaaaataaatacagcattttctcagtgttatgtggaaattttaaaaagttgatcttctagaagtaaataatagagtagtggttatgagatgccgggaatgggaggagactgagagacaataagaggtttgttaacaaacgtataatttacaggcagataggagggatgtgctccagtgatctacagtgcagtagggtgactgctgttaacaatatagtgcacattttatgtttacaagtagccagaagacagaaatttgtatgttaccaacaaaaagaaatgttagtgtctaagctgatgaatttgttcattgttctgatttaatcataccacatggcacacatgcatagaaatatcacactgtaccccatacagttattatgtgctaactttaaaaaatcctttaattaaaacagattttatttgcatacattacaaatgcttcaacacagagccaggaataaataccatttttctttgaaatgtgaatttcctaacaacgtagttacattcatttgaaccaaaccgtgtatttgatcatggtaagaatagacaggcttatgcatagaatgatatattttaattttagacttctacttaataccataaattcaaataattttaaaacaactaagtaaaaactataaagttgaggaaatgtgtacgtggtgtgtgatgtgtgactttttccttgcgcaccactctgtccatggtggatgtgtggtgtgggtgtctgtgtctatttctgtttactctgcttgaggttctctgtgattctaggatctgtagttcagtgtctttcacaaaactgggaacgttcttagccattatttctttcaaatactgtctctgtatctacaatttctcctttcagatttaaaatgtacatatacaatactttttaatattaatgtttactttcttcactctcttttccttgcactttactctgtaaaatttctagtggtattttaagtgagtggtttcatttaaaaggtgagccagctctactgaagggtgtgcccaaagcttactcaatgtttatactgcattgcttttgatttcttatgcatttccatttgattttttcttagtattttcaactctcagttccctatctagtccttcattatgtatacagtttccttaatagatttttacatatgaattatagttactttatatatcttgtttaattagatagttctaagatccatatcatatagaagtctcattctgatcatttgtttattatgactttggtatttctcattaatatatgtaatctttgttgatagccagatattttaggttggacagttgatattggcttattacttcattttatgcattttctgcctgtatttgaccatactttatttttgccaggcctttaatgtggaaatgtttgaatcttctcagagctacatttgacgtttacttttgcagtagacgtcatagttgaagtctgttcttctgtgtccaccagagacttcagatcctccagtgataccttgtttttctttcctgcttggctttgtctcttcaccctgttccttcctccagagaatctctttcagctccttcaggtggattaagatattatattgaactgacaattgtgaaattggtggaaggcaatagaataaagggagattttctgacctttcatgggtctatatttctacgaaggcattgtgaccctgagtctgggtgtgacattgccggtgtttctgaacttctgccagatgagatgttggtctgtgtgttcttgctgttttccctgctgtggagtcctcttgttttccccagttgttccctcccacagctccaatgttctcttttggtgttatcagcttccagagttgatgacctgacctagagattaaggctctgattaaataagaaggaggggagatacttctcaatggaacttaggtgaagacctctttttccatctcagttcctaagggatggccccagtgcccctaagatcctggctttggtggcttgctcctgcagagtaatttcttagttctgcaatggggattaaggaggtgggtctgaatgcatttcagagtgtgggctctttttctctcccagacagacacattgggacaaaagatttttgtgactgtccccatttttgggaaaaaggtttcaaggtataggaaagctcttcagtatgtggtccctgagaaattcacgctacaacacatttaccacacttgacttcaccaattcagtatgtatgtatttttttctcttataatagcctacatttttatatgccagactctgcctcagttcaactcatacccatgcctttttactctctgcaagaacttgtctctccctaaatttcggatttgatgattatcttaaaacctccagtatttaaagtatattttaaaattggcaaaattccatctcctgtgtttatctgttatgttgatgctgtaaaacagtaagtaaaatatactcctcatctatgtacattttgaagctgagttgcaggttttttggtaagacccagagtcacagagaattcaaatattgttaagctgcttaatagaaaaacaaattatggtaaatgtgttcactggaatactacccatgatttataataaataaatgcctgacacacagaacagcagcaaaaccacacatgctcttattacagaaagtggcttctgaaaaccacaccgggcacgtacagctttgtcctggagttggtttagggggatgtcagagccagtgacgagaagcacagggccagatggcagcgttcactcatcccagacatgagctcctggatgcatacagagcccccccatgtgtgggtttacttccacttctgtaaaaggagaaaatactgactcctacagagcataatttacacattttttaaaaaatgtaatagggtgatcagggcaaagtgtttatcacagcacaatttcataagacagcatattttccaaataccatcattgtcagcaaacttctgcagagcaccgtcttcttatatgggtacagcctattcctccagcatcccactagagcttcttatatagtaggagacatgcaaatagggccctccctctactgatgaaaaccaacccaaccctgaccctgcaggtctcagagaggagccttagccctggactccaaggcctttccacttggtgatcagcactgagcacagaggactcaccatggaattggggctgagctgggttttccttgttgctattttagaaggtgattcatggaaaactaggaagattgagtgtgtgtggatatgagtgtgagaaacagtggatttgtgtggcagtttctgaccttggtgtctctttgtttgcaggtgtccagtgtgaggtgcagctggtggagtctgggggaggcttggtccagcctggggggtccctgagactctcctgtgcagcctctggattcacctttagtagctattggatgagctgggtccgccaggctccagggaaggggctggagtgggtggccaacataaagcaagatggaagtgagaaatactatgtggactctgtgaagggccgattcaccatctccagagacaacgccaagaactcactgtatctgcaaatgaacagcctgagagccgaggacacggctgtgtattactgtgcgagagacacagtgaggggaagtcagtgtgagcccagacacaaacctccctgcaggggtcccttgggaccaccagggggcgacagggcattgagcactgggctgtctccagggcaggtgcaggtgctgctgagggctggcttcctgtcgcggtctggggctgcctcgtcgtcaaatttccccaggaacttctccagatttacaattctgtactgacatttcatgtctctaaatgcaatactttttttgtcctttttgtttctttgtttttttgcaacaggagtacatatcctcagctccacagaagccagggtgtcactttgggggcagaaataatcgtttcgtggtcaacaggatgagagtcctgaggaatcccagggaaacctggagagtgttttccaattagactcagggcagagacctccatgggaatttctgattagaacgggctttgagctctgatgggagccaagagacaggctcacccagggtcggggtccttaaagcctgatggttttcacagctatcccccctcgtcttgtaaactcagactgattcagttgaccctttttctgctaatccattttgcttctctgtaggtttgattctcacagttcgctttcttcttctcttccctgagaacaaacgatgtgttttctgttttcagggaaaatcccagggctcaggtctgcaggacctgggtaggctgaggagactttctcactcaccattgtctggacactcctgttgtcttctgtgcatggaggcatttgggaaatgaagtggacattagtcattaagggaataatactagttttctccaattggatattgatgtagagctgaacttgtgcttctcacactgtcacagagtttggaccctcacctataactttgaggagagttgatgatggatagtccattgtgggtgagctctgggtaacagtaattgtagggtctggctaggcagcctaaggtcaatacttctggacctcaggaaagacaggctggaattcctgggaagacctgcatctgccatccaccgtggagtcccatcatcttctgttatgctgtgattgaatcagccccacctagtttatctagaacactcttcatgacttaggaaaacataatggcaagctctcctaacacctgtatcatgccatgggagcaacacctaagctagtgtgtgattgagtagatgagactgtgatctagtcaagacgacaggtaaaattgattgttgtcattatgatattttatatttggcaatataatcatgctcatattataaatacttttgctacattttttgagtgtgtcagaggctttggaactggaacaacttcatcttgaataggggctaggaaaaataagaccgagacctgctgggctggattcctagtaagttgatgcagtaagttagtcacaggatgagataggaggtctgcacaagatccaggtcataaaggccttgcagataaatcttacagtaaagaagctgggcaaagccctccaaaaccgagacagtggctaaaatgacctcagtttgtcctcactgttcattatactctaattataatgcattaacatgctaaaaaacactcccttccagcccccaagacagtttacagttgtcaaggcaacatcatgaagtttccttgtgtggtttaaaaaggaggggaggaacactcaacttcaggaattgcctggaggactcatgaataatccatccattgtttaacatataatcaagaaataaccataaaatggacaaccagcagcccatactgctgctccacctctggtgtagccagtctcattattttacttgcataagaaacttgttttcattttaatctgtggattttccccaaattgggacccctttctcctaatatttgtgctattattcgtgttctgagcagaaaaccccaagatggaatgaagtttccctacatttttataagaagtacattcacccctttgagcgaaaatgcacagggagtggaatgaggctgggaagctaatggcgtatgatggaagcttgtccctgactggaggagagagggagggaggattgggaggaaggttcctatatttttgtgctatgcaaggaagctgcaaaagataactgagtctcgtgtaagtcagtgctacctctcaggggatccctgtgactccaagaaagggctcttcttaggaatcactgtggagtcagtcctttcattagagtagaccacaggacatgggcctcagcacacgccatgccacagatgtcagaaagcagctgctgggaacctgatccacctgcattttgctgcctgtaggaggagggagggaggtgcattctcagggtcagcacactgtttgtgaatttttatagagaacccctgcttttgctgtatttttattggaaaatatatgaacaagtgtgcacctgcaaacaactgtaattttcacatttccttcagttgcattatttcttaatcctgaatgacgtcctgacacagagttgagtttttcacaggcattgttcgaaggatcgagatgatggcattttccacattcactggtttttctccatgtggcagagaccttgagtagagcacatctggcccttatccacactatctcttgtgtcccctgggaaagagcagagatttgcctgactgcagaatctggggtaggagtctgcacacctctgagcctgcagagaagctcagcgaagttttgtggagtcagagagctttccgtgtggggaacctctagcttcctcactctcggagattaatggtcagctgtacttgaggggttaagaattagagcaccttgggagcctgtctcatcacagttccattatgtaacttaccaccattagactgcgggtaataactcaatcttgatttttctgacccgattttttcatcttattcattactaattttgtttatggaaaatgttatgtttagtttatgattaaaacctcagaactttctgaacttatcaggaataatacaaatgtgtccagtttgggggaaatgtaaatgaatgtccatgcagtttgggtgtgtgtgtgtgcgtgtgtgtgtgcatgtgtgtttgtttgtgtgtgtgtggatatgtcagtcacttacaccacaatgaacatgattgctgaattacatagtcaaactaaaattagatttgctgaaaattgcctgcagcgatgtctgtgaagctgaccctgtcactttgctgtgaagaaactcagtgtacaggcgaggttgcacgggagagctaaaagcttctgcacacaggacaggctgagctcctgaactggagccaggcacaggactgagcacctgagaaacagaacccccagccctcctttatctgggctggatgggcaccagaggacccgcaggagatgctcagaactcacacaagacagagcctcagtgaggagcagaggcagcgaggaaccagtccagggagccctgtgaccgccacctcgggttgtcttattttgcttaacagcatccaaacctcaggagaccatttattacgttatttagacttccatgccctttctgtcccgaagtaaaacaaacataaatatgactctgcagttagctctttgaacctgggttatttttctgagaatgtcatcttcgtcatcaacatcatggtcatcatgtcaaaatcaacaggcaaatccagtcaccgtgaagacagtttcatggcatgattcatacacaatcattccattccacagagaatctctttcagattcttaaggtggattaaagtgttatatttaattgccaattgtgaaattggtggaagacattatactaaaggaattgtctctgacctctcatggggtcatatttccagaaaatcattgtgatcctgagtgtgagctgactttccaagtgttcccaaccctcctccagatgagatgctggtctgtgtgttcttgctgcttcccctggggcagattcctcttgttttccccagttgttccctcccacagctctcataatctctgttggtgtccccaacttccagatctgctgccatgacctgcagattaaagctctgattccgtaagaaagtgaggggagctgcttctcaatagagctttgatgggaacctctgttcatacctcaattcttaaggggctgcaccagtgccctaggatgctgattttcatggcttgctcctgcagggtaatatcttagttttgtagtggggatcagagaactgggtctggatgcatttcagaagtgtgagctcattctctcccagacagatactatgggaaaggaagatgttttgcaggggtaaatgattcaagagattagggcaactctccagtatgaggtcccttagaatttctcactataacatgcctaacacactcgacttcaagcaatccagtgtatatttgttcttcatcttgtaatagcctacattttatatgacagcctctgcctcagggaatttcatactctggcttcattactctctacaggaacttgcctctccctagatttcaaatattttgtttgttttcaaccctcaattatctgaagcattaagtaaaatttgcaaacttccatcttttctgtttatctgttattgttgatactattgttgtaagaatgaatatatgggcccggcgcggtggctcatgcctgtaatcccagcactttgtgaggccgaggtgggtggatcacgaggtcaggagatcaagaccatcttggctaacacggtgaaaccccgtctctactaaaaatacaaaaaattagccaggtgtggtggtgcgcaccagtagtcccagctacttgggaggctgaggcaggagaatggcgtgaacccgggaggtggagcttgtagtgagctgagatcgcgccactgcactccagcctgggtgacagagtgagactctgtctctaaaaataaataaataaataaataaataaataaataaatatgtgtgtatatatatatatatttctcatctatgtacatttttaagcttagcagcatattttttagtgagatccagaataataaaagaatccaaacatttttcagctgcctaatagagaaacaaattctggtaaattttttcactggaatactactcaacatttataataaatatatttctggtacacagaacagcaaggaaaagtatctaagtatttatgctgagtaaaataagccagacaaataagaatatgtactatattactccatttatgtaatttatttcaaatgaaaaaaatctaaagtaatatacaaaagatgagtagttacctgggaaaagggtagaataaaggaaggggaaatgtggaaacatacagaagaacaagagaaaatgttgaggggaactcacttgtccacctcagtaatgatgacgcttacatcatgttttcaattctacactttaaatacgtgaagtgtattatctgccaattaacactcacaaaatttattgcaagcaaacaaatgaaaaattagaccaaaagcggtggtataaagatacaaaatatccattaaaagtcagaaatatatgagaatttgcctcctgaaccctagttctctccttatttttaggtgaatgctagagtgccacaaaaatcactcaagttctcaatacaggaagtgggttccacaaagcacactaggcatgtccaattcttacctggagttggttcagggagtaactggggccactgatgtggagcacaggccaagctaccagggctcattcatctcagacatgagacacacacagcccctcctccgtgtgtgggtttatttcacatctgtaaatggagaaaccattgacttctacagaacataatttacacaaatatgtaaaaatataatagtgcaaaatgtttatcacaacacattttcataataagacagtgtattttccaaataccataattgtcacccaattcctgcggggccctgtcattttatctggggtctgccatctcctcagggttcccaccccagagctctctgtgtagcaggagacacgcaaatagggccctccccatgctgatgaaaaccagctaaaccctgaccctgcagctctggcagaggagcctcagccccgggattcccaggtgtttctgcttggtcaacactgaacatacaggattcaccatggagttggggctgaggtgggttttccttgctgctattttaaaaggtgatttatggagaactagagctattgagtgtgaatggacataagtgagcgaaacagtggatatgtgtggcagtttcttaccaggatgtctctgtgtttgcaggtgtccagtgtgagatgcagctggtagagtctggagcaaacttgacaaagcctgggtgtccctgagactctcctgtgcagcctctggattcaccttcagtagccatagcacgcactgggtcccccaggctccagggaagggtctgcagtgggtcccagttattagtggtagtggtagtaccatgtactacgcagactctgtgaagggccgattcaccatttccagagacaataccaaaaactcactgtatctgcaaatgaacagactgagggcagaggatgcagctgcatatgactctgtgagagatacggtaaggagaagtcagtgtgagcccagacacaaacctcccttcagggtacctgggacaaccagggaaagcctgggacactgtgcactgtgctgaccccaggggcaagtgcaggtgctacaagggctgggtttcctgtcttgatctggggctgccttgttaccaaattacccgagggaacttctctagatttgcaattctgtactaacatttgatgtctgtgactgctaaacttccctcacatatttgttttttgtttgtttgttttgttttgttttttgtaacaggaagacccatcctcacccctacagaagcccgagtgtcaccttgggggcagaaatgaccctgccttggtcacattgatcagtgtcctgaggaagcccagtggaacctggggagtgttttccagtcaggctcagggcagagacctccgtggaaatctctgattagaataggtttgggattcagacttgggccaagagggagtctcacccatgggagggtccttaaatcctgacagtttttacagctgttctccctcctctggcaaaactgtgcacatctgactcagaactgatccagctggcccttacttgctaatcaatttttcttctctctacacttcattctcatagttcccttttcttcccttcccagaaaacagagagtgtgttttctgtggtctaaatctcagggctcaggcctgttacctggaactcaggtgtggcccaggctgtggctcctgtgagacctggggaggctgaggggactttcccactcaccattgcctggacccgcctgctgtcttctgtgcatggaggcatttgggaaatgaagtggacattagtcactgaggggataatggtagctttctcaaatgagatactgatgtagagctgatcttctgtttctcacactgtcacagaatttcctccttcatctgtgactttggggaaagctaaggatggacactctattgtgctgtgagctctgggtgacagcaattggagggtctggctaggcaaatcctacagggtttcaggtcaatggagttggaatttctgggaagacctacactgtcatcctccatggagtcccatcatcatctcttatgctctgatggaatcagccccacctaggttatctaggacaatcttcctgacttaggaaaaaaatgatggcaggctttactaacacttatattataggatcagtacaacacctaggttagtgtgtaactgaataaatgactctatgagtcaaggggacacataaaattgattgttgccatgacatttatttatttatttatttatttatttattggaaaccagagttttattgttactgaaatgagtctcgccaagcattcaagaatgggattttttaaggatagcttggtgggttgggggcagccagtgagtcatgagtactgattgatcaggtcagagataaaatcatagggagctgaaggtgtcttgtgctgagtcagttcctaggagggggccacaagatcggatgagccagtttattgatctgggtgatgccagctgatccatcaagtgcagagtctgtaaaatatctaaagcattgatcttaggctttataatagtcattttatccccaggagcaaactaggaagggttagaatttgtagccaccagctgcatgactcttaaaacataatttctaatattttggctaattcgttagtcccccaaaggcagtctagtccccaggacgaaggagatttgttttgggaaagggcagttattgtctctgttttaaactataaactaaactaagttcctcccaatgttaggtaagcctacacccaggaatgcacaaggacaacctggaggtttgaggcaagatggagcaggttaggtcacagctctttcactgtttcagttgcagctttgcagtggtggcttcaattcctccctttgagttttgaccttatcgacttgttttgtttctctttaagtgatggttttataaccatctatgaaactctaacaggtgctctcacatgcagatttctgattaaaaactctgaagatggttacaatagtatagagataaaactatcaaatagaagactatcttttttgacttttcacttaaaatgttgcccaagaaaacttttcttttgagctatttatagctttcaacaattgagtatagtcctgtacataaaatttggagaatatttgtttctctctgtccactttctccagaatttggaaactctttgtgaatatccttaacttatggcaatatgatttttcataagtgcagtaagattttttttttttttgcaacaggacacaattggagaaactggttattttaccaaggctttgactgtaatggcgtgcttcaccttaagcaatcgaacttgacttatacagccaataagagccccttgggaaaactggcctgtaccttgtccacacagtctttgtacaaggttcctgaccagtggtaagtaaagaatgtcactttctaacaggcccaagaaccccatgttttcctgggaccccagaggaaaaataatttaccagacttacaggtatttgatggtaaaaactcatggctgggcttggctttaaaaaagtcttatctgagattccttatggaacagagttccaccaaagccaattttaaaagcctgtgtaaacaataattatttgtattgtgctttatgcaaataataaggccatgaataataagactaaagtttattttgcaaataaatcagtcctatcttgatttgttttaaataaaaatggggacaagagagaaaaaaattatgctttaaaaatatagtacacctgttgtttgctgttcttgtttttttttcttcagcagtttggacgaaattctaaattatttgtaggctacaaagccataaactaatgcgttcaaatctttacttttaaaactgcgaattgcactccttaccccagttctcattatgtactttatagtatgttgttccctccaatgtggtgctggaattatagatgacagcactgacagctttgccatgcaagccttggaaccccacgcaggcctgcgtgagtacactcagacagttgcaatgaggttccagtcctcttatcttgaggtcagcacctacccctactacgccccaggtcatcaataaaaagttgtaacagtcttggcccttcttacatcttcattatccaacaccatgatttttgttttttgccaaaacaattgccaaatatagtcataatcataggataaataattttgctgaaatatatgtgttattattggtcttttgagatggaaagtccaagactggattatgctttcatgcatttttcataagaagtacttccactcttttgacaggaaacgcacagggggtgacatgtggctgcagaagctgatggcatatggtagaaatctgtccctgagtaaaggagagatggacggaggattgggtgaaacattcttaggtttctgtgctgtgcaaggaaggtgtaaaacatatttgagtctactacaagtcaacattacccaagggggaacccctgtgactccagcaatgactctgcctcagaatcactaaagagtccttcctttcattagagtggaccacaggatctgggccatagcatagacgtcagaaagcagcagcttgacacctgatccatgtgcattttcctgcctttaaagggagggagagaggtgtattctcagggtcaacacactctttgttgatttttacacagaacactggcatttactttatttcattgaaagatatatgaacagatgtgtgtctgcaaatgattgtaattttcacatttattccaattgcataatttttaaattctgcttgatgtcctggcacacagttgtgttttctataggtatttttcaataaatcaagaaaatacattttccactttcactggcttttctccatgtgcagaggccttgagtagatcatgtctgactattagtctgttttcatgctgctgataaagacataccagagacttggaagtttacaatagaaagagttttattggacttacacttccacatgactggaaaggcctcacaatcatggtggaaggtgaaaggcacatctgacatggtggcagacaagagaagagagcttgtgcagggatctccctttttacaatcatcagatctcgtgaaactcatgcagtattacatgaacagtgctggagaaacccgcagccataattcaatgacctaccactgggtccctaccatgacactgggaattatgggagttaaattcaagatgtgatttgagtggggacacagccaaaccatattattttgccccatggcccctcccaaatctcatgtcctcacattgcaaaaccaatcatgcctttcctacagtcccccagagtcaacttgtttcagcgttaactcaaaaatccacagtctaacatctcatctgagacaaggcaagtcccttccacctataaacctgtaaagtcaaaagcaagttacttcctagaaacaatgggggtactggcattggataaacacacccatccaaatgacagaaattgcccaaaacaaaggggccctctgcaagtccaaaatccagcagagcagtcaaatattaaagctccaaaatgatcccctatgactccatttcccaaatccaggtcatgctgatgcaacagatggtttcccttggtcttgggcagctccacccctgtggctttgcagggtacagcctccctcctggctgctttcacaggctggtgttgagtgaatgtgccttttccaggcacatggtgcaagctgtcagtggatctaccacactgggatctggaggatggcggccctcttctcacagctgcactatgcaataccccaatagggactctgtgttggagctctgaccccatatttacctttctcactggcctagcagcggttctccatgagggtcccactgctgcagcaaacttctgcctggacacccaggtgttttcatacatcttctgatacccaggcagaggttctcaaggaccagttcttgacttctgtgtactcactggctctacaccatgtggaagctgccaaggcttggggtttgcaccatctgaagccatggcctgagccctacattggcgtctttcagccatagctggagtggctggacacagggcaccaactccttaggctgcacacagcacgggcaccctgggcctggaccacaaaaccacttttgcctcttaggcctccaggcctgtgatgggaggggctgccgtgaagacttctgacattcacaggagacattttccccattgtcttgaggattaacatttggctcctcattacttatgcaaatttctgcagctggcttgaatttcacctcagaaaataagatttcttttctactgccttgccaggttgtaaattttctgaacttttatgctgtttcccctttaaaactgaatgcctttaatagcactcaagtgggctttttgaattctttgctgcttagaaatttcttctgccagacaccctaaatcatctctctcaagttcaaaattccacaatttgctccagttcccaatgagttcctcatctccatctgagaccacctcaagctagaccttattgttcatataactatcagcatttttggcaaagcaattcaacaagtctctaggaagttacaaactatcccatattttctggtctttttctgagccctgcaaactcttccaatctctgcccgttacccagttaaaaagtcacttccatatttttggttatcttttcagcaatgtctcactctactggtaccaatttactgtattagtctgttatcacgctggtcccaagactggacaattcataaaagaaaggtttattggacttacagttccacatggcttgggaggcctcacaattatggtggaaggtggaaatcaggtctcacatggtggcagactagagaagagtgcacatgaaggaaaactcccctttttaatccatcagatctcatgaaactcattcactatcacacgaatagctcaggagagacccatgcccataattcagtcacctcccatcaggttccttccatgacatgtgggaattgtggaagttacaattcaagatgaaatttgggtggggacacaaacaaaccatatcactgaccttctccgcatcatctctcatgaccccagagaaagagcagagatttgtctggggtaggagctgctcctgtggaacttagaggctgcagacgaccccagtgcagttttatggagtaagagagttttcccatgtctgggaacttctagcatacccactgccagagattgctggttggctgttattgaggggttcagaattagatcacctggtagcctatctcactgcagccccattgtgtaacttaccaccaatggccttcacgtgaggactcaatgttaactgttctgacctcattttcttacctcctttatttgtaagtttggttacagatttttttttactttaatttcagggatatgtgtgctgaatgcgcaggttttagtttcttattcaagccttataattgctcaactgatcaggaataatacaacatgtatgcagttttggggaaatataaatgaacatccatgcaaaattttttgtttggatatgtccgtcagttacacccctatgaacataatagccggtcctcaccagaaattgctggtcctcaccgatctcaaaagcatctagatcttcaacttcctagccttgagaattcagaaaacaatgtttatgatatttctgagccacccatttaatggagttctgttatagcagctgaaacagactaaaccatttaccaagtctcagtaagggcagtgaggatccaccatgcttgagagacaagcattactctctcatttgcagctcaggatgacagaagcatgatcatgagctgatctgaaaagaagatgtggctttctctccctcggatctcagttgaagccatggtgtcacatctctatggtggagactaaattccagtctgtgatgtaatggatgcctgcctcctcccaccctcacttacgagacagagtttccatgccatgcgttattgaccaagaaccaagaaggactccaattattctcacccctgctcacttgtatggcagaggttctggggatattcctgggagaggcataatgagactatttaagtccacgattcccaaacagttttatgctcttaaagcaggagtatcactttgagatatatgaataatttcatgtgcactaaggtggaggctgttatatttttataggtaaagatgcatggcataaagacagagatacagcactctggaaattgtgtgactatgtttgcagttgactgtgaataatttttaccatgaagttatcctaaaacacataatatatttttactgtaagtaattaatgaaaagctgacagctccacaagagcaatatccacttggtttagcagagagaatgagaaatagcataatttaagaataatcagttagacactgtgccatgtgcctgtattttcaactagtgaggatgctaatgtgggaagatcacccaagcccaggatttcaaggccagcctgcaagatattgctagacccattttcttaaaaaaaaaaaaataacattctgggtcatgacaaacctcaaaaactgaccctctaaataggaacaaatttaattgcattaaaatgtggatgaatttttgacacaaaacagtgacagcatgccagcaatgagtacagaataacatccagttgttatgttaagagatacagactccgaaaaagagacatcaggtagaggctgtcaaaggcctcactgcctaatgactgcttttccattgatactgtgtgtatatcccggaatgcacctgtgaatgaggacatcatgtctttcatagtgtgagagaaagagacattactacccatctgacaaaggattgatcagaatataccaggatctcagacaactctataggaaaaatatctagtaatccgaataaaaagcaggcgatatttatttcttaaaataagactttcaaattgcaaacaggcatataaaatgtgctgtgtaacactgatcatcagaacaatgcaaaacaaaactacagtgaaatatcatctcatctgattttaaaatgatttcatccgaaagccagacagaaacaaatgctgggaaggatatggagaaatgagaacactcataacctgttggtgggcacttaagtttataaaaccactatggagaacagtttagagtttcctccaaacctaatagtagtgttgtcatataatccagcaatcctgctgctggcatgtactccctcccacaaaaaaaaaatgttgtttgcactaccatgtttgttatagcactgttcgtaatagccaaaatttgaaagcatcctaactgcccattaacagatgatggataaataaaatgtggtacatatagcatatggattaatattatgccataaagagaatgagattttttcatttgcaacaacgtggatgaaactggagttcattatattaattgaaataatcccagaaccgaaagacaaacttcacatattctcatatatttgtggaagttaaaaattaagacaactgaactcgtggagatagagagtgaaaggatggtcaccagaggctgggaaggtctatggtagatggggattattggggatgctcaatggatgaaaaaagtggttagaaataacaaataatacatagtatttgataacacaacagactaagtataatccttaataacataattatagattgtaaaataactaaaagtgtataaatggaatgttggtaactcaaagaattaatacttgaaaggatgtaggaaccattcatcataatgtgagtattatgcagttcatgctatatcaaagtcaggtaccccataaatatacacatataccatttacccacaaaaattcaaaattaaagtatttatgtatctcatcttctgtatctatattacattaaacctaagaagatactggtttcttcacactaccaagatccacatagacatccgtagcttctttctttgcctgtccataatctgacattgaaaaatgaggaaacctttcctatcatatgacattaatttacttagtgcacaatttcaaaatacacaaattgtgttagaattattaaactgacccttgttgaaaatatgtttatcgactagaataccgtgcttatatgcagcttatttatattttacaatcacaacatcaaattatttccaaagatacttgtttctgatattcatgcccccctttctgcagtgaaattagtacaaacctgtttatcattgttagatatttttatacagctttcattttattctgtgtttcatgaccagctaaatacttttgaagttgtatgcatttaggttaacactttgtctcaaaaaattatgagttttcacaaattatttatgccatgtgtttatcattgaacaccatgaaaatagtttcattgtgattaaaaagtgtgtgtttcacctaatccacacaccttttccccagattcctggaaaaccacaaaggtttactggatctatatttttgtctttggcaaaatagcctggctattctcttagcttcttctgcaaagcatcaagattcaccttcactgactgcagcatttattgggccctgatggctggaggagaggggctggagtgggtggtagccatgagtgacccaagtggaagttctcagtggtgctctgctccagcacaaagaagattcacagttcctggggacaacacttaacatcacaatctcccttaaaattatctactggaaagctgaggagtaggcagtgtattactgtgagagacacagtgagggacatatgggtgagtctagacgcaaacttccctgcaggaagacaagaggggactttgtggtaaatggtgctcagaaccactaggggacactcagaaccactaggagacactcaggatagcagaaggtgctcaggatgccgcagggtgctcaaaacactaggggtgctcaagaccagcagggggcactcaggacaccaggagacacttaggacatcagggggcgctcaggacaccagggggcgctcagcacaagcaggggccacagaatgacaagggtgcattccagaccaccaggaaacactcaggaccaacaagagattctcagaaaccaccaggtgtaacaggaccacctaaaggcccacaagacaaccaggagacactcatggccactgaagaacattgaggacaccaggggttcagggccaacagggagtgctcggggccaccatggggctttcagtaaccacgagggaatcaatcactcaggacaccacggttttcttaggaggcagctccacatcaggtgcctggggaaggtgacgtttgcttttagacctagctgattcctgagctggtcaagcaaaagtcttcccacgatctctcactatttcttccttgtaacccatggtttctttcacatacaaatcattaacttaggataggaattcaattcaacttttaaccttgcatatttttagaataataatagcaatagtaattcaatgtgttttgataataagaaattgtgtatgcctaattcaaactctggttccacgcatgggtttttgtttcttgtgctgtgccagtcacactacagtcaatgcttttctaataataactcaacaatgtcacggtgttaagtttcctttcattttgtctgccatttgtggagatgaaacaccactttcacgggtcagttcctccactttggttgggttctggtcttctgctcttcacactgtttctccaccttcccttctgtcaaatccttttgtcttcctcagtctcctggcaaagaagcaacaaatctatttattttgtctcctccacgtctggtgaatctgttcacttctcttcatgatcattgaacccaaccatgtttagaaggataacagttcaccttacaatatgctcatgtaggtcaggtgcagtggctcactcctgtaatcccagcactttgggaggccaagacgggtggatcatctgaggtcgagtttgagatcagcgtggccaacatggcaaaaccctgtctctactaaaaatagaaaaattagccaggcatggtgtcgggcacctgtaatcccagctactcgggaggctgaggcaggagaatcacttgaacccagggtgagaggctgcagtgagctgagataatgccacttaactccagcctgggcgacagagagaaactccatctcaaaaaaaaaagcatatgttcatctatccgcagactctctgacatcgtcacccttttctagggtcctgcagacatcaccccacaacatccagtccttttcctaagtaccacagagtgggctctgcagctcctgctgctctctgtgtgctcagcgctgaggctcaccagtgctttgatgatgaagttcaaatccctaatgtgtttgcaattctcagacaaccctctagcaagctgccattgtgagtgcattctggggatcctgggctgatttcaggtccatattgctggatgttctctagcatccaggcgtgttggcaaataaacatctagaatttgtattgaaaatttgtggaaaatcaatggtagaaaacaatcctaatttctaaataagaacattttatcctgactttataaaaacacaatgttaatttaaccaataatgtaataaaatgtgtttaaagtgatgtttatcttgttattagatgtattaataattggtattttaaagtatactaacagcataaatgacaaacaaaccaacacagcgattatacataaataccattgtacattaattaatttggcaagaatggcatttattttcatttctaccaaaccttgcctttaaatatgtttgttaattggcattaggatagtgaaacaatcacacagagcaacaacattttggaatattacattatactataaaatagtacattcgattcaattatataattaaaataacattaaataaattcatgttttggtttgatatttggatatgtgttcatttttgtattttctttttttgtatcttttgtagagatggggtttcaccatgttggacaggctggtctcgacttcctgacctcaggtgatttatcgggggaacccacccccaatatttcaatgtagggtctttctattttctgtaagtgtcggctggtctgagaaataaagagaaagagtacaaagaaaggaatgttacagctgggccaccgggggtgacatcacatattgataggtccgtgatgccccctgagccgcaacaccagcaagtttttattagggattttaaaaggagagggggtgtacgaacagggagtaggtcacaaagatcacatgctttaaggggcaaaaagcagggcaaagatcacatattccttccccagggtattaattactaatattccttgctgggaaagaatttagtgatatcttccctacttgcacatcagtttataagctctctgcaagaagaaaaatatggctctattctgcccgaccccgcaggcagtcagaccttatggttatcttcccttgtttcctaaaatcgctgttgttctgttctttttcaaggtgcactgatttcatattgttcaaacacacatgttttacaatcagatttcatattgttcaaacacacatgttttacaatcaatttgtacagttaatgcaatcatcacagggtcctgaggtgacttacatcctcagcttacaaagataacaggattatgagattaaagaaattatgaaagtattgattttgggaactgataaatgtccatattaaaatgaaatcttcacaatttatgtttagagattccagtaaagacaggtgtaagaaattataaaagtattaattttgggaactgataaatgtccatattaaaatgcaatgcctagggccaacaaaggagtcatattaatatgaaaaataatagctgaatattttggaaatgacacatgcagtaacaaatgtctatatgaaattaagaagatattgacacaaaattgagaaaaaattaacataattatgctcactactggtttataaaatgcctataataacactttttaaatcatattatagaaaataaaataactatataaatagcactctctttgcttgattttagtatttggtgcttcaaatgttttttatacaaataaacattggtcattttttgatggtaatttcaatattttcttccagaatacatgttcataaatgtaattgaaattgtataattttcagaaacttattttatcagttgtgacttgtatttttatgatagactttttacatttatatacttttgattcagaataattatagataaaaaaattataaagttaatacagtgtgttcccatctccaagtatctcctaagatgaatatcctctatcatcataagacatggtgttaacacatttacattgataagtgtaaatatattcaataccagaccttattttatttatcatttttccaataatttctattgtaaatgaaaaataaaattctaagcttcctcaagcaactaaatgaactcaaccctcagccaagggaatttcaaagtaaattctaaaacttgttccagcaatgatgggaaagtgagaggtcagacatgcctcattacatgctcctctctttggaattaaggcaccagtggccagcattagtactacaacaaagatcttaagacgggcaaaactatatttttgctgtaaacactttctatagcaaaaagacatcaaattacaacttgattctagtatagcatcacatgacaaatagcaaaacctaatgatttattctgtatgaaatctgctacctggaggcttcatctacataataagaactatgatctccaggaccccttatcttaatccagacactcagttgtaatgattgtattaccttacatttcaaccaattgccaatcagaaaatctttgaattctcctatgtcctggaaccctgtgcataaactttcctgcctttctagactgcataaatggtatagctcacatgtgttgattaatatctgcctgtaacttctgacccactaaagtatataaaatcaagctgtaatcaagccattttggacatgtgttctcaggaattcctggggtcgtgtcatgggccttggtaactcatatatatctcagaatgagccattttaaatatttcatagtttgtcccttttagtggatatcttcttttcttttttttgggacagaatctctctttgctgttgctttcgtatatttgtttgtttccagattccatcaaggccatcagtttgaattcagttgtcttgttcctttattctcttctggtaaatgacagtttgtatttctgaagttttctagttgaatattttatagataaaaatttatcaagtaggttgatagtgccatttgggactcttatatctttacctatttaatcattgcttgttttctcaatcacaatgagtgttgatttctccatgttctatacatgttagtctattttctgttccaaatccatttattaggtcttttaaaatggattttggaaaagttgatcctattattttatgcaatatttcacttgagttgcaaaggtattctttttatgattattttgtctgaaattaacatagctattcaagttttctttggtttatattttcatggtctatatttttccatcttatttcttctctttgtgaatatgttaagaagttttcttggagaaagataattgctgggtcttttttttttttagtcaactatgaggaattattttttaatgatattacccttttgtccaataatggttgttttgtctttttacaataatatgtattgtttctattaatttattatttaattattattgatgaatatcttattggttaccataaggataacaataagacatttctataattgaattctaattcaaaaatgtagtacttctttctctttcttatttctttgagacggagtctcactctgtcgcccaggctggagtgcagtgggacaatctcagatcactgtaagctctgcctcctgggttctcgccattctcctgcctcagcctcccaagtagctgggactacaggcacctgccaccatgcccggataattttttgtatctttagtagagacaggctttcaccgtgttagccaggatggtctctatcttctgacttgtgatctgcctgacctggcctcccaaagtactgggattacaggcatgagccaccgtgcccagcctacccctttatatatagaacagagatattataactatatatgtctaattcctcttttctatcccttttttattttatcagtttgtaattacataagctataaaaatgtaatattgacatttttataattgctttacacatttatgtaataaagaaaacacaaatgcaaaaactaaatttaaacctcatttttttcattgttgacaatctttatcttttggatacattcaggtattggatgtatatcatatggctgctcatctagaaactctgctaaaacgtctatggcaagattaatatgctgggaatagattttctcaggatttgtttgtccgacagagtatttatttgtctttgatttatcatctcaagagacaatgtcaagaagatgctgtttctgcaaatgggcaatctgcaaaccaaggacacgtcactacattactgtgcaagagaagcacatgaggaaaggccggtgtgagacacaaacctccaggaacacctgggctaatgagctgcagggggcgctcaggacccactgatcagtcaaccacagaggggagtgcaaaggttaggactgctttcctgcaagcattgaaaaaagaagaaaaaaactccgtctgacagtttctccaaggaacttctgtaattttagaattctgtgcctaccaatgacatctccaaatatttttttaaaatattgtgtttggaggacatactctcacatggacaaaacacaaattgacacagagatgaaaagccctcaaccatagtcaccaaaattggagacatgtagaagctcactgggacctgttgagtcttctccaatcacactcagaacagagaccttagtgggtctcccttagagtagtcattaaggatggtgataacagcctaaagatggtagaccatggtcagtgtcatatagaatatggggaccctcacaagttttttgtctgacccttctcctgacactaaattatgcaaattaataacactgatctggtgcttcttttgattctaatttattttatttttagttgtcgttctcacttttcctttggattttcctgctccctggaaaaggtaaatgtggtctccgtgacctcaattcaagggctgaagccctttccctgtagctcagctggggctcaggctgtggctactgcagccatgtggaagaggctgaagggactttcttcactctccttgctcaggaccatccactgtattgtgtataggcttctctggaaatgcaagtggccatttgtagtgaaagaaatatgtttgtctggttaaaatgggaggtggatgtagagttaattggctgctacataaactgtccttctccaccagtgcttttaggatgagattgtgaaatttgtaagaatcaaaatggagtcacatatgttaaaaccctgacaaatggattcaggaagtgtagggagaattcttacacacatatccctgacaacaagaactatcataaaatagttcttgcaaaaagaccaacatgacctcataatcatgacttctgcaaagacttctactcagaatctacttgcccagccttagattaatgccatctgaattacactgatcatgttactatcactggtcctcaccacagatgcaacaccctcctgagtcctgaaacctgactccatcccatagagtagggcacagatgaggggaatgcaaatctccaccagctccaccctcctctgggttgaaaaagccgagcacaggtcccagctcagtgactcctgtgccccaccatggacacactttgctccacgctcctgctgctgaccatcccttcatgtgagtgctgtggtcagggactccttcacgggtgaaacatcagttttcttgtttgtgggcttcatcttcttatgctttctccacaggggtcttgtcccagatcaccttgaaggagtctggtcctacgctggtgaaacccacacagaccctcacgctgacctgcaccttctctgggttctcactcagcactagtggagtgggtgtgggctggatccgtcagcccccaggaaaggccctggagtggcttgcactcatttattggaatgatgataagcgctacagcccatctctgaagagcaggctcaccatcaccaaggacacctccaaaaaccaggtggtccttacaatgaccaacatggaccctgtggacacagccacatattactgtgcacacagaccacaaagacacagcccagggcacctcctgtacaaaaacccaggctgcttctcattggtgctccctccccacctctgcagaacaggaaagtgcagctgagatacgttttcctgccagggcctgcatttcccatccccattagactcagagccctgtcttcctccttcttctttaataataaatggcatgactcctgttaatagttcatagaagcagaagctgagtcctgtttgtcaaacattcagcatgaaatgttcatgttacctgggccagatgcatcactggtatgtggccgccagtttaatgggctcatactactccaagcggccgaatacaaaacagcagaacatatgcctttattaaactgcaggaaatgacactggagaaaaatgtggggataagggagcaggaggaattgtgaaaattcagataatagcttttctcgtagagagaaaggtgcgttaataaaataattttataaaacaataaaacagatggaatgtgtccccatcacggagtgtctcacagtaacagtgcagaaataaatttctaaaaatgtcgtagggtaggtgtgatagacaaggcttatttccacacagggagcccataaatacccatgtaattaaaaatccagctcttagaaagggagtgcctcaacttgacatcagaaacccacgtcagtgagtctgaggagcaatgtggaaaagaaatggaaaattcaacaatacctttcttatgaaaatcctagctcacgtttcaacatgaaacataactgtctacaattttaggaaaaccatcccatggcaacaagtcactacactcaaaaggtactgagctaacagagttccagcagtgagcaggtcagtgctgaaatccccggagaatcaaggctctcaggtacgttgtacaaaacccagaactgagccacacaatctatggtcaagtgatctttgacaaagtcaacaaaaatatgcacggggaagaggccacgctcttcatgccatgttgctgggacaattggactgccatatgcagaagaatgaaactggacaccaacctgtcgacatatacataaccataagaaaatggactgaaggcttgattataggacttcaaaatataaatgtactcgaagaaaacaccaggagaactcctctggacattgggcttagtaaataatttaccacaaaaacctcaaaagcacaagcaataacatcaaaaatagatgaatggaatttagttaaactaaagagcttccacacagcaacagagtgaacagacaaattgcagaatgctaaaaaatatttgcacacattgcatctggcaggggactgataggcagaatttacacggaactgaaacaaccccaccacaacaacagctatgaaaaaacaaataacctcattaaaaattggcaaaggacacgagtaggaatttttttaaagaacacatataactggacaagtgctaaacatcactgattatcagggatatgcaaattaaaactgcaaagaggtatcttacaccagtcagaatggctactataaaagaagcaaaaatagcagacatcggtggcgatcaaaggcaaagggaagtctcagtcattgttggtgaggatgtagatgagcacagcctctatggaaaacaatgtggagatttttcaaagaaataaaagcagaactacctttgattcaatgaccccaccattgggtaactacccaaaggaaaaataaatcatcatatcagaatgataaccaaacttttgttttcctgcagaactattcacagtagcatagatatcaacctaaggaattaacctgtgtcttacaacagataattttatttaaaaagtcacatatatatacaattaaatactatccagccatattaaggaatggaatcatgtattttgcagctacatggatggaactctgggtcattattttaagtctaataaacgagaagtagaacagcacacaccacactttttcacttataaatgggagctaagtaatatgtgcacaggcccatagagaaaggaatgatggacattgcagactcagaaacatgggagagcagaagttgggagaatggtgagaaattacttaaagggtatgatgtacattatttggatcatggatacattaaagccaagacgactatgcaatatatatatgtaacaaaattgcagtcactccccgtaaatgtatacgaataaaataaaaaaaaatacaattgaaatgtgaaattattaacagttgatcaacaatcctgaaaattaaaacgtgtgatgcaataaatgaaaataattttagttgaacttcatcaaattttaaaacattttctattcaaccgactatcaagaaactgaaggacaagcttcaggggagaaagtatttgcaaatcatacatctaacaatgtaattataataagaaccctcaaaactcaacagtaaaaagaagcaatctgtttataaaataggcaaaggtttgtgcaaactttctatcaaagaagatgtacagatgacacatcagcatatgaatgtaattttccagtagagaaattcaaatcaagaccaaaaggagacacgactttaggctttagaatgaggaaaaataaagaagaaatactgacagtaccagtgtcagtgagcatgccaggccccgagagactaaaatattgctagtgcaaaatgaaagagtttctgggagaactgtttacagtttcttataaaattaaacatgtccttaatccatgacctagaactctcatccctgagtatgtcctacaaaggattaaaatcatgtgttcacacacacacgtattcagatgtttaacattgtgtgtgtgtgtgtgtggtgtgtgtgtgtgtgtgttagaaactaaaaacaacatgaacatctttgaaaatttgacacaaaccattacaggtgaactccagactttcttctgagtgacagaaggcctgcctgaaagatccccagagacacagtcatggatttcactgtcaccctcacatgtcactggcttgggctgggctctctctggctcttccctgaccaggaccagatgttgagctccactacctgcagttggaagtttatattttcaacaatgcactgagggctaagttgctctacagactgaaccaaacaaacatgggcgcctttgaacaaacagtgcctgacatttgtactgaccccaggagaactcttcccgctctctttcttcttggttctctcctgcaggccagcagccctgcagtttagcctggacctctcatgcatctacccatctcctcccaagtgcattttaccacagcctccactgtttttgtaattctccacactctgttgtaaatgaagtcaggtccttcgagaccagattcgggactctattttatgaccaaatttcagcctcacccccactcctgagacagagctcctaaataagattctgcaggtggagattaagagcgtttttcttcctcaatgtaggagatgagtgctcagtggagggatggggaggagctttccactttaccagcatgcagatcctgctggggtggaccctctgccataggagcagggctgggaaccaggcagccaatgtcctcctccttggtgctgcactcagggcagagcctgcatccatgagtggggctgtgtggaagaagtgagtctctggttctcagtaagtcttgtctagaactgagcctcagcagcatgacctgtgggcaaggtcggagggccaatgtcctggcccctggggaagagtgtgctctgctgggagctgggcagaaggaatcctgtctacttggctgcagccatctgtggtggaatttacatcatgctgagctcgggcatagaaggaaggaagagaatctttgatcaaatatcaatatcatgtctgaccttactgaggttttgtagattatctcgaataaatgttccttcactttctgtatgttgacagggcctttccagacccgttaatttttcaaaattaatctcaccagtttcatggaggcatggatatatcgagctccttataccgtcatgtgagatgtggaactgtttccttcactggttataaaataatgggttgacttttttcccaacactttacagataccatcaattgtcctattgcttatatggttataaccaaagcaatgctgatattattcatttctattctattgcaaggtatgccccctctactcgtctccaattgctggcatgtatttccatttgtctgtatgttttagtaatttgaatatgattcacctaagagtgtttgtgtgtgtgtgggtatgtgtgtgtcgtgtgtgtgtgtgttaagggcttatcctgctatttggtgttctctgacctgcactgatccatgacttacaatttctctaatttggaggaaaaaatagagggaaagtgagtttgagtccagacacaaacctcactgaagtgagcacaggattctaaccccaggggtgctcaggacacgctgatcacaagagccagcctcaggggcaggtgcagatggaggctgagctcttctttcccgtcagcactgtggcttcttctccataaaacatcttcccttgaggaatttatctgaattcatgattttttgcttatctccaaagtctctgaaatgaaaatgtttgttttaataaaagaaaaatcttctcacatgtgtaaaagacagtttcctacagtcgcttaatcttgtctttaaatgtcaattatcaatgcttctgaagtaaatcagctaaatctataaaagacactttgtttaactcaacactgcagcccagcatgacagcactgaaagggccagcaagcagcaggcaggatacggtgcatgccagacactggggcggaaggagttagtatccagtgcaagagaagaaagtgcccgtggtggtcactgtcaggacccaagctcacagctccaattgcaggtgaccccatgcaaaggaagagataccctcaccaatgtttagtgtggatgtcgagtctgatggtgccacattcacacaccacgtgaatatggaaagatttaccaactccattattgaggcgtctgctgagggctgcacaggcctctcaataaagtccaaactggctcaatagagcaggaaagaagctgcctcagggtttttatgatggtttggtgttgaaggaatggtggggcttcctactaaggggaaggagcttgtataatttgaacctaatactggcatccagtgaggacacttccatgattttctactaaatttcccatgtgtgggggacaaaagtgaaggaaaaggattaatcctgtcatcagtaatgaggcatcaaaatagagtctgatgacttattctacttagcaacttaagcaaatgagtgaaaaatgaggtaagtgttcactctgggtggacagcaaataggtctgcagaaaatagagtttttttaagtgtaagcacataacaaaaagaaagagaagaacaaattgaacagggatcttggaccaatgtcctgggtggaagctcttcactctgtgagatcatcagcttgctctgagggtctcgggtcaagtccttcttcaatatatctcaggccttacaggatacatgggaatgctcagcttggtgtccttcactagggaaaagaaagagaaatcagactgtcactgtgtctatatagaaagggaagacataagagactccattttgaaaaagacctgtactttaaacaattgctttgctgagatgttgttaatttgtagctttgccccagccattttgacccagccactttgagccaacctggagctcacaaaaacatgtgttgtataaaatcaaggtttaagggatctagggctgtgcaggacgtgccttgttaacaaaatgtttacaagcagtatacttgataaaggtcatccgcattgtctactctcaataaaccaggggcacagtgcactgtggaaagccgcagggacctctgcccttgaaggcggggtattgtccaaggtttctccccatgtgatagtctgagatatggcctcgtgggatgagaaagacctgaccgtcccccagcctgactcccgtaaagggtctgtgctgaggagggttagtaaaagaggaaagcctcttgcagttgagatagaggaaggccactgtctcctgcctgcccctgggaactgaatgtcttggtataaaacccgattgtacatttgttcaattttgagataggagaaaaaccaccttatggtgggaggcgagacatatttgcagtaatgctgccttgttattctttatgccgctgagatgtttgggcggagagaaacataaatctggcctacgtgcatgtccaggcatagtaccttcccttgaacttaattacgacatagattcttttgctcacatgttttttgctgaccttctccttattatcaccctggtctcctactacattcctttttgctgaaataatgaaaataataatcaataaaaactgagggaactcagagaccagtgctggtgcaggtccttggtatgctgagtgccggttccctgggcccactgttgtttctctatactttgtttctgtgtcttatttcttttctcagtctctcatcccacctgacgaggaatacccacaggtgtggaggggcaggtctccccttcgtacttgagcagccttacaactgggtgggtttatgaattaattcctcggttgcattacatgaaaaatcacacaatctacaaattttaaaaaataagcctttactttttataaaagattacagccatttcacaggctgggaagcacagccattggtgaagacgagagacaggcactcccaaggaggagcggtggggcagaaactttatgctgaacgtgttggctaaacagacataatcaacggattacaggaggggctatgcgtgttcataaaggtggtcatgacacatgaatatgggagcaaacatacacgtcacatgtgacccacttagcagtggggacttagcatttaaatgtgttacagttaggccctaagtgccaaaagctggagcaggggcacaaagaccctcagagcgcagcctccataaatggccagaaccaggccatggtcagtggtctctgatcaggagaaaattcctgaaatcaatctggtgtcccatccaagctggggttatggctgtggaatggggggtcagttagtcaggggatgagctgcagttggttaaatcgtgcttatctcaggatcagtgcttattttgctgctacagaagaaaataacagtttattctttaagagttggggtgagggatgtaacccctgcctggcatggccttaggtcttgtttataacggggcatcttattgccccggagaatctgttctgtcagtcttatgatctccattttaatgttagtgttggtccatgttgtctctgaaccacaaaagggagtgggtataatgaggtgtgtctgatctcttgttctgcccagctgggaactcagtttttaggtgtttttggtgcctccttggccaagagggggaaccactcaatctcatggggtgactgaaattttacttttagtttaaagtttataaatatggacctaagtattgacattctaaaagtcactcctttgttttggctaaaagtacttggcaagagtccttgaaatgaggttcaagagcagtattttctcatgactttatttgcaatagacacatgagagactgttgaaaagatgaagtaccaaagtagccttaatctgttggtgaatggagttggtataatacagaaatcactttcaatattttgtaacacatgcatgcatgcaataagacagcggtgagcactgagtgtaaagtctctaaaggtacgatctttcagccaccaaataatagtgtaataacggacatactctggaggagctgactataataccgtaacaccacggggagaaactttggccaaggaagtccaagattttcttttccttttcctttttttttttttttttttttttttttgttgttgttgtttgagacagagtctcactctgttgcccaggctagagtgcggtggtgcgatctcgactcactgtgacctctgtctccctgattcaagcgattcctgcctcggcctcccaaaagctgatattacaggcatgtgccaccacacccagctaagtttttcatatttttagtagagacggggttttgccatgctggccaggatgatctcgcactcctgacctcaagtggtcctcctgccttggcctcccgaagtgctggtattacagcgtgagccaccacacccagccgagattttcttaaagttttgaaaattttaatttaagggttacaattttttcaacatttccagaaagctgtagacagtattattctgtgttatatgagtgattgtagttccttccatttttagatagtattacaaacaattttagggctgcttgctttaaatagatagatgatagatggctacatacatacatacatacgtacctcgatagagatatagttgcaaacataaatacatagatagatagagttacagatgtattttagttattatgctacttttttctttgccttttcttcctatgttatgttagtcaggtctccaggacttaggagtgcatttacaatcccttcccttgtccattttgacgtgttctagacaatgcgagaatcctttgtgtgtggatcacttccaagtcatgcactacccttgcaataaatgtgtttgtgtatgtctttgccttactgacaagctctgctgagtgcagttatttctgccgtctgagctaactttacacttggtagagaaatatattctagatggaggcttccactattaatttaaattactaattcataacctccagcttaattattgaggtataatctatcagagatggtattagaacaaaggtttccaatgaaatctaacagaagggatgtcaaaaaattttcctaacttaggtaaaataaccctgagcccattcttagtatccagccatgtctcctatctatcacactgaatcccacactaactttgacctgacttgggacttgtaagcttcaaatatgaccttttgattgcaatgcctctaattcaggacgtgtggttattttagccaagagtaaagaaaaccaaatttaactcgctaaaaatgacaaagattaaaacctaatgaaatggaaactgggatatgagtggctccagacttggctattttaagagtctatgtgcccaggtgatttcttttctccattttacacacaggcaaacccaaaacgtcagcttcatctcccgttgactctcatcatctcgttcttcatcagcttgcttagaatgttgacttccagctgcatccatgttgccacaaaagacatgattttattctttttctgtgaatgcatagtgttccattgtatacatgtaccatattttcttgatcaaattcaccatgaatggacacataggttggatttatgtcttaggtattaagagtagcatagcaatgaacatgtaagtgggtgtattttttggtagactgatttattttcttttgtgcatatacccacatatgagatggccgggccaagtggcagctctgcttcaaatacttttcaaatctccagactgctttccacagtgcttggactaattcacattccacccaacactgtacaagtgtttcctgttctccgcagcctctctccagactgctttccaagattcctctcctccactttgacactttggtatatccatgtgtgtcctctctggttcagccagggacagagaaccaggaagacatcatgcattttctagagggagctggcttggggaatcaacgaccggagtagaaagtgcctttgtccatgcatcacaggcctgagggccctgggcaggaggtcaggaagagaggatgaccagacagctggggaaaccgggatgaataaagccagtttccttcctggtgaggaggggcaggtcgaagcctcgtgtccctgtagggatgaagcacactcacctgccactgctacctgccaatcaggtgacctgcagagcagcagctcctgagtcactgatggtgacttcctcctcctccaaaccctctaggatctgtgcttctcagagtgggaaccccagcaggtccccaagttttcaatggattcacctagctagtgtctctcctcagccccatccccaggctcctgccctggtgctgtgtacagtgtcacaacaggggtgacagtaacagctggtgcctgcactttccaggccaagaagtttgaaagaagcaagtcacagggccagccgggatatggggtaatcacacaaatttccttcttggaggaagtgctgggaaacatccttgagtcctcctcagctcacgtgcagctgctgctgttcatcccagtgcgggggacacatgagccctccccatgcccaggatggagctgtttcaatcacagcaggatgggaatgtgtcttctctatgggggcttttgaagcacagctctcctgttcctgagatttgagatttataaagacaagtcccacagagtggacctgcacaaataagacagtacaggatccccaggagagacatcccataagagaagggacaggcgggtcccatcacagacactcatcctcagaaaccctgaccggctactcaccttcacaggtccccagttcctgatcagtgcctgtgtctgctcctgagaagagatgaaaactcaagacaaatacttctcatgatcataggcttaaaaattctcaacgtaggaaatcaaatccagtagtttatcaaaaagttaacacactgcaatcaagtaggctacattctgcaaaagcaaggctgctttaactgctttccacagtgcttggactaattcacattccatccagcactgtacaagtgctttaacctatgcaaagcaataaatgtgatgctctactaaacagaatcaaaagcaaaaaccatgtgagtattccagcagatgcaggaaaaaagctttcaatagaatctaacaacgcttcatgataaaaaccctcaaaattatagacattgaaggagcacacctcaatctgatgagccgtctatgacaaacccatggccaacatcatactgaatgggcaaacactggaagcattttccttaagaacagaaacaagaaaaggatgcccgctctcaccacttctattcagcctagtactggaagtattcaccagatcaggcaagagaaagaaataaaaggcatccaaataaaagaaaaagaagaatgcaaaccctctgttttcactgataatatgattctatatgtagaaaatattgaaggctctgccaaaagtctcctagtattgatacattcgtttaggaatgtttcaggatataaaatcaatgtacgaaaatcacagtaacatttctagtcaccaacaacgttctggctgagagtggaatcaagaacatgctctcccaatagccaccaagacagtggaatacctaggaatagagttaagccaatgagatgaaatatctctaccagaaaaacagcaaaacacatgtgaaaaaaatcagagataaaacaaataaatggaaaaataaacattccatgcttatgaatttaaacaataaatatatgaaaaagttttaaaatttgtgattaattctacgtagcaatgccatttttttcaacatttacagaatattgttgctggtaatagcagtttagcatttgagtaatggaaacaccttacagaatcactttataacagttgcttcctgtagtgggttgcttcagttacctgatgaaaacatctgcatgtcacaggttgaaaacataaaatatgtctatcaactgagaaggttgtaggcttttgtcaaggaattacttcaagtcattcagaaaaacagcagacagtaaacgaaacttgttcaaattccatggagagtcaaagctgaagaaaatccaactagaagtgtccaaaggcccccaaggctcagttcctcggcaagtcccaccttctcaggttttccagaattttgtttttaactgatttacactgagtgaagtagattaccaggagttttccattattttaacataaaatcgggggctaagtgttgttattttataaagacatctttgaatctctcaggaaatttacctcctgagggttcagataagatcctactctaggttaagattacatgtttggcgcaatgaactggtacaaatcttactttagctttcatgttatctatttttccgcactgacttccacctttttattagtcaagtatatgggatggaagagtgcttctaagaggtccttaacttgcccatttcaatggattttcaagaagacatgagaaaccactttgtttgcaaagcatcccaaagccatgtcctgctccagaaacgtgatctcatttcctggtcgtttcttaactgacacgctctaatcagtgcatctgggccaatttgaaatgaggtgaagaaatgtgtcctaaagtaaagctaacattgtaataggaattcgtgtttaaaaacatttagttttattattgggcaggatccatcaacatataacagttgaagtttctcaacaggagtttaataaatataaggaatgtacagaagtgtttcctaatttaaataaaatgtagtgattacctaggctgtgagtgcaatcttggtaatcttctatgtccatgcccatcactctgtgcaccgcaaactaattttgacctcagcagaaacgggattaattttcaaattagtaatttttttccaatttaatttatttagatgattatgaatgactattttagcagaaagagaatcaaggaaacttgaactaaataaccagaatttaaaatgacaaacaattcaacaagatgccaggatgtgagtggctccaggcccaattaattcaaaactttatgtgcccaggttctgtattttcccaaaattacacatctccattccagcttcatgccacagttgactcccaccgtgtaagacatggcgacaccattcccaaaggtcgtgtgcaattctgaaaatggaataagcaaggagaggagatgatagtttatattctcctctgaggaggaagaattgcctcaacagaccacttctcctgcatctgtgactagaactatgtcacaggcacacatggagcaaaatccctcaaggggataatacggtaacattaatcagggtgatcatttttaatactataaaattcatagatgacactgcattccagcctgagggacagagcaagaccctgtctctaagaaaaaaagaacaaatcaatagatactgataccaacattttagataatgaaattttcataatgtaattttaaatacactcacatcattacataaatcttcccagaaatattcctagtcatgttgagtttcatcaacttttccagtgttcaaatctagaaatccaatagactcttgaggataaatcaaaatgagggcagtgaaactggtatctgctcagcacctgttaactcaggaggactcaatacacccttgcacactgctgcttctctgaatggctcacaaggactccagctcactctccatcctcctcaaacatctggcccccacttgccctaagttgactctctgctcttagtctgtgctctgaagtcttcccagaggtgaaagtgagctgtcagatggaacttccctctcacctcagcgtggaatttactgctacatttaactatcactctttccataatggttgatttcttggtctgttcattacagatcaaaggcatctgatttgaatctttatttctttgcatttgtctccatgacaattttgggaggttttaccgccagcactatgacacgatgtagtaacatgacacatttgtggttaacaacacctacaaattcagaagctcttcggttgtcttcccagcaaatatagctgcttcttttctgtgtatgaacacatcctggaaacacgtacacacccacatagatatatacatgcctatgacattttcttctctgtaagtgaaaattaacctcaatttcatacgaagttcatcatttccctgaaggtgaaggtaggtcgtttttcatctgttctaacaaatgctcagacaccagctagtaagtgaggagctaccctgcttctggatgttggatctgtctcttcccctttgctttaccacagaagattggccacttgtccaggtcccaagaagagagtccaggtttgtcctgataatatgactcatccaacttctgataactctactgttacacacattcatggaggtagcctattaattacataattcactaaacaaataccaaatacccacattgcaataccccatacccaagggtatgttcatgcattcagtgaaggaaaaggcttttcagagacagatagatcaggctagattggtcaatatatgggtgaaaacactggacttgaatgtatctgttttcccccatgtcacatgtgagacctgtcagacaggaccagggttccttgtgcactcagaggtgagggctcacagaattcctctctggtttccaggaaaggtaactgcagtaatcttggtaatgagaatatcctccagtgctgacctattatagagtttacatatgaaattttcactgcaattcacaatctactctttcacacagaagtgtacagaggtcaggacacatcctcagggtcacacattgagaatgatgaagatatgtcccacgagtttttcctaaggtctcagaaagaattccaggactcaaaaggtctcagagggcagctcccagtgccttagttaaaatggtggctcaggcctgtaatcccagcattttgggaggccaaggcaggtggatcacctgaggtcgggacattgagactagcttggccaacatggtgaaaccttatctctactaaaaatataaaaattagacggggggggttgtgcatgcctgtactcccagctactcgggaggctgaggcaggagaatcacttgaacccaggaggcggaggttgcggtgagccgagatcaggacactgcactctagcctgggcaaaggagcaaaagttcatctaaaaaatttattttaatttaaaaatttttaaaaaatggcccactccctagaacagagagattccctctaaacatgatggaggtcccgaactatacattaagtgaatcctggtgtgtctgaactcacatgattattacgttaagctgctgttccaatctacttcctcacctgggaaaagaggagccagggcatggctagttgaggccccaggaagagaactgagttctcaaagggcaaagcaagcatcctcatcccagggtgagcctaaaagactggggcctccctcatcccttttcacctctttatacaaaggcaccacctacatgcaaatcctcactcaggcacccacaggaaaccaccacacatttccttaaattcagggtccagctcacatgggaaatactttctgagactcatggacctcctgcacaagaacatgaaacacctgtggttcttcctcctgctggtggcagctcccagatgtgagtgtctcaaggctgcagacatggggatatgggaggtgcctctgatcccagggctcactgtgggtctctctgttcacaggggtcctgtcccaggtgcagctgcaggagtcgggcccaggactggtgaagccttcggagaccctgtccctcacctgcactgtctctggtggctccatcagtagttactactggagctggatccggcagcccgccgggaagggactggagtggattgggcgtatctataccagtgggagcaccaactacaacccctccctcaagagtcgagtcaccatgtcagtagacacgtccaagaaccagttctccctgaagctgagctctgtgaccgccgcggacacggccgtgtattactgtgcgagagacacagtgaggggaggtgagtgtgagcccagacacaaacctccctgcagggaggcggaggggaccggcgcaggtgctgctcaagaccagcagggggcgcgcggggcccacagagcaagaggccgggtcaggagcaggtgcagggagggcggggcttcctcatcagctcagtgctctccctcctcgccaggacctcagctgtccccaggcctcctctttctttattatctgtggttctgcttcctcacatcctcgctgcaggcaagaaagaagggagaaatttctctgtttaccattaaggttttaacagtcactggcacctttttttcaacaaattcccacaaggcccattttaccttcttgacaaagtatttcaaggcttctcaccatctcttgattggcgtcatcggctgcatcgtgtcctgctcttaaattcatgtgatgaaaccccaatcccagtggctctgtatttggagagagggattttaagaaggcaaataagttaactgtggccataaatgtgggaccctaatccactaggactcttgtccttatgggaagtggaagacatcagaggcctctctctccacatgcacacagaggagaggccatgtggggacgcgctgcatgagaaggtggccctttgcaagcctggaagtggcctctcaaaaaactaaccctttcttcacccagatcttggacgtcaaggctccagaacaataagaaaattaatatttgttatttgaaacaacctagtctgtggtatcttctgatggaaagccaagcagattcacagatacaattgtgttagctccgtctcctggagggagaagcagcccaccgaggctgacacatctctcagattatttttataaagaaaaatagatccaagatgaaaaccccaccacatttctgctgagtcattcacttagcaggcttctctgagatcagccctggggggctgtgttctaggtcatgtctctcactttccactatgagaatccatgtagatcatgagaaccagccagatggagtcctgatcccggcccaccttctgctgctccccaagtatcccaaagaaaaccactccagcgtcacccctgtgtcttctactctctaaaatcccactaaagctgaccttaaaccaggagatatttggggccgggctcttgttctcttcttcttagtcttccataaggtccaggtgctgagtaaagcctcagtaaagattgagcttcagttcccctaacccacatcattcccttacatccttgtcatgcatctgtcctctgtgggcactcagggcaggttacacaggaattgcctgaagctggcctcaactgatgtgctgagaccacgggtcatgcacatgtatgattccgggtcatgcacatgtatgattccaggtcatgcaggctctactgcaggacagacctgtgtcctgtggggcacagacagctgctgaccccgggtctcctctaataactcacacacctggtgtttgtgtgtgtccagatggccccatgagcacagcacactagggtggccaaccttacaggtggggccgtcagatggaatggacaggctggtcactcccatcatcagtgatttcccagtgaattttaaataaattaaacaaaattaacaacaaaggggaaggatatgtacctgtctctgggaggtatacagggtcccagaactgtgctgggagtgggtgtgaaacgcccttttgtgtggaaagccctccagcatgagtgaaagctgaaggaatgatcactgtgcaggtggaggatgataggcagctggcagggtacatttcctgaagctgttcctgggtgcatgatggttggatggcccatggtgttgagggctggactcacataggaacaaggaaattatcccatgggaatggcagaaaagaaaatggagatggacacccctggagacagcttattagatttggtggaggaaaaatagaaatttattccaatgaccccagcattttcagctaaataagagttgcattaatagacagaattatgaaaggaagggagaaggagtttatggagggaaaaaaaaagaagataaattaaaatttaaaactatgcaaatctatcaattggcagataacagagtggagctgatgcagctacttccttgttctggaaacctgccagagacacttagcattcctgtaaggccagtctagtggtgatgaacttgtccactttttacttttttggggaacttctcaaacctcctgcattattgaagaaaagctttaatccatgtaacgtatttatttggaagtttcttggctttgtttttattttcagcaacttgaacagaatcatgcacatcatgatatttcggtgaacaacaggccacctacaggacaaaggtctcattagattataatactgtattttcaccgcatttttccatgcttagatatgttcatctgtataaacatctaccatggtgattcagctgcccacagtattcactacacttacatgacatacagatttgttacctaggagcactatgctatcccacgcagcctgggtgtagcaaggtatttcatgtaggtttgtgtaaacacactctatgatccttgcacaatgacaaattgcctaaggacacattgttcagatgtattcctactgtttttcatttttttttagatggagtctcactctgtcacccaggctggagtgcagtggcacaatcttggctcactgcaacctccgcctcccaggctcaagcgattctcctgcctcagccttccgagtagctgggattacaggcatgaaccaccacgcccagctaattctttttttctattttttagtagagatgggatttcaccatgttgccctggctggtcttgagctcgtgacctacatgatccacccactttgccctcccaaagtgctgggattacaagcgtgagccactgcgcctggccaatgtatccctactgttaagccacaaatcatcgtatctcatttctctcccttttttgtccctgttaatattttcatgttgtgcgtgcattcttctcctagctcagtgaacatatttataaggtttactttgaattttctgctaggtaatcaatgtatctccttttaatttgtgtcagtttctagtgctttttttgttaaataatttggaccacttttttctgttttgtgattattgttattattattattttttactttctctgttgctttctcctcattagaagaaaaagctaccgtaatcactcttcacagaatatgcccagggaaaatgccatcacctatcaacccaggctgtcattgtggcatctcttaaaacttcataatggttgaaattttttgttgttgttgttattagtggcactcagacctacagaggattttaagttttgctcctactctaaattaggtggcattgaaattcatcctgcaggcagtctctgataaagtggaggaattgggcagttttgttatgcatatggttcataaaaataatatgagtttaaggttttctcagccaagtgctatatcctgatattttataatcacttctttgaatctctcttgggtttatcttttgaaaatttagatcagaatataaaccaggtttgaggctttttgtttggtgtaaacatctcctataggtcattgcgtgaaaaggcacagagtctatctgaggaggagaactcagggaagcctcacaacaacaggggagacaaaaccgaggtcactaaaaaaatatgaagcttctggctcctgcagcctccagacatgccccacaccctctcattgcacagaaatgaattcctttctctttcctgagtgatctttgccaagattcctctcctccactttgacactttggtatatccatgtgtgtccattctggttcagccagggacacagaaccaggaagacatcgtggcttttctagagggagctggcttggggaatcaatggttggagtagaaagtgtctttgtccatgtgtcacagccctgagggacacgggaagaaggtcaggaagacaggatgaccagacggctggagcaaccagtatgaacaaagccactttctttcctggtgaagaggggcatttggaagcctggtgtccctgtaggggatgaaccacactcacctgcccactgttacttgccaacgaggtgacccgcagagcagcagatcctgagtcaccgacagtggctgcttcctcctccaaaccctccaagatctgtccttccaggagtgtgaacctcagcagatccgcacgttttcaatgggtccacttagctagtgtctgtcctcagccccatccctgggatcctgtcctggtgctgtgtacactgtcacaatagtggtgacagtgacagctggtgcctgcactttccaggccaagaagtttgaaagaagcaagtcacagggccagcctggatttggggcaaacacacaaatttcactctgtggggaagtgctgggaagcagccttgagtcctcctcagctcacgtgtggctgctgctgctcatcccaggtgggacacatgagccctccccatgcccaggatggagctgtttcagtcacagcaggatgggaatgtgtcttctctatgggggcttttgaagcacagctctcctgttcctgagatttgagatttataaagacaagtcccacagagtgaacctgcacaaataagacagtgcaggatccccaggagagacatcccatatgagaagggacaggcaggtcccatcactgacgctggtcctcagaaaccctgaccagctactgaccttcccaggtcccctgttcctggaacagttcgtgtgtctgctcctgaaaagatgcccatcaagagtccccagggttctgcccccttccttgatgtgcctctgggagtggggctggctgggctgtgggtctggcgtgaccctctccacaggtcagcggctcagtgcaggctgcaccgactcggtggggctgggctgtggctgaccctcccagggggagcctggactcttcttaggggtatctgcaggatcccaggttctgggagaacagggaagccacagtgtgtgcagggccccatctccagtaaagtgtttgctgtcgctctgttgacaagggcatatccccaggcctaggggcactgtgggcgcacgaccaatgcgcgagacacagggagtaaggcacagttccctcccattactgtgaggacactagacacagtgtgtgtgtgtgtgtgtgtgtgtgtgtgtgtgtgtgtgtgtgtgtgtccattactgtggggactctaaccaccgtgtgtgtgtgtgtgtgtgtgtgtgtgtgtgtgtgtgtattaggagttttgcagtggcctctgagacccatgatcttgcaggtttagaaattatctgatgagatgttcatccacaggaaccgacaagagattaggtgttctcccaaagcccctggaagctcctggactcactgtgagtgtggactgatccagtgcttccagagctccacagaaggggctccctggtggtttcatagaatccttgcttggggtgtttctgcagagttcactggctttcctacgaccaatttaccattgcaagcgatggcgtcagcagcacatggtgtcacgtgtcactaaaggagcattctgagccaggacacagccacttcatactggggggaaaatgctctgggagcccagacaggagcctctctgcagtgcaagggctgggctgcagggggcgctcaaggcccacccagcacaggctccagccccagagcaggtgcacaggaggctgcggatggagtccccttaagatctgtgtcattcttctaaaaaaatctaaaataagtatttgacaaaaactgctgaagagtccataaatatcctattcaactgcaagaatttatcaatttacactggagatttctaaccctgctacatatcttaatagtaagcatctggaggtcaattaagcttttattttatataaataagtgcaacttttggagaaacacactcatcccccaaataacacattcatgtattaaagcctagaaatattttaaattacctctgagctattcaagtgtgggttcccagtgaagtcctgttctagggaaaattgttctccagtgggagaagctctgtcaacatacagtttagggatatggcagggcacacatggcctctaaggggattatagcttgaacccttagcatcctcctgttgggtaatccatgtgtcatctctccactctttctcatgctgtgttaggtatgaaatagcatcgctcatgaatatgcaaataactgagatgactatagatatctttgtgccctgagagcatcacccaacaaccacatccctcctcagaagcccccagagcacaactcctcaccatggactggacctggaggatcctctttttggtggcagcagccacaggtaaggggctgccaaatcccagtgaggaggaagggatcgaagccagtcaagggggcttccatccactcctgtgtcttctctacaggtgtccactcccaggttcagctggtgcagtctggggctgaggtgaagaagcctggggcctcagtgaaggtttcctgcaaggcttctggatacaccttcactagctatgctatgcattgggtgcgccaggcccccggacaaaggcttgagtggatgggatggagcaacgctggcaatggtaacacaaaatattcacaggagttccagggcagagtcaccattaccagggacacatccgcgagcacagcctacatggagctgagcagcctgagatctgaggacatggctgtgtattactgtgcgagagacacagtgtgaaaacccacatcctgagagtgtcagaaaccccaggggggaagcagctgtgctggcatggaggaaatgacaaagattattagattgaagactttctcagaaaatgatattaagtcattaaggaaaaggaacaatataaacgtgtatttgagaaattttaattatttgagagatttttcatacaatatttattctgcaagcaaatttcagggattgaattaataaaactgatacagaacttcctctgtaggtatctgtgtaaacatcaatttctgaatcagtgttgtaaatattttggaacacacacacaaatcacattttatctctacttttatctctatttttaaaaatgccaaaaaaactcattttgtgcatgtagcattttgaattcccaccatcaatgcatgatagttcttggttttccacattcatattgccatttatcattatgagaattgtgtgttttaaccattctaataggtgagtaatggtatctaatttttagttaaatgcacatttccctaataaaaattcacatttaacaattttcatataatttttgccaagatgcctcttctcatatttggttcatttttaactgcattgttttcttttgattagttgtaagtttacttgcatattgattataaaatcatttaacaaattaaaagaattcatttaacaaatatgtgacttggaagtattttctccaagtctgcggctgtcttttactcccttatcagtatgtattgcagaaaagtgtgtgtgtgtgtgtgtgtgtgtgtttatacaaatttagatttaaaaaatgtaaaatgttattcatccacagatcatgtctttggtattatatctgaaatctcattataaaatacagtaatagcaattactttttccacgtctctaatctcaggctacaatcaactcatgagtgtttaagcttcacctacttgattagaggactatcaacctaacatatttggaatacttctgtaaaaagatgtgttcctcttcctattatttctttatttgatcacttattaatatgtgtattggtttatggatgtctatttcatactctgaagaagatccatgctacattattcattttatttttcaaaccaccacggctttattatgtgctgggagctcattgagtttggatcctgcatccttacagctcacctcatgcttttgtttttgaacacttccctgtttcctgctattataataaattctaaactcattttctatattatctttttcatacatagaatcagccatttttctaaagattgcttgcttctgatgttaaagaatagtatttaaaaaattgtaatactgggtatgtgcattgttaatgtggtataagtacttgcaggacctctcaaccaactggcctagtaaactatgtatctaaccttctgtaatgtgattacattaaaaatgagaacacactggtctctctacccaattatgctaccacatggatctttctagccttccttccttgactgtctataacctctcactgcaaaatgaggaaccccatccaaccatatgccattttattacttagctgcacaatttcaggacacatgcatagcagtatcagaaatgtaaagctgtacccttgtaggaaacatgtttatctactagaatagagtgcttatgttcagtttctttacactttaaacttacagagtttcctcattttcaaagttccttaggtcagcaacttcattttccactttcttcagtgaggtcatttcaatgacactgtataatttgatttatttgaaattctataaaagccaaaactgtagtcaagtgaacaacaacatatagaggatattcgaggagtttagagactggtataaaataagttaaaaagacactgtttaagaagattaaaattatttttagtgatatgcaatggttcagatatgacacaattaatttgtctaagcacatagttttgtgatggaaaatataaacctaaatatatacaattaaaaaaaaatttagcagttcattaacccaaggatcaaatgcagattgtataaaattatctcattacttattttgtgagggtggagatttcatgagatgtatgcaacaaagaatgaggtaattttcctgatttgcatataagatgttgccattcactaaagacctttaattttttaaattgttttttttttaaatcaattttctatgtgacccaggtttttttctcttgacaagcaaataacccacaggattattttctttccttggttgagaaatatttccccaaacttcagctcagttcaggcatacactgtccctgaatgggcatttaccctcagatgggtacacacacctgtcaacatgtggactcttctgtcagacaaacgcacctttactcacgtggattcttctctcagacaaacacacatgtccccacgtggactctttcctcagactaccacatatgttcttacatttactctttcctcagaaaacagacatttcctcatgtggactcttgtctcagacaagcaaacatgtctccatgtgaactcttcactcacataagtacacatatgtccacattgactgtttccttacacaagtacatatatccaatgtcgaattgttctgtggcaaaatgatctcaagataatgataatcataaaccccctccctgacaaggcatagatctgtatttttttcattgcaacctaactttgccttattgtcaagaacagtagtttgcagctctaaatataccaattagagacaggtgtccattttctctggaaacgtatttttatgttcttactggacatatttgttgataatgtttgctattatgaagataccccaacagtgtccacattagagaataaaaaatagtaatgggcagattaactctgtgcatccagacccagaaatcctttgaccttgacttccctgaaatgtagacacagaggatggatgagcaatgctgagcagtgcacccatgaccacaaaaagaaagacgtggaaatgtgtcccctccacttctcatgaaaggcagctcatcccctgttccctcaggccctggcgaggagccaccccatgtctgtgcccttcctcagtgtccacaccgtggggtctgcattgatctggattctcttctcatccccgtcaatattagtgtccttcgtaaatcaggtccagctgtggcttctcctcacggggctgttctcagtctgtttgctgtgttcacggaagtcctgtgtgaagtttactgatggagtcagagggggaaaaaatttacagcccagtggtgagactctcctgcaaagcctctggtttcacctttactggttacagcatgagcttggtccagcacgcttcacaacagggataggtgtgggtgccaacagtgagtgatcaagtatgaattctcagggttactttccatgagtacaaataaattaacaatctcaagcaacacccttttaagtgcagtctgccttacaatgaccaatctgaaagccaaggacaaggtcatgtattactgtgagtgacacagtgagggaaaccctgtgtgagcccagacacaaagctcaccgcagggagacaggaggggactatgtggtagatgctgctcagaaccaccagggggcatcaggaccatcagggagggtgcacagaaccaccaggaggggctcaggacaccagggggcgctcagaaccaccagggggccctcaggacaccagagggtgctcagaaccaccaggaggcgctcaggacaccagggggcgctcagaacactaggaggtgctatgaatcactagggggcgctcaggacacaagggagcactcagaaccaccagggatagctcaggataccagggggcactcggaaccgccagggggcgctcaggacactagggggcgctcagaaccaccagggggcactcaggaccatcagggagggtgcacagaaccaccaggaggggctcaggacaccagggggcgctcaggaccacaagggggccctcaggacaccagggggcactcggaaccaccagggggcactcagaaccatcagggagggtgcacagaaccaccaggaggggctcaggaccaccaggaggtgctcaggacaccagggggcgctcagaacactaggaggtgctatgaatcactagggggcgctcaggacacaagggagcactcagaaccaccagggatagctcaggacaccagggggcactcggaaccgccagggggcgctcaggacactagggggcgctcagaaccaccaggaggcactcaggaccatcagggagggtgcacagaaccaccaggaggtgctcaggacaccagggggcgctcagaacactaggaggtgctatgaatcactagggggcgctcaggacacaagggagcactcagaaccaccagggatagctcaggataccagggggcactcggaaccgccagggggcgctcaggacactagggggcgctcagaaccaccagggggcactcaggaccatcagggagggtgcacagaaccaccaggaggggctcaggacaccagggggcgctcaggaccacaagggggccctcaggacaccagggggcactcggaaccaccagggggcactcagaaccatcagggagggtgcacagaaccaccaggaggggctcaggaccaccaggaggtgctcaggacaccagggggcgctcagaacactaggaggtgctatgaatcactagggggcgctcaggacacaagggagcactcagaaccaccagggatagctcaggacaccagggggcactcggaaccgccagggggcactcaggacactagggggcactcagaaccgccaaggggcgctcagaagaagcagggggtgctcagaacaccagagggtgctcagaagcaccagggggcgctcaggacaccaaagggcactcatgagactgtggcaagggggtgctgagaaccacaggatgtgaccaagacaccaaggggcactcagaactgccagggggtgctcaggacaccagaggattctcagaaccaccaggggatgctcaggaaactagcgggtgctcagaaccaccggaggacactcagaaaaccaggggatgctcaggaaccaccagggggcgcccacgacaccagagggcagtcagaaccaccggggcatgctcagaaccaccagggggcgctcaggacaccaggggatgctcaggacactaggggcgctcaggaaccaccaggggacgctcaggacactagtagggtctcagaaccaccaggggatgctcaggacactagggggcgctcaggaaccaccaggggtcacccaggacaccaggggtcgctcaggaaaccagagggtgcccaggaaaccaggggaggttcaggaaccaccagggggcactgaggacaccaaggggtgctcagaaccaccagggggcgctcaggaaccaccagggggcgctcaggacactagtaggcactgaggaaccaccagggggcgctcaggacactagtaggcactgaggaaccaccagggggggctcaggacactagtaggcactgaggaaccaccagggggcgctcaggacactagtaggcactgaggaaccaccagggggggctcaggacaccagaggtcgctcagaaaaccagggggtgctcagaaccaccagggggcactcaggaaccaccagtgggtgttcaggacagcaagaatggctcaggacaccagggagcactcaggacctccaaggggctctttggaggcagctccatatcaggtacctggggaggatgaggtttccttttccaccttggtgattcctgacctggtcaagcaaaagtcttccccaggatctcttacgatgtcttccttgtaactcatggtttctttcacctataaaacattaacttagaacaggggttcaattcaacttttaactctgcctattttcagagttatactagcaatgatatatctcagtatattttttttaattgtgtatattcaatccaaagtctggctctatgcacaatttttttgttttctgtgctgtcagacacactattgtaaatgcttttctaacaactcagcatatgcatggggtccagtttcttttcctttcatcggctgtttgtgcagatgaaacaccactttaagggctcctgtcctccactttggcccctggtgttctgcttctcaaactttctccatcttctctttttctgtcaaaatattttatcttcctcagtctccatgcaggaaacaggaagtccttttacttcctgtcctccatgtctggtaaatcagttcacttcttttcatgatcactgaagccaaccaagtttaggagagtaacagttctccttagaatacactctacctgcagaccctctgccctcatcacacttttctagggtcctgcagacataacccccacccattcctctttttccctaagtaccacagactaggctctgcaacttatgctaccctctgtgtgctcagcccaggggctcagtagtgctttcatgaagtccaaatccctaatgtgtttgcccactctcagaccaccctccagcaagctgccattgtgattgaatcctgcaaagcatgggctgctttcagtttcctattgctggatgttctttattataaaggcatattggcaaataacgactagagtttgtattgaaaattaacgccaaaaagttttttaaaaagtttttcaaatagaaaagttctatcctgcctagtttaaaaaaatacaatgttactttaatcaatgatttaataaaaatttaagtgatgtttgtcttattagttattcaatttattaataactgactgatatttaaaaagtaaatactggctgggcgcagtggctcacgcctgtaatctcagcactttgggagggtgaggtgggtggatcacctgaggtcgggaattcgagaccagcctgaccaacatggagaaaccccctctctactaaaaatacaaaattagctgggcgtggcggggaagctgaggcaggagaatcgcttgaacctgggaggcggaggttgcggtgagccgagaacacgccattgcactccagcctgggcgacaagaccaaaactctgtctcaaaaaaaaaaaaaagtaaataccattgtacacttaagtaatatatttggcaagaatggcatttacattcattcaaaaatgaaactgcaaatacgagttacattcaattaaataattaaaataatatagaaaaaaatgggtgtgttgttttggtgtttaatatacattcatttttgcatggacgggtatatgtgtcattgctgggctgttgtgtatgtgtgcgtgtgtgtgtgtgtctgtgtgtacaactatgaagtttaaaatatattattaaattacgtagttatattaatccaaatttatcatgttaaaatattaggaaaaaaacaccagtagagaaattacagagaacatcagcaatgcctacagcatttacaagagtcacattaataacaaacaaactagttcaaatgtttagatatgacacatgcagtagaaaacgttcacatggtattaacacaaaaatggtgcacaactgaggaaattataatacgttcatgatattggctacataaatgcttatgatagtaatgcttttcatccatcaaatgcttatgataatgcttttcatccatcatattatagatgataaaacaactctataaacacttccatcactagcgtttaatatgagatgcctcacatctttttctgaaataaataaacatctgtccaccacttcgatgatcatttcaggattatcctctgaaataattatccataataattttagtaacaatattattttcagaagcctattttataaggtctttgaactattatttttatgattgttactttatattttacacactttttatttggaataattataggttatcagaacaattgtaaggaaaatacagtgtgttcacatccatctccaagttttcactaaagttaatatgtcaaaaaaaacatgggacatgggactaatatatttacattgataagtttctgtttattcagctctgggatttatttgaattttgccaatttttaacagtttccttttttcctttttcttttctttttgagataaggtgtcactttcctattgctttttgtttgtttctttgttcaacccacgtaaccacatcaaattcagtcaccatgttcctctcatatcttctggttaatcacagtttgggttcctgctgtcttcccattgaatattctataaatgaaactagtcaaataagttgattctggtcacttatatatttacctattttatcacgtttgttttgtcaatcacagtaagtgtcgaattcgctatctgttatagatgttagcctattttctatcccagatccattggttaaatctttggtgatgccttttagaaaactgatccctttaccctatgtaatatgccccttgattcctgaaagtcttatgtctaccttgtctgaatttaacatagctaagcacgctttcttttcgttcatattttcatggtccatgttttcctgtatttaacttttctatgtagagcaaatttctgtacagagctagtagttgggtcttgctttttaaatcaactataataattctattttaaaactggtattactatttttctgttaatttctgttttaatttggcattttatgatcatgtttatttctctattaacttattgtttagttcatcttttatgaatattgtattggccctaagatatacaataagaattgtgtataatcagattctaattcaaataacgtaaaacctcttcataggttgtagagctattataacttattcttctaaacactctttctcatccgttgtcttagtttattctcagtttgcacttatatgtgctataaaatataatatgtgcatttttatcattacatagacatatattagaacaattaaaaatataaaaactacatttcaacttcattttttcattcttgaccacatgttttatttggatagattcatgtttcggatgtatatcatatggctactcaccctggcagaaaatttgccaaagcacctactgaaggatgaatgcactagcaataaattttctcagaatcgatttgtcttacagggtattcatttgactttcgctttaaatgaaatttttaatatatatagaattccagtttgactttaatttgtaatttattttcttgtactcatgtattcattattttcttcctgaagatggtcacacattccattctgctgggccttcattatagatatttgtgtgtatctattcagggctatatttgcaatttatggatgccacaattatcagagttgaagtcagcttctgctgtccacagagatttcaagttcctcccatgatacttgcttttgtgtccctgtttgatcctgggtctttatatttagttttccccagggaggctgtctgtttcagctgtggaaagtgcaccctactgacagtttaaattgatgactgtgtggtgaaggaggttggacaaagcgggacttcctccaaccttctgactgagtctccttcttatgcaggagtagtaagcatagttctggggagtggccttccacattgtcctgtccttaactctttccccagggctggaacgtcttttcccagacacaactgtttttcaccagtgtccccagctttttacccactatccttaccctaaagagtaaggatttctttcctgaggaaggagatgggaggtgtttctggatcaagtttccttggtgtcgtctgtttccttttgtttctgttgacttcaccacagctcatatgacacatgctttggtggatttcccctggaggtagtggaggtgcattcaggcattccacaggagctgctgttcttttccccagtcaacaccacaagacaccagatgaggaagttgtccgtggatttttcaagttctctaggaaaagcttgcaagcactaggccaatctaacaccattagtacatgcatactaaaaaaaaaaaagtcattaagtatttctaggttagtctgtttctatctcaaatgccatccagtggcacctgccctacgtacactagcaggtaggtcctggttctctctgcaggctcctatcttctcagatttcagttttcttgtttgcttggtgaaatcaactcagatatgttgaatgttttttctctcttttatttgtagctgttcagcttcgttgttaatgaggtcagaataaaatcacagttttctcatttttttcacattcccacactgaatagctgctttccgtataaaagccagaaactgagagaacacattgaatatccattacaggtgaatgttaaacaatttgagatatgtttgtgtactggaataaaatgctgcattacaatcaagtcatcactcattcacataaaacatggccacattctcaaataatgtagggacctgagtgcccctccatctactggcctctcctggggccctagcctggccacaccttcttgcagggcagtcttggacgccctgggatcccgcaccaaaatttctgccctggcagaacatgcctgactggtggagagctccaatcgggcagccctcatgtgcacacaccagcttacacacttcctccgaatactgtaggttcacccaggcccacgtaacttcccacatcactttgcagtcacatgtctgtataggtgggttttgcttttcttgtcccaccattgcgtggagtgcagtcccctccccccaccccaaccaccatggcagaggaagctttggtggggaaaaagccagggccgctcctgtcagcgtcccgcacttgcgctaattctgcacagagaatagcagatcatctcacacattcagaaatcactcctgcttgtggggcatgaatacggcacccgggcctgtgcccacaagtgtcccatccctgagccaacacctcctccagtgtgaccttgaacacagtcaccaacagggccccacagacgcaatgcctctgccactgtggcgaacacctgcagggaggcaggcacccagacacccactagcactctgccacagctgccacacctccaacagcccaggacagtggattcctaaccttaaggagccggagaaccaagtcagggactagtataacttcccccagagtcagagcacacagtctaggtgttgggagctgagcactggccacctaaatttttccagaaatgaagccagttggctgaatccaccttataccacaatcaaaccctcaaggtcatccaatagggtaaaagaaaataaaaatgtatccaaaggtcagcaacttcaaagattgaaggtggataagcccacaaagatgagaaagaaccagtgcaaaagtcctgaaaacaaaaagggcgccctctttcctccaaacaaccacagcacctcttcaacagcagttctgaatggggctgagatggctgaaatgacagaaacagaactcagaatatggagagtgaaaatgtagatgaatacagctatttatggagaatactataaatgttcctcaaaaaataaagaaacaaaatctactgtagaatccagcagtctcactgctggctatgtatccaaaggaaatgaaatcaacatgtcaaagagatatctgcactccatgttcacgttcattgcagcattatttaaaatagtaaagatatggaaacatcctaaattcccatgaatggatgaatgaataaagaaaatgcatacagacacaacagagtaatgttcatccttaaataagaaggaaaccctgcctctgtgacagcatgcatgaatctagaggaccttatgccaagtgaaacaagccaggaacagaggaagagtcattcatgatttcactgtatatattaaagcagtagacttgcagaggtagagtagaatgttggttaccagggcctagaggggtggactgggaaagggagatgtgggttaaagtgcacaacgttccagttagaccggaggtataagttatgcctttctaatgcacagcatgtcaactatagctgataaggtagtatatatttcaaaattactaaaaaaataaacattagaatttccccactaagaaatgataaatttgtgaggtgatgaatataagcggcttgagttacccagttcataatgtatacatgtatcataactaaacaacatatgtcataaatatatgcaaaaattatttgtaatttataataaaataagtttcatatttaaataattacattaagaaaatgaacagaaactttcagatttcaagaatattttatatatatatatatatatcttaaaacaaacttgcaacagaatatagaaataagttttacgactcaatggaaaagaacagaattcaataaaaactggctaaaagaaacaacagctgcatcattatagaaaattctggaataatcagccatataaagattctcactctcttagaactagaattccgtaggacttgtaattcctcctgacctgggtgggaggcaaaaggaagaacagctaatggtgattcagtgagttttatacctgtgtgtacttctgtgctcactcagcagaaagaaaagaagaaaagaaagaaagagagaaagaaagaaacagaaagaaagaaagaaagaagaaagaaagaaagaaagaaagaaagaaagaaagaaagaaagaaagaaagagaaagaaagaagaaggaagaaggaaggaaagaaaagaaagaaagaaagagagagagggagagagggaaggaagggacagcagaagtcattgtggtgtgtgtgaaagcacaatccttgggctcccccacatccatctctactccagtcccatcaatgtccagcaaatacattttctaagatgaagtattttaaactttctaaatcctgctagaaaacccctcagctctttcagttttgctctatcacttgaattattgaattaaatctagtttttgtgggcctatcaataccataagccaaaataacacatgaagaaattgcactgagacacatgaaaaccttctgaaagctccataatttcagatctgcattcttatttccccgaacctaaatcactgaatagagactcagaacgagttgatcttgttcctgaacgtgcacagagccaaggacatcctgtctgtctggaacagctcaggtttgttcctgtttctcctagaggatataaaatcttgagttagggaaaaacagccagggacaccctgggctttgttcttctctcccctggaggcaggatgtccttcagagctttgtcccagtgggtaacacagctgctgaggtgtacaacccacgtggcctcgttttggtcacttttgcatggtgagcctgctttgcaccatggcctacaatatgcgtgtgtaactaatctgtctccatcttcaaaatgacattattccacatcaaatctagtgcaggtgcctcacacagaacattctcaattacctccatcattcataaaattgatgccattaatttcaagtatacatacatcagactcatttaacgtattgttattctcattgtttgaaacataacttttagatcaaataattaacaataataaaaatataaattttgaagtcaggtaatgtgatttctctagttgtgttctctttgctcagaatggcttgggctgttctgcatcttttgtttttccacatatattttaggattttttaaaaatttctgtgaagaatatcattgttgttttcatagggattgtactgagtctgtagattgctttaagtattatggacattttaacaatattgaatctttgaattcataaacatggaatattgttccatcttgtgtcctctttatttcctcaatgttttatagatttattgtagtttttttttactttgttcattacacattgtatgcctgtaccaaaacatcacatatacccaacaaatagaaatatatatactattatgtgcttataacaattaaaaattatgtatgtatattgaatctattcaaaatcagaaactatttctttttactgtttgtaaggtcttgtctctaggctataaaaagaatttgtaaaactcaacagaaagcataatataaacagaattctaaaatgagtgaaaatctgaacaaacacctcaccaagaaaaaatgttatctgaaaataagaatatataaaattgttcagtatcaattgtcataaactgatactcatatttaccaaatacaaaagtaaacatgatgtatttcaacagaattgattctcaaatatttgtatactcatacagtggaatactatcagtcataaaaactatgggttattaattcagaagacaacattttaacattttttctaagtgaaggaagatggacaaaagagactaagtattgtacaattccattcatgagacctgctaaatacagtaaaattaaaaggattttaaaaacaggtttgtgataggcagggcttttggggaaagacaagagactgacttggcaaagctcaggggatatttttagggtaaaacaaactgtgtgccattgtgatatgcctaatttcttattatatttgttcagagttaatagtgtacgtttcaaccaactcggtgattttatattttctatttgctgatagagacatgttcatttttgtcaatcactttgctaaatgtggctgagaggctgttgaaatgaacgctgagcaaatgtattcaccaaatctacaagagcaaattatttgccaattgctgattgagtggggtctataatgtatttgagattgggtgtggggatgttattgtgtgagatcatgatgtttagaccatgacactctctggtgagggatcactcattcattgcacatttaatgaaaggcaggtaggaggagcagaaggggatgagtcacactcctgaccacagccacaggttattgaaggcagaactgatgtaatcccctaaggtagaccactgcccctccaaggtgaccttatcctagagttgacacacatcctgggacaccagagacaactccttctctcccctttctctgcacttcagctggaagcaactgtctcaccgagcaccttgtgttaaggaatgagagttcctgttccaggtgtgagggcccaggtgcatccacttgatccagcacaagagcaagaacagccttccagaaaatgacatcgcctgaggtataaccagctctcacctgctgcagcttcctctgaataaaaaggaaactgttgaaacttcctcataagtgtcctgctgtgccattccctttgtccccacatgttcagttgtgtctgtccagatgtcacttttgtgtagggagattagggttctgcttccagtaccagaacacacatgacctcttaggggacttcagggttttgctgacatatgtgatgatcttaaaagtcattagctccatttctacatcaaaaaacatctgaaccaaaggagcacataggctcaggcctgtaatcccagcactttgggaagccaaggcagaggaatcacttgaggtcaggaatttgagaccagcctggtgaacatggtgaaaccccgtctctactaaaaaatatatacaaaaattagccaggcgtggtggcactagcctgtaatcccagctacttgaaaggctgaggcaggagaattgcttgaacccaggaggtggagattgaagtgagctgagatcgcaccacttcactccagcctgggcgacagagtgagcctccatctaaaaaaaaaaaaaatttatatatatatatatatatatatatatataataaatatatattatatatcatatatatattttatataatatatatgtatatttttatatattatacatacatatcaatatatgatatataatatgtatatataatatataatatgtatattcatatattatataatatgtatattgatatatattacacatatatattttgatatatatatatctccaaaccatctaaatatcaagtattttttaatccatctaagagctgaaattgctgaaaaaactactccctccaaaagctgtagagacaggcacatccacagtcacagcagagacttgctgacttggaagagaagctcctggagacacattggtgagaacatttacctggtgattatgctgaatgtctggaggacaaatgtggactagggggagggtgagcactcctagaggctgtacaccccacacttgtgtggacttgccctccagggccttcaggttctcgtggaagcaattaaaatagattccctatagccatgaactggggaggagtaatcacggagaaaagatgcacaaaaagacttttctagaaagctcatccaagggaaggtattctccaaaatcttagtttatgtgggggaaggaaatacttccaaattacagacccctcctcctcagccttcctctatcacgcaaatgataaaattagccaagaggagtcagattcaaggcggtagccctgggtgcagcatctgcagaagggaggaaagagagaaaatcagctgtatcactggagattccttgtgaaggtcactgctcaggagaagagggcaaccaaaccagggagagtcaactgtaagaacataccatgctcccctgccccacacattacctcctcaacagcatcattaatatggattaaagagggcagtgtgattgctttagatctgtttgagaaagaaagtcacatactgaggcctagggtcagggtcggcggcacttcccgtgagtaagatactacgaagaaggaaaaattaggggtccataactgtgaaaatcagccacagtgtgtgtgagaatgtttgtgtttgtgtttctgtgtgtttgagtaggagttattggaacagcggacgtggagtgagctttaatccacatccatctgcagcttcaggtattctcagatgcagtattcatctgcaagagccgaaatgagaaaagagccacctccaacccccccagagttttagcctccctttgtttccagtgatccagtgcatctagacctccaggaagtggactccctggtgattttagcgattcttctcttggagccaccctgaagaggacattgggtttccaaaggcccattcactatttcaagaagtggtgccatcagctcatgttgtcactgaaggagcattctgagccagggcacagtcacttcctagtgagctacagaggctgagagaaaaatgctctgtgagacccaatgggaagctccctgcagtgcaaggtctgggtggcagggagcgctagggcctcgcccagcacaggctgcagccctggagcaggtgcaagggaggctggggaggggttcctcccagggtctgatgtcttccttttctcggacaaacatgctttaataagttaaacaagactttagtaaagactattgatgtgtctttgtgtctttcagtatacagttctatttgtaggatttatctaacctaacaagtcaatgagaatcacatgtaaaaggagaaatttctaggattttcagatatcttaataggtaggagatggagaaaagggatggttttattaattcagtgcttgccaatcttaacagagacagtagtaagacatgcagaaagcaaagcccagaaaagtatgaaggtgtcaaagtgccatttaagtatgggttcacttggaggaccatgttctgcgggaacttgttttcagcagacaatctattttagcagagttctgggcatacaaggggacacacatcattaaacaaggattgggacagggacttcagcgtcccactgttgcatggcccataaattatgtgtgttctctttctcatcttggatcaagtctagagctatgaaatagtatccctcatgaatatgcaaataacctgagatttactgaagtaaatacagatctgtcctgtgccctgagagcatcacccagcaaccacatctgtcctctagagaatcccctgagagctccgttcctcaccatggactggacctggaggatcctcttcttggtggcagcagccacaggtaagaggctccctagtcccagtgatgagaaagagattgagtccagtccagggagatctcatccacttctgtgttctctccacaggagcccactcccaggtgcagctggtgcagtctggggctgaggtgaagaagcctggggcctcagtgaaggtctcctgcaaggcttctggatacaccttcaccggctactatatgcactgggtgcgacaggcccctggacaagggcttgagtggatgggatggatcaaccctaacagtggtggcacaaactatgcacagaagtttcagggcagggtcaccatgaccagggacacgtccatcagcacagcctacatggagctgagcaggctgagatctgacgacacggccgtgtattactgtgcgagagacacagtgtgaaaacccacatcctgagggtgtcagaaacccaagggaggaggcagctgtgctggggctgagaaatgaaagggattattatttttaatgttgtttacagtatgtcattaataaattgaaaaaaagtaacaatagaagtatatactctaattatatgggaactttgttttttcagttttttcatttttttttttttttttggtttgtttgtgacagagtctcactctgccacccaggctggagtgtaacggcacaatctcagctcactacaacctccacctcccaggttcaagcaattctcctgcctcggcctccagagtagttgggattacaggcacccgccaccatgcccggtgaatttttgtatttttagtagagacggggtttcaccatgttagctaggctggtctcaaactgctgatctcaggtgatctaccctcctcagcctcccaaagtcctgggattacaggcgtgagccactgcgcctggcccaattatatgggaattgtttatataattatcaccctataagcaaaattcatggaggaggaaaagctctactgaagaaagctgataccggcattcccatgaaagtatctgtgtagaagtaagtattaaaatcagttgaataggcaaggcatggtggctcacgcctataatcccagcactttgggagaccgaggcaggtggatcacaaggtaaggagttcaagatcagcctgcccaagatggtgaaaccccttctctactaaaaatacaaagaattagctgggcgtggtggtgggtgcctgtaatcgcagctattcgggaggctgaggcagagaattgcttgaacctgggaggtgaaggttgcagtgagccgagatcacgccactgcactccagcctgggcgacagagtgaaactccatctcaaaacaaaacaaaacaaaacaaaacaaaaaaacagttgaataaagtaccttagagtcatctgttcaattaacatgtttaactccaaagaaatactgaaaatattttccaaaaaggaagtgccattttacgttcctaccaacagtgaataagattttcttttctggagccttgtcagtattcactaatgctttgctgtgcagccgttgtaatattatagtaaatgagtagcagtatttaatggttgttttaaatatacatattcttaatacaaagtcttgatgaacacttttttatacattgttttatgaggtgtgtgttcagatctatgtatgccagaaatgcctggcagcgttaatttaagcacactgtgagaatgaccctatagtttatgaagaatgtatgttcagagctctgagctaagaaatccaggagctgtcaacccagaagtttattccttgtctgtgaaggacatctgaatccctggcctatcccttggaacacaggatgtccaggtgattgatgctctttgttaaatctggaggttgctaggtagagggtgctaagtgaaaatcataatataaactacacgtgttttacaaatggtagtggttttcctgtccaacacacttttcctgggccacattgtatgcaagtcctcaatacaccctaggtcttgttcatgggctccaggtctcctcttcagccttttggacatggtgccatgcctattacagtcaataggggtctagcatgacaactggtaggcccagaacaaggtcaaagaaaatcctgcaagctcttagacaacagtgtcaaggaaggggagacctgtggggaaatcccaggcaggccatgcacatctctgtgggcccaacagctgcaatccttgatggatggggcccgctgcatgtgtacggggatgcctccaaaatgccaaaagttctggaggacctgttgcctgaggtggatgtgacaatgtgacaaagtgacagtcagattcctgagctgtggcagctgttggccactcctgactgcactctgagcaaccactgaggcagagctcattgcacaggctagggtgtgtcagccacgagaacagttgtaactataatgagatgccgcctgtagggataggatagcaaattggagaccattgtttatttggtaggccatttaaagtgttgctgactgccacaccaatgcattaggactactatgactacgtcatcctgggagcctaagtcctggcgtccgatgtagagctccagtgggaaggagatgaaggttaggatgagtccataaaggttcttgctctgcagcccctgctttgctgtctcacttggtgaacagagaatgggaggtcaatgcggacaaagtccagggtccaggcttatcagtcaaatacttggtgtcatctggttacataagactatagttattccatatttcatcatagataagataagatgcaggtctactcatgtcccaccacaccaaagcagttggaaacctcccaaggcctcctgggacattggcgatcctttattccccatttcggcaaaccccttgggcccccatggcacttagacaagaaggtgccccactgcgactgttccaaaagggaggatgagggctctgaagaagctgaagtcacagtgaaatgaatacaaaccttgggagttctagtgcagggacagccctgtgaattggatgtagtcagttaccctgaggggtttaggtggggactgtgttaaaggcaaggacataagtgtgtgtccctaagaccctggtctcaaagacagaaggaagctgaagtgagatatactgtttaggagtagcaactgcactacatgtcatgccttacgagtgtaggatgtgacaaagagggccactccacatccggaacaacctttagcaggctggctaaaggatgccttccagacacaaaagccttggaatgccaggacacagtctgtagccaaatggtacttgtggtggtcaccaccaacataaaagtgggccaactgtgccagcagaagttagccccacagaactttcccccacctaagagaaggcagtgcaccacaatgcggaattccaccactgtggaattgggggagcttagaattggattcagacacaaggggagagagtggatcacagggtggcttctctatgggatagggggtggagagtattatactctctggactcaagatgagtaaaatgacacccatcacaaaccatccagccctatgatggcacctttatggtaagtggttgcaggctccaagggggccgggtccaatgaggaagatgcccccacagctcgttctcaatggcagactatagaagagttgcaggatatcttctgggagtcgagatgaggcatgctaattatgctgagaattattgaagtcccaacaatgaattgtttactgcaaaataaaagctacagttatgtattcagtgcctacccaatggcatggtgcactgatttccacgttaagccccctgggagggcagccaacatttcatgtgccccaggtagttgctgacttaggagaaaagaagaaactgagtaagcaagggatgcaccctactgtgatgaagaacaatggcaccaaaggaagagagacagccaaggagccagtcagggtggccagacaacgaatgtgctctaactggcaacacctaccagttctctgggcccatagcggcaataggtggttatggaagggccacggaagtcagaccggttgaactagtgatacgacctgggggactgccacccagaccctgtgtagtatacacagcttccatcctagaacacatgagaatggatatcttcttaggcgtgaccctccaaacaacggccagggaattccaacggagagttagagtggtgatatgtgtgaccaagcagaaggcaaactggatgccagtagagctgccaacccatggggagtcccacagctggagcaacaccacccgccctgggaggggaagatgatccaatcatgaagattgttaaggagctagcccaggtaggcattaggaggccactgcatggttcctacaacagacctgcatggcccatgcagaggccagttgagacatggagaatgacagtagattactgggagttaaataaggtggtctcccgagtgaatgcagctgttcctaatatctcctccagtctgacgagaataggagaggtgttagccacgtagcatttccttatcagtttagtcaataccttcttcagcatttctgttgccccagagtcaagatcaatttgcattaacctaaaaagaacaatggacttttactgtcttgttccagggatatttacacagcccaaatctcacagcctagtgacctccaacctcagtcgatgggctgacccaaaggggatacatgttttccactacattggtgttatcatgataacctctgagtcttttttcagcttataaattacagcccctgtcttgctgtctcacttgctgaatagaggatgggaggttaatacagacaaaatccagggtccaggcttatcagtcaaatagttggtgtcatctggttgggtaaaactaaagtcattccatctgccatcatagataaggtgcaggcctacccacgtcccaccacaacaaagcagctgcaaactctcaaggccttctggagcatcagtgtccttttattccttttatttgacatccctgaaggaggctgctaggggagactgtgtccctcctaaattcatgtgctgaagtcccaacccttggtccttcagaatgaaatcatacttggattagtgtcctttaaagaggtgaataagttaaagtgagattcctggagtggggccctaatgcaatctgactgttgttataagaagaggaagcaggagggagggtgcacaggccccgagggacggccatgttaccacagaacagtgagaaggcgccatctgcatgccagggagcgagacctcagaggaaacccacccagctggcagcttgatcttaggctttcatcctccataagtgtgaggaaattggttttgtattgtaagccatccgatctgtggtatttcgttataaaagccctataaaatgaatacagtaggtaataggagagcttctatacattgaaaaagtcggatggccagaaaaacctagacactcctgttcagacctgagcagggtgatggacctgctttgggacaggagaggggaagagatgaacccagcacccagacccagctgagcccattcctcagcaggccgtccctgggccggagcttgcacaggtgtgaaagagcctgtcttggtcttcaggggctcatggagttggacggagaatggtgtagactcaagaacacgtcatcggtgtgcccgtgtttatctgaatgggatgtgtttctagggtgtgctcatccccaaagaagaattaatcaggtctcttgggctaaaaagaggttgtggcatttgtgtgtattaataactgtggtcggacagtaaattatgttaaactgcttatgggaaggcacaatggaaagaaacactttgttacagaaggaaaaaaaaggtgattatttaaatgaggtgcctttgaaggtcaccatgccaagaggagcccatcacatgatagtgctggctttcatgttcaggagatcaggagggtccgtccgctggcttttatgacaccctagacagagctgagagtgtaatgtatgaatggaggggaagtggagagaggggaggccaaatgtttggtgggaatggagggtcactattggagccattaggaaatacacaagcatgaattatgctggaggacagaacagtgttcctggggaatattgtgttgctttgggagctgctgaacatacaggagtttcactgttcctagttctcaaattctctagactctctggacaacccagttttaaatattgggaatataggtaagacacattcgttattaaaaattattaagagaagatgtaggaagaaatttaaagtaatccatttggttatgaaaatttagttacagcgaactgtgatgtccgtttcttacttggaataatggaatgtaagtcattagtcatctcaacggttcatttttccataaccatcaattacaaaactgctgagtaatttcctgaattgcccaccatagaaactgacctcacatttcctcaatgagaaactgccagtcccgttgatccagcctcgttcttcccatcagggattttgtatctctgtggacgtgtggcacagtgctgcatatccatcggcatatggcctcaggaaaggcgccagcctatccatgcatgatgaagcttacttaggggatgaagcccgcatgctgggtgagccagtgccaacagctgaaagaatcaactgcctggtgtatgatgcttttatgaaaacaagcccagggcctcttgcattcttctgtattagattctctggtgaagatttttattcatttctgcctgaaattgccacatataattacctggaagcattacaataaactgatttggaagttaactgacttcctggtgaggttaaaatgagtgtcaggtgcatagtgagacagaccggagacatggatgcatagcaaacttgtgctcaccatggtttctatcttagttagggaaacttctgtaccttccttagatgttcaggcactccattgaggaccctggcataacattatttattgacagaccatagctcaaagtatagaactggatactaccaaggaggatatactattactattttatctttatcttaaaatatactcttccatctgaggtgaaaattaatccagatggtagaacttattgcagttactacagcattttagcaaatcaaaagccgcagaacaaacatatggacagatggcaggtatgttttcggaatcgtaaacaagttcgtgatgactgtaaaaccaaggggtgtctcacgagggctggaaacctctcacaatgaaacaacacaatgaggatctttgaaaagtactctgacctcctggtgagctggctgatatggaggctgagctccatgtagaaagccaaaggaatttctgcaggacgtcatcatgccaagcacagccgtaacctgggtcccagcccttttcacacgctcaatggttagatcttgggagggaatcaaagaagccatagtaaaatatcaaaatttaaaccccgattttgaatttaaaaagtgttaaaatatggttgtggcctacactcagaaaatctgtgtccttcagatggtttctcagtggcaccagatggtttcaagtggctattcattaagtttctcagtgaaattaccagacatagaataaataaattgtcactgtcttaaatcaacccatgggaaaggaaaactgtgtaaatacagcagagaggaaacattgctcaagggaaaaacaatctccagaaagtattgttaaagaaacagaggccctctttccagccagcgccgagcgatgggcacctctcgggacaactggcacaagggccgcaaagctgggggcaagagaaggccctgccacaagaagcggaagtatgagttggggcgcccagctgccaacagcaagactgacccgtgccgcatccacacagtccgtgtgcgaggaggtaacaagaaatactgtgccccgaggctggacgtggggaatttctcctggggctcagaatgctgcgctggtgaaacaagggtcatcgatgttgtctacaatgcatccaataacgagctggttcgtaccaagaccgtggtgaagaattgcatcgtgcccatcgacagcacgccctaccgacagtggtacgagtcccactgtgcactgcccctgggccgcaagaagggagccaagctgactcctgaggaagaagagattttaaacaaaaaacgatctaaaaaaattcagaagaaatatgatgaaaggaagaagaatgccaaaatgagcagtctcctgggggagcagttccagcagggcaagcttcttgcgtgcatggcttcaaggccgggacagtgtggccgagcagatggctatgtgctagagggcaaagagttggagttctatcttaggaaaatcaaggcccagaaaggcaaataaatccttgttttgtcttcacccatgtaataaaggtgtttattgttttgttcccaaaaaaaaaaaagaaagaaaaagaaacagaggcatcacacttactagaaaaacatattctatttcatatattatggggatatgacgtgatgttttgacatatgcgggcattgtgaaattattaaatcaagtaaataaacatgtccatcacctcacatacttattttttatggtgtaaacgtgtaaaatctactctcttatcagttttcaagtatatagtacattagtatcatggaagtcaccatgctgtgcaatagatcttcaaacgaattccttctatctaaccaaaactctgtaccctttcaccaacgtctcagctttcacatgcccctgacgccagcccctggtaggcaccattctactctctactctgagttcaacatttttagattgcatgtgtaagtgagatcatggagtaattttttatacctggcttatttcactcaacataaagagtcaaatgctcaacatcactaatcatcagggaaatgcaaattaaaaccacgataagatatcacctcacacatgttacaatggcttagtctcagtctgtctttttgttactataaccgaataccagagactgggcaatttctaaagaaaaggaatttatgctttatggtgcttgagtcagagaagtctaatatcaaggcactggcatctcacaagggccttctcactgcctcatctcacagcagaggtgggtgagcaagagaccatttgtccacgagagaaaagagaccatcttttattagaaattcactcctataataactaacccactccattgatagtgacagtaatccattcatgaggacagagccttcatgacttgatcacataataaaggtcccacctctcaacactgttgcattaaagattatttccagatcctaaactttgggagacacatttaaaccatagcattccattcctaatatcaaaatttatgtccttatcacaatgcaaattacattcattccatcccaattgtctccaaagtcttatccagcatcagtgcaaaagtctgaagtccaaagtctcatctaaatcagatatgagtgtgactcgaggcacaatttagcctgatataaattgtttccatctgcgagcctataaagtcaaaacaagttatctactttcaaatacagtgaacaatggggcaggtatgggatagaaattcccattccaaagctcagagagaggcaaggagaaagcggtgcctagttcaaaacccaacagggaaaaaaacattaagtcttatagctggaaaatcatcctctttaacggcatcttgtgcacactggggagggggatgggcccccaaggcctccggcagtcttgcctctatatattttctgggttcagtccactcagccgctctcacaggtgggactctcaggcctctagctctcctaggctgactggaaactctttgtggtacctccaaacccacatttctgcttggcattgtgctaagggcccagtgtggtgactctgtctctgcaacaagtcactgcccgagaccttaggctgtccttaggctgcccgagaccttaggccgtccacagcattctttgaaatctaggtggagaaagccatgccctcgtggttcttgtattctgcacacctgcagaattaacaacacatggatgccatggaagttgatgacttgtaccattaaagtgatggcttgagccacacctaggtcctcctgagccacagcatgggcagccaaggagtgctgtgcctggacaccgggaacagagtcctaaagtgcctgctagaagtcaggccatagatttccttcaaatttctcccaccatataacctcgttcatggctctgaacttccaccttacagaaggacctagggatgaacacaattcagccacgttctttgccactttatggcaaggatggcctttgctccattttccgatgagctattcttctttttctcctgagacctcatcagaacggcctttattgtccacggttctactgacattctaatggtcatcacctaaataatctctaagaagtttcagaatttcctcacagctctcttcttctgagtcctcaaaagaatcacctctagtgttctattcagggcaatccagactttttatagtctgatcctccaaattattccagtctttgtgcattactacatccacttctacattttggggtatttgttatcgcaacagccccacctcttgatactgatttttcgtcttagtccactttgtggtgcaatgagtgaataccacacactggctaaagtataaggaaaagaaatttattttctcgcagctctagaggctgggaagtcaatatcaaggtgttagcatctggcaagagccttcttgctgtgatgtccatgtggaaggcaggagagcaggtgcgaaggatggaaaggggtttaaactcattttttaatgaggaacccaggcctgtagtaactaatctgctaccacaatgagtaacctactctgacgataatggcattcattgcttcatgagggcagagccctcatgacctaatcatttcttaacattcccacctctggacactatggaatttgggattaagtttccaatacacatcctttctaaacagcaggggctttttaataggttgaccacccaaggctgcaggaggctctgaagcagtggcctgaggttggctgtcctttgtgagaatggagagaagtgaactgactcatggagacacaagtagatgaggtaaaggcattcattgcttcattacatggatggtgaggtcgattgaaggcattaacggattaaagatggtggcaaaaccgtctgaggtggagaccacggggagtccatcagaaatggaggacacgtcccaataaatggtgcttcatttccctgcaaagcagaagaaagcaaagaacaaaacacaacatcatagtgtacactgagcagtggattgagagaagagtttcctaaggcataactgacagagtggagaagacacacaaatctttgcatgatgctaacatttggactgtggcttcattatttcttattaatattttactgaaatatcgctagaaggagactgaaaatgaagtgtgaaaagttaaatgggatttctgctctatgtccttttcagatgagaggaactagggaattccagggaagaaacaataatagctgctgagcaaggcttttgcagggcaggacaaggaatccccaaagagaaaacggaaacctcagcttcactttgcatctgctcctgagccaggtcctgagcgacccctgtaggtcctgagtgcccctccgtaggttctgagcatcccttggttgctgggcgccctctggtggtgtctgagcccctctggtggtttctgagccccccgccttatgtctgatcctccctggtggtgtccgagtgcccctgctagtgtctgagccccctggtggtgtctgagtccccttcttagtgtctgagccaccctattagtgtctgaggacccctgatggtgtctgagcccccagttagtgtctgagccaccctattagtgtctgagcccccctggtggtgtctgagcacaggagagctcctctgaaggaagggtctacatggggacaggcgtgcttgtctcagggaagggtccatgtggggacaggtgtgcttgtctgaaggaaggttccacatggagacaggtgtgcttgtctcagggaagggtccacatggggacaggtgagcctgtctgaggggacagaagtgcttgtctcaaggaagggtcctcatgtggacaggtgagctcttttgagggaagggttgacctggggacaggcatgcttgtctgaggtaagggtcctcctggggacaggtgtgcttctctcagggaagggtccacgtggggacagaggtgcttgtctaaggcaagaatccaagtagggacaggtgagctcgtctcagggaagggtccaggtggggacagttgtgctcatctgagagaagcgttgaagtggggacaggtgtgcttgtctcaaggaagggtccatgtggggacaggtgtgctagtatcaagaaagggtccacatagggacaggtgtgcttctctcagggaagggtgcatgtggggacaggtgtgcacatcggagagaatggtccacctggggacaggtgttcttgcctcagggaagagtccaccttctcagggaagaagtgtgctcctctgagggaagggtgcacatggggacaggtgtgcttgtctcagggaagggtccatgtgggaacaggtgagctcatctgagggaagagtccacgtggggacaggtgagctcatctgagggaagggtccacatggggacaagtgacctcgtctgagggaagggtccacgtggggacaggtgagctcgtctgaaggaagggtccacttggggaccggtgtgctcctctgagggaagggtccacgtggggacaggtgtgctcctctggagggaagggtccacgtggggacaggtgagttcatctgaaggaagggtccacatggggacagttatgctcctctgagggaagggtccatgtggggacaggtgtgcttgtctcagggaaaggtccacgtggggacaggtgtgctcaccttggggaagaggacagatgagctcatctcagggaaggggccatgtggggacaggaccaagggttgggacttcagcacaagaatttaggaggaacacagtcttccctagcagcctccttcagggatgtcaaatattttccttctgttccctgtgaaagccttaaaggggtagggaaagggcgttcaacctgcacactcgtagaggggaaaccagcttcattagtaatcgttcatctgtggtaaaaaggcaggatttgaagcgatggaagatgggagtacggggcgttggaagacaaagtgccacacagcgcagccttcgaaacacaccacggtcacgttaagtttaaatggagtgaccacattcgccaggaaagggaaatatttacacttttgaagaaacagtaatttgtgtttctgattatgatctggccttggattttccctcccctcataagcaatgacagaattggcagaaatatgtgaaacgttagttctcagacatgagacacccacagagggccccctgtgcccttccctgagagctgatcagctcctgcatctgaagaaatgaccaaagaccaggagagaaccacacagaagcatcggagggacagcacctggggctctgatggggtcaggaatagcatctgttcccaatagatggactaagtaaaaagtatcataattcacaagagttttacatagcacagaagaaaaagttaccctatatcaactgttgatcttgtgaatccaggaactctggattcaaggtggtcgggcacatcttgatttacgcatttcagggacacatgagacatcagtcaatataagtaagaaggacattagttccatccagaaaggctgagacaactcaaagcaagtcctccccacttagggcttccaggtcacaggtaggtgagagacagatggttgcattcttttgagtttctgataagtgtttgcaaaggaggccatgaggatatgcacctgtctctgtgagcagagggacaactttaaatagactgggaggcagatttgtcctgagtggtttccagcttgacggggcccaagatattttcctttcacaatctggtaacttcaaacaaaacttcaaagccacaacaaaacaacacaacaacaaaaagaataagacatgggtacttattaagagtagaaaaacattcagtccccaaggaaaatattggcagtgtctacctccacatgacaaaggagtaagcagtgtgagccacagaaaggagcactattaacccacagagcaaccgagaataacacgggtgatgcgagggcattggacgcacatcattgcattttgtagattcagaaagaaacggaaaagattgacggtggtaaaagagacagccctgcttccctctcccttttccctccccgatgaggcctcacagccatgaccctcagcctcatcccgcagtgcagcagctgccgtcctgtccaggcccaccccctgccccgccctgggactgttacctcattccctcccggagtccaggtgccccccggggtgtggtgcgggagcctggggaggccctttgttctctgtcagggtctccctgggagggacgcagccaccgcagctggttggggcctggcttcgcccaggacagtcctttcctttcccattgtctttggatgactatcgctgggctgggacatgaggcgggcagaggcgcgggtcacccttaggacccccctcttgctgctggggctctgggcgctcctggctccggtccggtgttctcaaggccgtcccttgtggcactatgcctcctccgaggtggtgattcccaggaaggagacacaccatagcaaaggccttcagtttcccggctggctgtcctacagcctgtgttttggggtcaaagacacgtcattcacatgcggaggaaacaccttctttggcctagacatctgctggtgacaactcaggatgaccaaggagtcttgcagatgggtgacccctacatccctccagactgctagtacctcggctacctggaggaggtgcctctgtccatggtcaccgtcgacacgtgctatggggacctcagaggcatcatgaggctggacgaccttgcgtacgaaatcaaacccctccaggattcccgcaggtttgaacatgttgtttttcagatagtggccgagcccaacgcaacagggcccacatttagagatgatgacaatgagacagaccccctgttctctgaagcaaatgacagcatgaatcccaggatatctaattcgctgtatagttctcatagaggcaatataaaaggccacgttcaatgttccaattcatattatcgcatatatggcaatattacaacttgttccaaagaggtggtccagatgttcagtctcattgacagcattgctcaaaatattgatctgcggtactatatttatcttttgaccatatataataatcgtgacccagcccctgtgaatgaatatcgaattcagagtgcaatgtttacctattttaaaacaactttttttgatacttttcatgttcattcatccacactacttattaaatacgtgccacatgaatctaactatgaacctgaaaggtataacttctgttcccgtatagccctgttacacattggtactccaggcagacattatttattggtagccgtcataataacccagacacagatgagaagtattggtctggagtatgatgataactactgcacatgtcagagaagggcctcctgcattatgcagcgatttcctgggatgacagatgcgttcagtaactgttcttatggacatgcacaaaattgttttatacattcaggccggtgtgtttttgaaacacttgctcctgtgtataacgaaaccatgacaacggttcgctgtggaaacctcatagtggaggggagggaggaatgtgactgtggctccttcaagcagtgttatgccagttattgctgccaaagtgactgtcacttaacaccggggagcatctgccatataggagagtgctgtacaaactgcagcttctccccaccagggactctctgcagacctatccaaaatatatgtgaccttccagagtactgtcacgggaccaccgtgacatgtcccgcaaacgtttatatgcaagatggaaccccgtgcactgaagaaggctactgctatcgtgggaactgcactgatcgcaatgtgctctgcaaggcgatctttggtgtcagtgctgaggatgctcccgaggtctgctatgacataaatcttgaaagctaccgatttggacattgtattagacaacaaacatatctcagctaccaggcttgtgcaggaatagataagttttgtggaagactgcagtgtaccaatgtgacccatcttccccggctgcaggaacgtgtttcattccatcactcagtgagaggagggtttcagtgttttggactggatgaacaccatgcaacagacacgactgatgttgggcgtgtgatagatggcactccttgtgttcatggaaacttctgtaataacacccagtgcaatgtgactatcacttcactgggctacaactgccaccctcagaagtgcggtcatagaggagtctgcaacaacagaaggaactgccattgccatataggctgggatcctccactgtgcctaagaagaggtgctggtgggagtgtcaacagcgggccacctccaaaaagaacacgttccgtcaaacaaagccagcaatcagtgatgtatctgagagtggtctttggtcgtatttacgccttcataattgcactgctctttgggacagccaaaaatgtgcgaactatcaggaccaccaccgttaaggaagggacagttactaaccctgaataacactaattcagcctcccgatccctgtaaagatacagagaatataacagcaaaatctatgaaacaggatcaggggaagggatggcaaagctcaagtccacatttcttgaagtccacaggaagcacagggtcctgtttcacatcacagggaaacgggaggcattggcttctgtcccaggttcttgtaggtcgctgatgctcactctgaaataaatcttcaaaaacacacattggtgccttccacattttcttagactcctctgggagcccaaacttggccagaacctcttgcctggagagacatgaatgagcatctggctcttgtcctgaggtctctggtcccagaattaacggaagttgccaccagctccttacagggaacattcatgacatttctccagaagagagctccagagcaatgagcttcctcattccccaggtaatctgtccttctctaaacccgaagtcagtttagggtgatccagggctactccctgttccctgtctgttcctcacgggggtgctgtgggctttgcagtgagagggacttgggttcaaatcccccaccaagcaaatccccctacctggggccgagcttcccgtatgtgggaaaatgaatccctgaggtcgattgctgcatgcaatgaaattcaactagaaaaataggtagacgtgaggggcaagctgtctgtcatttagtgtgagctctgtgagtggcagctgccccctttcttcctgcccccacatttccttgaactgaaacaggaagggaagctgagtaagtcgtgatgaggaagagaaaccaggcttgtagcagcacaggctggtccgggtggaaaacagggctaggtgtatcactgagttattgtaaaggaaaatggaagttaaatgtataaataactgaatgagataacattttattttaacttaaaattcacactaatattgacttttaaaatgcagtgtagatatgtcagagagaatttcaaaggcaaagcccaccgacggaagaaatcacccttcccataccatccacagaaaactgttggtattctagggtagtactgagatctagcatttttctgaatacatctgtggttctagatgtcctgcttccatagatattgtttagaattcccacccctttctccaaacacagcttgatatcctttctctgaacctgttagaaatttcctccattcagctgtcataaagatgcgagcaatccattcctgtgcctctgtcagtgtgttctattattttgtggctgaacgctaatggacagttaagtgtgaggtcagtgaatacagtgccctccctctatgtgtccttcgggtgtgaggggttttgctgatagagcagcaggccccatcccaccctttatgcatctccgccccccacctcacgctccagctgacctctcccctgtggcctggggcgttccccagggggaatgacctctcctctctccagggcccacccactcagtgcccgtgcaagaccaccacgcttggcacggccccacctcgtgtcagggcctgtgtcccctgccccaccccctaaacagatgggaaccactgggactctgctcagggcagggggcggaggtatgtgtgaaaggaaggcaaatgtgcactctgttggagaaatattataggtagtttgagcaaaaaatctaatgccatgggaacttttagaatgatacgtattttaacaaagaacatgaccaatagagtttgtattgaagccaggaaaacactatttagagcaacagcaatatcaaaaacacaagccaacagttcaccaagaaaaaccaccattaaccccatggaaatggtcttccaagagcatcggcacttaaatcctggaaatctgcctgcctcagcacctgttgtcctgacctgccctcctgtgtgtcctaatcactcccaaacacggggcctgcactgtgggagattcacactgtgccaggtggagggagcaggacaactgctaacaggttgttggtgtggatgccgaggccacccaagcaggtgtaaactcccacctgtggggcagggaagagtgcacgggagacatgtcccgggcatagggtgagggagagctgtgggggctctgggttctgaagtgggttctgaagagggttctggcctggcagggataagaccaaccagcatgtgaggccaggctggagtctggacctctgaagctgcaagggtcatgggctgcttggccccaggggctgtcctggttctctatggagtactttcaaacattctttcttcttccaatccccctccttctctcccaaagcctgcatctcccaaatcctctttgtcggatcctcggcttcactctgcatccgtcctgagcatcgatcttccaattccatcctcttctcttctgctatgtctaagctgctgtgaagccacctgctgtaatttactgctttatatttaatattgtaccgtacatctgttctgtttccctcatcataaatgcttcatttcatgctcagcatctgagaacacaaggccttgtcagctgtcacctccttccgttctctgtttccttcctcctatccccatattgctcatcatgtccagtctcctgccatcctgaatgcttctgatggaaggtctgagatgtctcatgagcactgtgaagattctttgtaatgtgagcttgttccaggcaggaattctccttcacccagccctggaagccaagtataggcagatggccatgctcaatcaaagactgagctaacttaacagtggctttggttttaaggtttctccaatccccagggcacaggatttcagggaattcaggtgagagtctgggtgttacccttcaggaggctgtaaactccatttcacctagtctacaccacagactatggaaactatatatatatatagttctgtccctctagagaaacctaatatgtatatatacaatatataatacgtattatatattatatataatacgtattatatattatatatattatatatatattagagtttattgaggagtattaaactcacaatcacaaggtcccacagtaggccatctgcaagctgaggagcaaggaagccagtccgagtcccaaagctgaagaatttgaagtctgatgttcgacggcaggaagcatccagcacaggagaaagatgtaggctgggaggctaagccagtctagtcttttcacgtttttctgcctgctttatatcctggccacactggcagctgattagatggtgcccacctagattaagggtgggtctgcctttcccagtttactggctcaaatgttaatctcctttggcaacaccctcacagacacacccaggatcaatactttgcatgcttcaatccaatcaagttgacactcagtatcaaccatcacaagtccaccccttgtcaacttgaacccatacaaatctcctgagatcatacataatcttcaaataaagacaataataaggtcataattacacctaatgtaatacaactatcttttgtacaaccagaaatgcaccaatccccaacccaaatgctattatgtaaagttaagaacacttaaatgctgatatgaagtcaataaattttatgtcacatgataaaggaaaaaagaaatgaaggaattttcttagtacaagtgtgtacatgcacaaacatgtttttaacaaaagaagaaggaaatactgatgacaattacagtcctcatttctgcaactgatcacgtggttgtagctggtattgatgactaccttcttctactacccattctgtattccctttgccttcagcaagcatcacagcaggtagagttttttctcctagtggagtgatgcaaaccttcattcctgaagggtctgggccatttgtagtcctgcctggattgggctgttgtagtttcccgttgaccttaatgacagggcatggtaatgttaagagacgccctaatggatctcctgtattccatacatattcttccttacctccattgtggagtaatagactgattgcatcttgatagtccaggtcaatcagcccagccaacactgtaactcccctcttagcctgtggacttaaaggtaggaggggcccaaagtggccaggtggaaatctttacttccagtttaatggaattgttgttgtttctcctgatggcagcattattcccactggaactaagacctctaggccaacagaatgtaatgtcatgggaccaggaagcaaaaattttgctagtggatcactaggggtgatggtgaatggtgccatttccacttccaccccttgattcctggatccatgaattatggctatgggagaaagagtaccatatattggatgctgatttggagcatacatggccttttggagagctttgccccagccctgcaaagtattggagcctagttgacattgtaattgtgactttgaaaggccattccattcttctatcaatccagctgcttcaggatgatggggaaaatggtaagacaagtgaatcccatgagcatgagcccactgccacacttctttagccgtaaagggagtgccttggtcagaggcaatgctatgtggaatactgtgacagtggataaggcattccatgactccacagatggtagtcttggcagaagcattgcatgcatatctgcagtaagtgtctatttcagtgaggacaaacctctgccctttccaggatggaagaggtccaatataatccaacctgccatcaggtagctcactgatcaccctgaggaatggtgtcatttgggtagagacccagagccaaaccagatcacgccacccaacccctcccaaatctcatgtcctctttgcatttcaaaaccaatcatgccttcccaacagtcccccaacatcttaactcatttcagtattaactcaaaagtccaaatccaaagtcacattggagacaaggcaagtccctttcatctatgaacctgtaaaatgaaaaacaagtcagttacttccaagacaaaatgggggtacaggcattagatacatgctcccatttcagttgggagaaatgagccagaataaaggggcttcaggtcacatgcaagcccaaactccagtggggcagtcattaaatcttaaagcttcaaaataatctcctttgactccattcctcacattcagggcatgcttatgcaaagtgggggctcctacaaccttgggaagctctcaccctgtggctttgcagctctgaccccatggctgctctcatgggctttgcagagttcagccctcctggctgctctcattgagtgcatgcagcttttccaggtgcacagtgcaagccgttaatggatctaccattctggggtctgaaagatggtggccctcttctcacagccccattagtcactgtctccagtggggactctgtgtgggggctccaaccccacatttcccttctgcactgccctagcagaggctctccatgaaggctttgcccctggcgcagacttctggctggacatccagtcatttctataaatcctctgagatctgggtggaggatcacaaagctgaactcttctcttccgcacatccctaggcccaacatcatgtagaagccaccaatgattggggctttctgaagcaatggcctgagctgtacattggacttttttagccacagctagacctggagcagctgggacacagggcaccaagtcccaaggctccaaagagaagctgggccctggacccagcccatgaaaacatttttccctgataggcctccaggcctgtgattggaagggctgctgcaaagatctccgacatgccctggaaacattttccccattgtcttgattattaatattcatctcttcattacttatgcaaatttctgcagccaacttgaatttctccctagcaaatgtgtttttctttactaccacatggccaggctgcaaattttccaaacttttatgctctgtttcccttttaaaaataagttcctatttcagatcatctctctcaagggcaaagttccacagatttctagggcagggacaaaattccatcaagcttggttttatacattttagagaggcatgagacatcaatcaaatacatttaagagacacattggtttggtccagaaaggtggaacaactcaaagctagggcttccaggctataggtgaatttaaatattttctggttgacaattggttgagtttgtctaaagacctgggatagatagaaaggtaatgttcaggttaagataaagattgtagagtccaaagttcttttgaagtcttatagtggctgcccttagagataataggtgacaaatgtttcctattcaaatcttagttgaactctttaggattgggaggttctagaagaaaaagatctagctatgttaatagagattctttacagatgcaaattttcccccacaaagaacagctttgcagggccctttctttctttctttctttctttctttctttctttctttctttctttctttctttctttcttttttagatggagttttgctcttgttgcccaggctagagtataatggcacgatcttgtctcaccacaacctccacctcctgggttcaagtaattctcctgcctcagtctcccgagtagctatgattacaggcatgcaccaccacacccggctaattctgtatttttagtagacacagggtttctccatgttggtgaggctggtctcgaactcccaacctcaggtgatccgcccacctcagcctcccaaagtgctgggattacaggcatgagccaccatgcccggcctgcagggccatctcagagtatggcaaagaaacatgttttggggtaaaatattttgattttcttatttgtctcataatgttatgccagagtcagtttggaaagtaaatcatgatatataggtttaaataaaacccatctgatgagaatttatgatttgtagagcatgcctccccagactctttagataggaatttgggcaagatgaaaaaaaaatcagagtttagtcctcactacctaagaccagctcagcttggacttcactgttcatgtcactatcagcattttagtcaaaaccactcaataagtctctaggaagttccaaactttcccacatcttcccttctcctttcaagttctccaaactgttccaaccgctgccaggaggtacccagttccaaagttgcttccagattttgagttatctttatagcagttccccactcctggtaccaatttactatattagtctgtttccacagtgctataaagaactgcccgaaagtggttaatttgtaaagaaaagaggtttaattgactcacagtgctgtgtggttagggtcggaggctcaggaaacttgcaatcatggtggaagtggaagcaggcatgtgacacatggcagcaggtgagagagagaaagagagagagagggaatgaaggaggaaccaccatacatggataaaaccatcagatctcatgagaactcactcactatcaggagaacatgaggacagcatgggggaaaccacccctatgacccagtcacctcccaccaggtccaccccttgacacataaggattactatttgagatgagatttgtttaatgacacagagccaaaccacatcagcatgtgacaaaggtctaatatcaagaatctatgagggggcagttccaaaatggctgaataggaacagctccagtctacagctcccagcatgagctacacagaagacaggtgatttctgcatttccaactgaggtactgggttcatctcacgggggcttgttggacagtgggggcaggacagtgggtgcagcccaccaagagtgagctgaagcagggcgaggcattgcctaacccaggaagtgcaaggggtcagggaattcccgttcctagccaagggaagcggtgatggacggcacctggaaaatccggtcactcccaccctaatactgcacttttccaacggtcttagcaaatggcacaccaggagattatatcctatgcctggcttggaggttcccatgcccacggaacctcgcttattgctagcacagcagtctgagatcaaactgcaaggtggcagtgaggctgggggaggggtgcccacaattgctgaggcttgagtaagtaaacaaagtggctgggaagctcaaactgggtggagtccactgcagctcaaggagacctgtctgcctctgtagactccacctctgggggcagggcatagctgaacaaaaggcagcagaaacctctgcagacttaaatgtccctgtctgacagctttgaagagagtagtgtttctcccacatggactttgagatctgagaatggacagactgcctcctcaagtgggtccctgacccccgagtagcctaactgggaggcaccctccagtaggggcagactgacaccttacacggctgggtgcccctctgagatgaagcttccagaggaattatcaggcagcaacatttgctgttcagcaatattcgctgttctgcagcctctgctgctgatacccaggaaaatagggtctgcagtagacctccagcaaactccaacagacctgcagctgagggtcctgactgtcagaaggaaaactaacaaacagaaaggacatccacatgaaaaccccatctgtacatcaccattatcaaagacaaaaggtagataaaaccacaaagatggggaaaaaacagggcagaaaagctgaaaattctaaaaatcaaagtgcctctccccctccaaaggaatgcagctcctcgccagcaatggaacaaagctggatggagaatgactttgatgagttgagagaaggtttcagatgatcaaacttctccgagctaaaggaggaagttggaacccattgcaaagaagctaaaaaccttgaaaaaagatcagatgagtagctaactagaataatcagtgtagagaagtccttaaatgacctgatggagctgaaaaccatggtatgagaactacgtgatgaatgcacaagcttcagtagccgattcgatcaactggaagaaagggtatcagtgattgaagatcaaatgaaagaaatgaagggagaagagaagtttagaggaaaaaaaagtaaaaagaaagaaacaaaccctccaagaaatatcagactatgtgaaaagaccaaatctatgtctgattggtgcacctgaaagtgacagggagaatggaaccaagttggaaaacaccctgcagtatattatccagcagaacttccccaacctagcaagacaggccaacattcaaattcaggaaatacagagaaccccacaaagatactcctcgagaagagcaactccaagacacataattgttagattcaccaaagttgaaatgaaggaaaaaatattaagggcagccagagagaaaggtcgggttaccctcaaagggaagcccatcagactaacagctgatctctcagcagaaactctacaagccagaagagagtgggggccaatattcaacattcttaaagaaaagaaatttcaacccagaatttcatatccatccaaactaagcttcataagtgaaggagaaataaaatcctttacagacaaacaaatgctgatagattttgtcatcaccaggcctgccctacaggagctcctgaaggaagcactaaacatggaaaggaacaactggtaccagccactgcaaaaacatgccaaatcataaagaccaccaaagcgaggaagaaactgcatcaactaacgagccaaataaccagctaacatcataatgacaggatcaaattcacacataacaatattaacctttaatgtaaatgggctaaatgctccaattaaaagacacagactggcaaattggataaagagtcaagacccatcagtgtgctgtattcaggagacccatctcacatgcagagacacacataggctcaaaataaaggcatggaggaagatctaccaagcaactggaaaacaaaaaaaggcaggagttgcaatcctagtctctgataaaagagactttaaaccaacaaagatcaaaagagacgaagaagaccattacataatggtaaagggatcaattcaacaagaagagctaactatcctaaatatatatgcatccaatacaggagcacccagattcataaagcaagtccttggagacctacaaagagacttagattcccacacaataataatgggagactttaacaccccactgtcaacattagacagatcaacgagacagaaagttaataaggatatccagcaactgaactcggctctgcaccaagcagacctaatagacatctacagaactctccaccccaaatcaacagaatatacattcttttcagcaccacaccacacctattccaaaattgaccacatagatggaagtaaagcactcctcagcaaatgtaaaagaacagaaattataacaaactgtctctcagagcacagtgcaatcaaactagaactcaggattaagaaactcactcaaaaccactcaactacatggaaactgaacaacctgctcctgaatgactactgggtacataatgaaacgaaggcagaaataaagatgttctttgaaaccagtgagaacaaagacacaacataccagaatctctgggacacattcaaagcagagtgtagagggaaatttatagcactaaatgcccacaagagaaagcaggaaaaatctaaaattgacaccctaacatcacaattaaaagagctagagaagcaagtgcaaacacattcaaaagccagcagaaggcaagacataactaagatcagagcagaactgaaggaaacagagacacaaaaaaacccttcaaaaaatcaatgaatccaggagctggttttttgaaaagatcaacaaaattgatagaccactagcaagactaataaagaagaaaagagagaagaatcaaatagatgcaataaaaaatgataaaggggatatcaccaccgatcccacagaaatacaaactaccatcagagaatactataaacacctctacggaaataaactagaaaatctagaagaaatggataaatttctcgacacatacaccatcccaagactaaaccaggaagaagttgaatctctgaatagaccaataacaggctctgaaattgaggcaataattaatagcttaacaaccaaaaaaagtccaggaacagatggattcacagccgaattctaccagagctacaaggaggagctggtaccattccttctgaaactattccaatctatagaaaaagagggaatcctccctaactcattttatgaggccagcatcatcctaataccaaagcctggcagagacacaacaaaaaaaaagagaattttaggccaataaccctgatgaacatcaatgcaaaaatcctcaataaaatactggcaaaccgaatccagcagcacatcaaaaagcttatccaccatgatcaagtgggcttcatccctgggatgcaagtctggttcaacatacgcaaatcaataaacgtaatccagcatataaacagaaccaacgacaaaaaacacatgattatctcaatagatgcagaaaaggcctttgacaaaattcaacaacacttcatgctaaaaactctcaataaattagatattgatgggacgtatctcaaaataataagagctatctatgacaaacccacagccaatatcatactgaatgggcaaaaactacaagcattccctttgaaagctggcacaagacagagacaccctctctcaccactcctattcaacatagtgttggaagttctggccagggcaatcaggcaggagaaggaaataaagggtattcaattaggaaaagaggaagtcaaattgtcgctgtttgcagatgacatgattgtatatctagaaaaccccatcgtctcagcccaaaatctccttaagctgataagcaacttcagcaaagtctcaagatacaaaatcaatgtgcaaaaatcacacgcatttctataacccaataacagacaaacagagagccaaatcatgagtgaactcccattcacaattgcttcaaagagaataaaataccttggaatccaacttacaagggacgtgaaggacctcttcaaggagaactacaaaccactgctcaatgaaataaaagaggatacaaacaaatggaaaaacattccatgctcatgggtaggaaggatcaatatcctgaaaatggccatactgcccaaggtaatttatagattcaatgacatccccatcaagctaccaatgactttcttcacagaattgggaaaaactgctttaaagttcatatggaaccaaaaaagagcctgcaatgtcaagtcaatcctaagccaaaagaacaaagctggaggcatcacgctacctgacttcaaactatactacgaggttacagtaaccaaaacagcatggtactggtaccaaaacagagatacagaccaatggaacagaacagagccctcagaaataatgccgcatatctacaactatctgatttttggcaaacctgacaaaaacaagaaatgggaaaacgattccctatttaataaatggtgctgggaaaactggctagccatatgtagaaagctgaaactggatcccttccttacacattatacaaaaattaattcaagaggattaaagacttaaatgttagacctaaaaccataaaaaccctagaagaaaacctaggcaataccattcaggacataggcatgggcaaggacttcatgtctaaaacaccaaaagcaatgacaacaaaagccaaaattgacaaatgggatctaattaaactaaagagcttctgcacagcaaaagaaactaccatcagagtaaacaggcaacctacagaatgggagaaaatttttgcaatctacttatctgacaaagggctaatatccagaatctacaatgaactcaaacaaatttacaagaaaaacaaacaaccccatcaaaaagtgggcaaaggatatgaatagacacttctcaaaagaagacatttatggagccaaaagacacatgaaaaaatgctcatcatcactagccatcagagaaatgcaaatcaaaaccacaatgagataccatctcacaccagttagaacggcgatcattaaaaagtcaggaaacaacaggtgctggagaggatgtggagaaataggaacacttttacactgttggtgggactgtaaactagttcaaccattgtggaagtcagtgtggcgattcctcagggatctagaactagaaataccatttgacccagccatcccattactgggtatatacccaaaggattataaaacatgctgctataaagacacatgcacacgtatgtttattgcggcactattcacaatagcaaagacttggaaccaacccatatgtccaacaatgatagactggattaagaaaatgtggcacatatacaccatggaatactctgcagccataaaaaaggatgagttcatgtcctttgtagggacatggatgaagctggaaaccatcattctcagcaaactatcacaaggacaaaaagacaaacactgcatgttctcattcataggtgggaattgaacaatgagaacacttggacacaggaaggggaacatcacacaccagggcctgttgtggggtggggggagtggggagggatagcattaggagatatacctaatgttaattgatgagtttatgggtgcagcacaccaacatggcacatatatacatatgtaacaaacctgcacgttgtgcacatgtaccctaaaacttaaagtataataaaaaaatttttaaaaaaagaaacacctgcttttttctgttttccatttgcttagtagatttttctccatccttttactttgagcctggggatgtcattgcatgtgagatgggtctcttgaagacagcatacatttgggtcttgcttctttctccaacttggcaattctctgccctttaattggggcatttagcccatttacattcaaggttaatattgatatgtgcatatttcatcctgttatcatgttgttagctgctcaatatgcagatttgattgtatagttgatttatagtggcaatcgttatgtacttaagtgtgtttttgtggtggccagtaacgttcttccattatcatatttagcaatcccttaagggcctcttgtaaggcaatctagtggtgatgaatacccttagcatttgcttgtctgaaaaggatcttatttctccttcacttgtgaagcttcatttggctagatatgaaattcttgcttggaatttcttttctttaagaatgctgaatataggcccccaatctcttctggattgtacagtttctgctgaaacctccattgttagcctcattgggttccctttgtatgtgacctgaaccttctttctagctgcctctaatattttttttcctttcaacctttaagagtctgatgtctgatggctatatgtcttagggatggttgtcatgtataatatcatgcagaggttatttgcatttcttgaatttgaatgttggcctctctggtgaggttggagaaattttcatggaggatagcctgaaatgtttttcaagtttctttttttctctttctcttcttaagggataccaatgtgtcatagatctggtctttttacataattgcacatttctctgaggttttatgccttcttttttattctttgttctttatttttgtctgactgagttaattcagagaatcagtttttaagctctgtgattctttcctcagcttggtctattctgctgttaatacttgtaattgtattctgaaattcttgaagtgagttttttagctctatcaaatcagtttggttctttcttaaaatggccatttcatctttcagcttctgtatcattttactttatttcttagctcccttggattgggtttcaacattctcctgaatctcagtgatcttctttcctgtgcatattctgaattctatgtctgtcatttcagccatttcagtcaggttaagaaccattgctgggaaaccagtgtgattatttggaggtaagaagacactctggattttagagttgcagagtttcttgcattaattctttctcatctttgtgggctgtttctttaatctttgaagtggctgtcctttggatgtttttgtcttttttgttgttttttggtgtgtgtttttgtttgtttgttcatttgtttgttttttgctcttatcttctttgatactcttgcaggtttgattgtggtataaagtggattcagttagctgtgtttcttgaaaatcttagagggtccaggctcacctcagcactcttgtggtgtgttctctgctctgggactgggcccctggctttattctctggccccttgagtttagaaacttgctgcattggaggggctgaggtgttcccagtccattggccacaacactatagtagggggtgccggccaaagcacttcattagagtggtggcagtgggatccattcttactcatgggtgccagcagttgtggagtcatggcagggtgcacatgcatctgctggggtgggggtactggcaggagcagagtggcagcatccctacataggttcctgctggcagtcacagcgcagtgaggtgcccgtgtgttggcagggacagggtggtggggcacacatgcacatgcttgctggtggtagagggagttgtgatctgctgtgcactcatgccagcaaagcagttgggaggtactatgggtggactggtgcacatcagcagaggctggcctgctggaggtctccaatggttaggcatggtctgctggcaaaggagctatgatgagggcccccaggaaacaccctggttgggcttccaaggctgtactgcaagcaggcacagccagcctggggccccaggagaggccagaaggcaaggaaattctcatttcagatgggccctgtcccatggacaagaccaccctgctttattcaggtcccatagtcactctaaggttaaaatctcctagaggaggttggtgagccttgggggatgggtgtcccctggctgtgctccactacagccattctcatgtcaaacactctgggctttacacagactggagtcctgcccctggcatctctctaagcagctgtcccttccagcacaagtgtccatgggggtcatggggtctcctgctgctaggattctggaggcccatggcaacagcaggccactcctcacctgttcaactcaacctttccccaggagttgctgggagccaggaatgagtcctggtgcttggcatccccatgcagggttcccatcttcctccaccttcagctcagcatctgtgtcctcccccgtctactctcaatccactctcaatgcctccccttcaaagatctgcttggaaagcacccgtcttcctgatgtctcactccctccatggcagatattcctcctggctgcatctagtcagccatcttgactcgcctccaaagtctttttaattaccacttcggttaaattagtaactatcattttacaatggcctgtgattctgttttgatcaaatattttgagccttttagcatctataacaaatgttctcaaaaatcaaaatcctaaatcaagtctctgccttagtcttatttctggggcttattaaggctataaaaattaatcaccataaggttgtacaagctttttacagcttccagtcaggctatgaactccagtatcaccacctccagcctgataattacatatattggaagaaaatcagttaaaggactccctctagacccttgaaagggtgtgagagacaacatggtttcgcctgccttcatgtgtcccagtccatccctgtggctgcctctgtccacctcagcttgcccactgtctttccttcccaactgtctgccctgctgacttctggcctcagtgacagatgcaaagacaaggcgacagccccacatagaccgtttaaccagtcccacatttgcataagctaaatggtcatgtcacagtctgttgcccaggctggtctcaaactcctgggctcaagtgatccacccaccttgacccccaaggtgctgggattacaggcttgagccacagtgcccagccaagaacccgtttttgagtgggcaccttggcacacacctgtaaacgcaacactttgggaggccaaggtgggagtgtggcttgaggccaggaggttgaggttgcagtgagctatgatggcaccacctcactccagcgtgggtggcagagtgagatcctttagaaaaaaaaaaaaaaaaaacttgttttctctgcagccgggctccgtgaccaaacacaaacacaaacttcccctccagagggtccaggaggggctgggctgcaggaggtgcttagggcctcttagggaatggtaagtgaccacccaacgcaggcactcagccccaggggcatatgcagagagagggtccaggaggagctgggctgcaggaggtgcttagggcctcttagggaatggtaagtgaccacccaacgcaggcactcagccccaggggcatatgcagagagagggtccaggaggagctgggctgcaggaggtgattagggcctcttagggaatggtaagtgaccatccaacgcaggcactcagccccaggggcatatgcagagagaggctgggaggacactttcagtgactggggttacaaaccccaaccataagacattgctggctctgtgagccgccacctccagaaatctcccacttagttcttagcacttatccactcttcccttttcctactctcaattcctggaggatgccctcctttctcaggctcagaccaacctaccagctccactctagacctgaacacatgactcctccctctgtctccacctggaaatctcatcagtgcctcacatttacactcctgaaaatcaggtcctgcctacccaccctcttgctccacctgattcctgccctgtttcagccagagaccttgcagtctcctttaactctcaaacccacccatgtcgtgtgagcatactgactgtgttctatgcaagaaagagcagtttcttggtggtcctgcggttttattagtccagaggcaaagcgttggcagagctggtttcttctgaaccctgggagggagattctgttttcatgccttttccagattctagaacccatattccttgctctgtgtccccttcttccatcttcaaaggccatcctctcatctctgtgtccatcatcacatcacccttcccctgactctggttctcctgcttccacttataagcacccttgtgattacatcatacccacccagacaatgcagggccatattctcccctctcgagattaatttaatcacatctacaaagttcctcgtgccatatgaggtcactaaaccacatgttctgggggtttgaatgtaaacatttgggggatgcattattcagccacccacaagcactgctccccactggccacacactatgcacagccgagatcatgcaagtgaggcacgttcatcaacagcagcttcagcaggaaactatatgctccactttcctgccatttgtatctggatttttttttcgctatcattgtagaaagagtggtattgtaaaattaaagatggattattttctttctagaacactttggcaatctatccaacattatttatccccttctgagtgtcaagtgtgaggtcattctttcattgagagctcaatgcctacaattatgataatgcatattgggtactttcacacatcagaaagttcttctttcttaaaatctgttcttgaattattcattcttctctagctttttgttgatctattttataattttagaaaaatcagaaagtaacttgaagtatctgtcatctctacaggtttacctccctctttgtggccttcagaatgtcatgacacgcttttcccttgctcatcacatggtttctatgtatgagacctcatcacaggagctgtggtcccccgggagcaggcatctgtggatggtgccttgctcctggctgctgggacctgtgtgctgccagtggcactccacgacagtgatttcccagctcagttttgcagctccagatggtgggtgagacactaggaccactttgtgaacagcgagggcttggggtttgcttttctaccatgtccagggctgctgttcatgagggaatgtttctaacctgacatcatggctgaagccaacttagaacctctctagccgtatggggagtaggtgagtgatacagatgttaattagctcagtggagccactcccctatgtagacatgttacaaaacattatgctgtacagaataaatataggtcatttttatgtgtcaatcaaaagagaaactaattatttaaaaaaaaaaaaaaaacctctctactcaagccgaaacctcagctccagtcccacaagtcacacaaggctgctcccgtcctgtgtatgttaaacctacctcagaaatgcaagggggcattcaggtttcattctcaattcaaatgccctttttaattttgtctattcctagcacctggcaacttccagctctttttttcggggctcattcattatttaaagcacgtataatttttcacccacattctaacacatgtagtactgtagagaatccttccctaggaggatctacagcattagaaaagaattaagaactccaatatttacaagaaggaaaaagcaaaaagagatcaaaaaatgggcaacttctagaaatagaaaaccctcatgagtatgatgataaatcgctggcacacatgtgaatagttacttgatgcttatagtgatgtctgggaaaataacatgaaatacttataatctgtttctcacacatgtaattcaaaagaatagagagaagatgatttgaaatattcttaagtttgtaggaaaaaagctacttccatatgcataattgcatgtattttgatactgccattattaagaactatctaagagggtccattaaaaataaaatttcttggctgggcacagtggctcatgcctgtatcccagcactttggaaggccgaggcaggtggctcacctgaggtcagaagttcaaaaccagcctggccaacatggtgaaacgctgtatctaccaaaaatacaaaaattagctgggcatggtggcatgcacctgtagtctgagctacttggggggctgaggcaggataatcgtttgaacccaagaggtgtaggttgcagtgagctaagatcataccaccgcactccagcctgacagacaaagcaagactctgtctcaaaaatattaaaataaaatttctcattcctattacagagtaatttaattcattaatgccctgccctgttacaaaactcatttgtaaaatactaattgtaattgtgaaaaaatggcaattgatactaattttaaattctaaaaacagggcacccatattaaagattattctgcagtaagagaattagctataacattttgtaataaggtggagaaaacattctccaacttacaatggttggtgagaagaaagtttccagcacggtagatggaccctaagagcccttgttgaaataataagacaaaaagatatacagagagatgagccagatgaagggagacagagagagagagagagagagagagagaggcacagaaatgagagatacaaagtgaaagagggcaacctgtggggtcatcagatatttgttttctgttttgtttattctaacataaaggcagtggtgggtcatcgatgtatttagagtttgcacaatcactgtggaacacagacagacacaggggaagaggagaaacacagggcggtggcttgcccttggactgttcttagttcctcaaaacgtaacagctttgcccaacctaagggaactttcagcagctgctcttctgccataggcctctttcctgccttgttttcatgtggctgactgtttctgttcctgcaggtcttagctcatcagacaggcatttattacctctgtgtcaacagtgggagcttccattactctctagcatgacactccccttcctcttttaggaaatttaacatggaagtgagtttgccatcggccttctccccacagtgttaacagtggtgaggaagccagcctgttccaccttgcccctcccatgattccaacactgagttcagacttgtcacatggaacttatctttgcatgtttgtggcacagacagatggacccaaccatggattagtggatggatggatggatggatggatggatggatggatggatggatggatagatggatggatggatggctgagtaggtgtgtggatggaagagtgaaaagatagatggatgcatgtatgggtggatgggtaggttgatggatgcatggatgggtggatggatgggtgagtggatgaatgggtgggtaggtgggtggctacatgcatggatgagtacttggatagataagtgagtggatggatggatggatggatgaatgggtatgtgaagggatggatgtattagagtgggtagttaggcaggcatgagctgatagtcaagtgattgttaaactgcctctctaaaataataattggtctcggctggacgcggtggctcatgtctgtaatcccaacactttgggaggctgaggtgggcggatcacaaggtcaagagattgagaccatcctgaccaacatggtgaaaccctgtctttactaaaaatacaaaaattagctgggcgtggtggcgtgcatctatagttccagctactcgggaggctgaggcaggagaattgcttgaacctgggaggaagaggctgcagtgagctgagattgtgccactgcactccagcctggtgacagagcaaagctctgtctcaaataataataataataataaataataattgatctcagccagcgccaagaaaaggcagtctcccaatagatagaaaacacccgaaactggtcatcagcagcttcctgataagatctcaggcattgggtgagtgggctcaagcatatgcactaagaggcaaagtggcagagtttaactggcacataatcttcctctaggaacactctaatagtaagagaaggacacctcaaatgagcatgtgcacatttcattaaacccactgtgtatgcagcccctcccaagtgctggcaggccactgtacatgtgggcagcccactccaagggaagaatcaagggagaagaaatacaaatcccagaaccatgtcaatgtataaaaccccaagtcaagggccggacagagcacttagatctctcaagtcgcccacttagccctcttccaagtgtactttacttcctttagttcccactttaaaactttaataaacatttactcctgctctaaaacttgcttgggtctctcactcttctgtatgccccttggccaaattctttcctccaaggaggcgagaatcaagttgctgcagacctgtatggattcgctcctgctaacagatagctggatgggtggacagatgcatgaattagtggatggacgtttggatgtgtgggtgggtgggtggattgtgggatggctggatgaatgcatggctggatgggtggacagatgcatgaattagtggatggatgtttggatgtgtgagtgggtgggtggattgtgggatggctggatgaatgcatggctggatgggtggacagatgcatgaattcgtggatggacgtttggatgtgtgggtgggtgggtggattgtgggatggctggatgaatgcatggctggatgggtggacagatgcatgaattcgtggatggacgtttggatgtgtgggtgggtgggtggattgtgggatggctggatgaatgcatggctggatgggtggacagatgcatgaattcgtggatggacgtttggatgtgtgggtgggtgggtggattgtgggatggctggatgaatgcatggctgggtgggtggatggatgcatggataagtggtggacggatggacgggtgagtggatgggtggatgtgtgtgtggatgggtggataggaaagccctctaattgattacagggctcagtgtgtgcttcaacatcatgatggcatcatcacattggtccctgtatgaagcagtgggggaggagagtgtaccaggggagcaggaatgacttttctccagaatcgacctctcccaccctgcagcctgggctgtgcaggccacattggagaaggtgcggtcgactactcctaaatgttgttgtgtccaatggcttgttgacgttgatgtaggaatgagcctacatctccaccatagatggaactgtttgggtccccaaagcagaaagcctcttctgttgcaggtgctgaagtttccatcttcttctgcttatacggaagctcacgcatcccttggatggcaggcgtcaggttcctgtgcgcactgagttccccccttacatgctttggacagaagtgtgagacacacaagattgctgcaggaagtccacctgtggggatgctgcgacttctccagcaagaacacgagtctgctcattgaccatcaccacacataacaaattaagtgtcccttttttgataacacgtcattgtttcacagagtattcttttaaagtgtataagttgactgcagttattattttttacttctgttactaatttactcataattaggcacaatttacacttaagaaatttcttaatagttttttcctccttaaggtgaactacagtcagataacatacttatcaattgtctctagctcttgtcagaaaaacatatagatgtgtgtgtgcgtgtgtcttggcctttccaatgatgaattaagatgtgcattgagaaggcattcactttatttgacgttaaggaagtaccaagaagacgctctccacagaccctgggaaagccagcagctgcaccccgaggctgtgccaggcagggaacaaggaggcagcaccacctgctgggcagggaaaatgtcctcccagtccctgccgcttctctgcagaggcacaaagagctgccccttctcctgggccttctcctgggctgatgagattgctccccgatatgccaaatcagggttgtgcatctgaggctctgtctagactctcagctccttcctactcctgcaaagtgaagaaaacaatgccaaggggtcctggaggcgtctctacccctggagagttttgactctcttcaatagtctccactaccctgccctcactccatgtcctccgtttctccctaaagcggtgcccagtctgattgcactgtggcagggataacgaggggccaggacatcaggggagagaagtttctacctgagtcacagcagcggctgccctgcagactcctgaagacacaagacacatttccatcccagagacccagcgaaatgcaacctcaggctagagacagccagttattttttcttgttctgtcctggagaggccactgagaaagtcgagccccttgttgaggaaaacatgagatctctgtgtgtcgtcctctgcctgatggctgtacctccatgtgagtgtctcagagatttcagaacgggggctgtgggctgtggtgtccgcttgtgactcatctctttgcttcttgtccctgagtgtcctgcatcagatgcagctactggagtcatgcccagggctggtgaggtcctcacagacctctgggcctggacccagcagccctctgggaaggcgctggggcacctcagctccaggggcagcacacacttcagcccagcctttctgggccaactctccatctgtagagacacatccaaggcccagttatccctgcagctgagctccgtgatggccaagggcagggccgcacattcccgtgggagacagaatggggacctcagcgtgagcccagacacaaacctccctgcagggaagcacaagaccaccaggcggcgctccagaccacacagcggccccagaagcaggttttagggggcggggcagacgtgtccgcgttgagtcaggtcattggttttactttccctgagcaaacggcctctgccaaggactcactgcacctctcaccttcacagttgttttttttttttttttaatcaccctgtagagttttgctagctaatttagatattgaggagtgcttcatacttccttgggcctctgcttgcagaaacatagcaattgtaaggaggcacgtgggaaagccccggctcggtgacccgggggatgctgctgtggccctggcaagagggcgtcgggccgcagtaacaaaggtgcagacggctctcagcctgcgcccgcggagtacaacacataagggctgtaacctaacgaaaaaagaatcgcagtgcaactgtcctgcatttgagtttgtgatcagttttgccctttgtctttaacaggttctaacataaaattttgaatgttggttcaagccctgtgggtaaaatgcacttacccacattccttaaacaaatagaacactgaggtggaaatgttttgaaaaagtagttttcagacatttggaaacaagcatcacaggatcataacccctgagaaaagaaaaacaaatgaacgaatcctgctattgcctgaaagcagctgccaggacacacggaaaggcttagtgagctgagcggacagagagcagagttcaaggcagcagcagcccgaggggaggagcaccggggagcaggctgctgtgcagccaggatgggccggggtggggcggggggagaacagctggagacttgccgcagggagggggatccctcaggtttggggctgagaactgacttatgcctgacttatgcctgcatgaaaagaaactactcgatatcagggggaaatcaccagaaacctgtggacccaaaactacacagagcctacacaaggaaagcattgtttgtgttctcccagccagggtggaaagaccttgagatatgtaaagcttcaagcaatcttccgaagtaatctcgtgagtagtggtgccacattaattcaggactaaaggctgctctgaactgaacctaagaaatgcttcaagtgtagcctggagcccgggtgcagtggctcacacctgtaatcccagcactgtgggaggccgaggcaggcggatcacttgaggtcaggactttgagaccagcctggccaacatggcaaaacctgtctctactaaaaacacaaaaattagctgggcgtggtggcagatgcctgtaatcacctcccacctggacccttccttgatacatcagaattacaactagagatgagattggggtggggacacagagccaaaccgtatcacataggaacctaaaaggataataaagtaggaaaacttcccacatcagtaaccctttatccgatagtaatcccaatctgcaaagtaaaactgtgtgattttactaagataacggaatcttctctacagaaggactttccagtgcaaaagctccccaccctcaccatgaaatgcacgtgaccatttccaatttgtgtaaagtcctcagttagtactgagacttcggaaggttagaaatccctttgctcatgctgcatggtccggatgagatgtaagaatcattagctaatagacatgcaacagcttttgtgtgaaagatgttatgagacatttaaggtatttgcttgtgattactaagcattcattgtatcattggagcacatgtgcttttataccctggagaaattccagtaattgaattgctgggttgaatgggattttgatttggattaaatttaaactatagattttatttagggaaaactggcatcttaattatgttattggggggcccttgctcccagagctcccaagatggtggcaggccgcttccaaaatgaccgcaggccacttccaagatggtggcaagcctcatgttctctgacctggggttcttggcctcacggattccaaggaatggaagcttgggccatgcagtgagtgttatagctctattagaagccgtgggtcacggaagagaaccgtggaacccagtgactagtgttcagctcgattaggacgaacccaggcacttagccgtgcaggaacaatggcgagcatttggcccgatcgagagtggcaatgggcgcctcgctggatcaggagcacagcggataccctgatggatccggagggatggaagccagcggtgggtctcccacgggggcaaacagcagtggtggacggtgagcgaaagcgaagctcgagccgtaacaaacatggaccagaagagtgcagttgcaagatttagtagagtgaagacagagctcccatacaaagggaggggacccaaagagggtagctgttaccggctcgaatgcctgggtttatatcccgatcattgtccctcccgctgtgctctcaggtgatagatgattggctatttctttacctcctgcttttgcctaattagcattttagtgagctctctttactatctgattggtcgggtgtgagctgagttgcaagccccgtgtttaaaggtggaagtggtcaccttcccagctgggcttagggattcttagtcggcctaggaaatccagctagtcctgtctctcaattacactgagttttccaatccatgcatccaatatgtggtgtatctcttcatatgttcatagcctctgagcaatgttttacaattttctgtgtaaagaactccacatcgttttatgtttcttctaaggtatatcctgattgctttttatgtcttcacaagttttttcctttcaaaattaattttccaattgtttggtgctaatatgctcaaatgtccttgattttcttagtttgaacagtccgtttttgttttggggatttatttttttttcagattctttaagattttctatgtctataaccatataatctctgaacagagacagttttgctttttcctttcaacttgaggtaggttttctgggtagttcaggacgcgcaggcactgggtgggtggtgttagcagctgcacgatgccttggagaggacactctcgggggactgtggccgctgctcagctgtgaccgttcttatagcaccagcagctgcggccaccattcttatccaatttccaaagccacaccacaggccctctcaagaacgaggcgtggaggctatgccctctcctggacacatcatcattcccaagccccacgatgtgggccccatgggacgcacacctttgtctgtccagacctcagccccacctcctcatcctgcaccagaactcttcagagcccagtgcatgaaatgggctaccaaggaaatgagggtaggttcctgagaggaaactggccctgcatttgggagctaggagtctgctaattcgcctggcagccctgtgcagccctccgtggctacagtccaccccgtgcccatcagtgcctccttcctgtgcaagcctggacctcgccctgggctcaggatgggctgtagaccgagaatgcaggcgggaaagtctttgtctatcggggccatagtcaggttctacagtgagtcagggaaagacctgtggaggtgtggatgaggacaatgggtccaccatcaacaggaggacacgggttcgaccccttgcagaggcacagtcccacatcactgggaggcagccacactcactgcctcgccctctcctcacacagtgcagtttccacgttcacagccccagccagtcaccaggaatgccctgggggcggcctttccccagtgcactccgagccctcccttggctgtgcggtgagctccatgcccaggagatatccacccatagtcctccggaaagcagctgacctgccatgccctggaaccacaaatccccacagatcagccagcctgcagtgggccttggatgtggtgaggagtggtggcacccccgttcccaccccacagatgcaacgcctgtgggtgacgcatgtgagtactgaggagtagagggtagaactgtaggccccgagaaccacagaaactcgggtgttacactctggggccatgtaaggagaaagtgtcactggacagaaacaggcccctcctagacactgtgtgcgccatagtcacctgtcattagctctcactcttgcagattcatgattgaggtggttaaaaaaaaaaaagctcctactcacccatccaaccccatcctggggtgtttccaccacccttggggtttgggatgagctgcccttgcccactgtgctctgtggacctccctttagaagctcacagctccctgcactcggctccatcctgccccaccacacagaagcaaaacccctctcctttccactgcaggcttttcctggaccagaatgctgacctgctgcccttcactcccgaagtggtgggactgcctggggtggtgtgggtgttgagccttcttactctagggacctggcacctggccccaggggcacagggatggtgcatctgcctagggatgcctcctcatgccagggggtgggggttagtaccatcggccctcaggatttgttgcatgaatgagtgaatgggtgaataaatgaaggggatctgatctatgaataagggtatatagactttggttgatgtaggacgccaaatgctggaatttcagagtcatcacacccaggggccctgcctctgagctcctctttgcatccaatctgctgaagaacatggctctagggaaacccagttgtagacctgagggccccggctcttcaatgagccatctccgtcccggggccttatatcagcaagtgacgcacacaggcaaatgccagggtgtggtttcctgtttaaatgtagcctcccccgctgcagaactgcagagcctgctgaattctggctgaccagggcagtcaccagagctccagacaatgtctgtctccttcctcatcttcctgcccgtgctgggcctcccatggggtcagtgtcagggagatgccgtattcacagcagcattcacagactgaggggtgtttcactttgctgtttccttttgtctccaggtgtcctgtcacaggtacagctgcagcagtcaggtccaggactggtgaagccctcgcagaccctctcactcacctgtgccatctccggggacagtgtctctagcaacagtgctgcttggaactggatcaggcagtccccatcgagaggccttgagtggctgggaaggacatactacaggtccaagtggtataatgattatgcagtatctgtgaaaagtcgaataaccatcaacccagacacatccaagaaccagttctccctgcagctgaactctgtgactcccgaggacacggctgtgtattactgtgcaagagacacagtgaggggaagtcagtgtgagcccagacacaaacctccctgcagggatgctcaggaccccagaaggcacccagcactaccagcgcagggcccagaccaggagcaggtgtggagttaagcaaaaatggaacttcttgctgtgtcttaaactgttgttgttttttttttttttttggctcagcaacagagatcatagaaaaccctttttcatatttttgaaatctgttcttagtctaatggagattctctaatatgtgacaatgtttttctcttgctgtttttggaattctttgtctttgacttttgacaacttgacttttgacagtgtgcctcaaagaagttctattttgggttctgtgaacctcctggatctgggaagttttcagctatgatttcattaaacgtgttttctacaccatttccctactcttttggaatacccataatgcaaatatttgttcacttaattgtgtcccataaatgctggggattttcttcattcctttttactctttttttctttttattcatctgcctgaattatttcaaaagatctgtcttcaacttcagaaactcttttgcttggcctagtctaatcttgaaggtctcaattgtacttttaatttcattcattgaattcttcaactctggaatttctgttggttcttttttatgatacttatctctttgttgaattcctcattcaaatgataaattgttttcctgatttcactgaattttctatctgtacactattgtatctccctgagtttcttagagattatccttttgaattatttttctgacattctgtatatttccttatgattggggtctgctactggagaatgactgttgtctttttcaggtgtcgtgtttcctggccttttcatgttttatgtgttcctacgttgatttctacacatctggcggaccagtcatcccttgcaatttaatggagtaggttttgcaggaaaagacttcctagtacagacgggtctcagggtgtcagtgtggcggggcgtgctggctttagttctaggttgacgcagtagcgtagtctccatgtcgtttcttcagctgccgtccacattggtgacgtttgcgagtgtctcagtggcctgggctgagaggtttgtggcagtggaagtgcaacgttgctagaggtggactcaccaggctgtttctgaggtcgaggcacatgcatgcacatggtggattgaccaacttggtgccaggctcactagggttggggacatggggctgtttctcaggcccaggatgcaaacacaagtctctttggctggcctgggggtgtggcttctgagggcaatccacagggctgtttctcaggttcaggacacaagtgcatggccgctcaactggcctgggcatgtgtctcccagggccaccccatgggctctttctcagacccaggacatggccacatggcttcctcagctggcctgggtgtgtgtctgctggggggctgcaggggcacagggttatttctcaggccggggtcatgggcgcacagctgcttgctggcttataggagtgcctgccaggggtggcccatgatgctgtttctcaggcctaatttcaggtgcagagcctttgggcaggtcaacggcatacctgtggaaattggagtggatgccacagggctatttctcaggtgcctgagtgtgggcacatatccactctgccagcctggagttagtatcaggtgctcggtggctcaggggcctctcctgctcaggggagggccctcagcagcttggccaaatcaatggtggattcaccctgggcaggcctggcaggctcttcctccagctggatgtgcagcagcaggggttgggttttttgctgtgcagggccagagtcacggccaatcctcagcctaggctctgcacagccagggttgtggcattcagccacccagatatgggcatcctgaagatggagccccaatgctagaaaggggcagtggctaccagcctcagggcaggatgcactccagaggcggctccggtctcaaggtggcgctgggctgcagcagctaggctcacagtggatgaatgggggcagggagtacacaccttgtgctcctaatctgggatcattcctggcagctcccaaacttggctgagggcttgcaaaacctgtggaattctcctgttgcaagggctgtagatgtttgcagtggcagtgggtgctggcgggaaatctgcttaccttttccctacatgggaagtccctcctgtgtccagaccaatccgatctgggtggggaagacaaggctgcaaaggccaggtgcctccatgctgccctccgatcaccacgggtgcgtttccacacctccactgcactccgtcagtctcccttcaacactccagtcaaaccttagctgtttcttctttgccttattccttcctcatggggagggtgtgggtgaacaccaggcttctctaagttcttcatccatcttgctgatgtcattctccatccaggcatgggtttttaagaagtagtgaatactgaaatttcagcagaggacacctctataaaaattctgcaactggaaaacctccttaaattggctgattgtcattacaattggaggaaaactgccaataatttcaaatttagaaggctgagactctataaacaaagactaacaatatgttttctgatatttttccccaaaataatacttttccaagacgaaaatttttccagggtatataagcacatgtgctccaatgatacaacaaatacttactaatcataagcaaataccttaaatgtcttataacatctttcacacaaaagctgttgcatgtctattagctaaaaattcttatgtctcgtccagatcatgcagcatgagcaaagggatttttgaccttcaaaagtctcagtactaactgaggactttacacaaattggaaatggtcacctgcatttcatggtggtggtggggagcttttgcactggaaaatccttctgtagagaagattccattatcttggtaaaattacatagttttattttgcagattgggattaccaactgataaagggttactgatgtggaagttttcctactttattctcctattaggttcctatgtgatatggtttggctctgtgtccccaccccaatctcatctccaattgtaattcccatgtgtccagggagggtccaggtgggagtgattagatcaagggtggtttttcccaggctgttttcatgatagggtgttatcatgagatatgatggtttaaaagtggcaggttcccctgctctctctctcgcctgctgccacataagacgtgccttgctttcccttcaccttctgccatgattgtaagtttcctgaggcctccccagccatgcggaactatgagtcaattaaacctcctctctttataaattacccagtctcaggtagtatctttatagcggtgtgaaaatggactaatacactatggctttgaattaataatttaaaatttgtcagcttggcaataaaacatcctgttgacatttattttttaggtaatattttaaattggcagtttcattcatgtttttacaaattcttattttcagggtgtttaaggcctttgctttgaacttggtggttccttacactccatgctgttagtgaagagggaccaggttgggaggcattggtttgggtggtggtcaggaagggcagagtgatttgagtagggtctgagtggataatagctcatcagtttggaatttataaatgaccagggatgatttaaggagattcctgccagacacctatgccatggccatgccctatctggatctccagccgtgagatgagaacccagccatgcgggggagtctgttcgttctgctcaatgttgtaagtggcacatgctattggataatgtagaattgaatggatatcattttattattataatttacaaacttcctacaataaacttatcacctttatacatagaaacaaatataagtacattttccctcccctatgtcattttgagccctctctccaaaccatcctcccactctgcgactcactgtcctgcatttggctatgctctggcaagtcctgcttagacaagcactcaccagaccacctactcagcctcccttcagcgcccacctggcccacctgctcaaatacatgttgagtggtcacacacatggactgaacaccatctattccatgcactgccccagtgaccgcactgagcagcaagagagaaatgatcgcattagctatcaattatgccaattcaaatgctggagtctttctcagatacttttcaatgttcaagaattgttgattgtgaattctatacccaatgaaactatccttcagaaatgagcagaaaatggataccttctcaaataaacaaaaactaaaagaattcttgctacaagatgtactcttaaagactggctaaaggaagttcttcaaacagcaaggaaattgaattgatcttatgtcctgcacacttgctaaatttcctctcaattttagcagcactgtttagattccataggattttccatacaaacagtcatgtggtctatatatagagacagattttcctcttttccagtggggataaatttatgtctttttctttctgtgttacagcaggtaggacctccagtacaatgttaaacagaagtggtgaaaacagacattcttgcctgtttcctaacgttggagtttggtcttttactatggtgtcagatgttagctgtagggtttttataaatgcccttcatcacattgaggaagtttgctcctatgcctaattttctgagagtcttttaatgtgacactcatgctagaatttattaaatgctttctgtctactaagatgattatgcagttcttatattaacatgaataattacatttatttattctttaatatcaaggcaattttgcattcctgagacaaaccccatttagtcatcatgtgttgttattgttacatattgttggattcaatttcctcaaaatttgttaagaattgttacatctatgtttacaaggaagattagtctgtagggtattttttcttataataactttgcctagttttgcaatcagggtaatgctggactcacagaatgagttgggaagctatttcctcctcttcatttttctgaaagaatttgtataaaattggaattatatcttccttaaaggtttgcaagatttcataatgaagtcattggcctagagttttctttgtgggaaagtctttgtttgtttgttttgtggtttgggtttttttttaagagacacagtctcactctgttgcccaggctggaatgcagtggtgtaatcatagctcacagcagcctcaacctcctgggctcaagcaatcctcctacctcagccttcagagtagctgggactacgggcatgtaccaccacacccagctgtttgtttgtttgtttatcgctttgtcttgtttttgaggtcttattatgttgcccaggctggtcttgaactcctggcctcaagtaatcctcatgcctcagcctcccacagtgctggaattacaggcatgagccactgcacacagactgtgggaaagtttttaactaaaaattcaattttctcttccttttccagtgagctttccagtgtctttcaattaatgtatctattttatctaagttgttgaatttattgtcaaaatttttttaaacaatattcctctcttagaggttgaacatctgtagaatctgtagtgatggcacctcttaaatccctgatcttgctcatctgtgtcgtctctctttctctaatcagtatgcctaaagtttaatttcattgattttcttaaaaaactggttttggttttattgatttttttccctagttttttgtgttacatttcattgacttctgctctgatatttactatttcctttctactgcctacagtaagtttaatttgctattttcttagtttcctaaagtggaagctaagtttattgacttgaggcctttcctctgtctggatgcggatatttgctgctaaacatttccctccaacaccatgctgtgagttttagttacagcgggcttggagttggcctgagaaattctacttaaacagctgcacctatcatgtaagtgataaatgatgtacctgcctggccctcacccctggtcaaagaatgggatgtactaatgagcaatgttgctgcgtagctgtggatttcaaggtattttctgtgtggttttatcatcagcattgtttgttgatgactgcaagactgatgatttgcacctggcctcggtgagatccccgaaagaccctgcagatgggctggttacttagcagaaaatatgacaacgtggccagcaggaaacaggaaggtacaatcggctgcaggtgagctgttggaagtaagttccaattttcctattttgtatttgcattttaatagtgagactgcgcttatgttatttgtgtgaaacagctttattcatagcactgtaatttaaagagaaaacccattcatgggaacaacaaacgacctagacaccaaggtagctcatgccatccaaggctatactgtgcagtgattgggaaaatgggcactggtcccagaagtctgatcgacactctgccactggctagtcccgtgctggggggcgaggatccacactctgccactggttagtcccatgctggggacaagtatccacactctgccactggctagtcccgtgctggggggcgaggatccacactctgccactggttagtcccatgctggggacaagtatccacactctgccactggctagtcccgtgctggggggcaaggatccacactctgccactgattagtgttgtgaagatttaaataaagaacccacaccatattctttgacttgtgctttccgtatactgagagatagtaagagtacattattattatttataaagtaaactagaaagcacatgggaagacaagaagaaaacctgaataaacatgaattaccccattttcctcaggagaaaactttcacactctgaaggtacacaaattagcctacaaatttaatgtaaagcaaatagactgttgtaggtaccaattctcaatgtcacagtgttacatggaaagtaaaatacacaagaacagcccaaaagatggaaacaatggacgtggtcaaatgacatcagtacaacatccatatggtcctaagtagccatctttaaaatgggttagaaatgccttcaatcattcacacagacacatgcattgaacaaactctaagaagtgttcttacacgggaaaagcaagttacagatgcatgggcatgatatggatgtagatgtgtgtatgtgcatcccactcatacacaaaatacccagcatcgcccacatgcctgctgtgtgcgtaagtgtgagcgagtgcacagacaacagcgtgcagaaattcaaaccaagctgtgggtacttgttaccactgggaagggagtcggtcacagagggaaagagaaacaggacatcagcctttgacttcagaactgttcctgccttttcacatcctgtgctgttttcagcatcatcggagcccttaacacacatcacgggagtaagagtgtgttagagggagcattcggtgggacagatattgccatggcttgtggatagagttcacagtccttaataatccccgagatggcagccaagagctacgttctcaatcacgcagcttcaccccagaaactgacagaaacccaacaaccaaaaggtgtccattctgacagcctcagcctgtgctggctcagatgagcaaaaatgtacagatattaataatgatgttgatttgaagagcacagaggggggtatgcatgataagggtccaaatttttaccttaaaaaagaatacatttacttctcaatcacctacataacgatcattttttaaaaaactgatcaaatttggtgttacaagggcacgttgcaaattcttctggctacttttctctgactattctaattacgttaccgtgttttctcctgtatgtgcccgttcatgtgaatgtcatttctggctacttttctctgactattctaattacgttaccgtgttttctcctgtatgtgcccgttcatgtgaatgtcatttctggctacttttctctgactattctaattacattaccgtgttttcctgtatgtgcccgttcatgtgaatgtcatttctggctacttttctctgactattctaattacgttaccatggtttctcctatatgtgcccgttcatgtgaatgtcatttctggctacttttctctgactattctaattacgttaccgtgttttctcctgtatgtgcccgttcatgtgaatgtcatttctggctacttttctctgactattctaattacattaccgtgttttcctgtatgtgcccgttcatgtgaatgtcatccaggcagatttcccaaatccggcttcctgtaaccaagggctgaaagagggaacggtttcctgggaatcctttttgcagtttattttacccggaggcagaagcccacggttccgtgaagagtctattgctctcccctctctccttttgtgtctctatttttaattgacaaaaaagcaaatgtgaagattcctggggtacaatgcaaagtgacaatgcctgtctatattgtgggatgattaaaacaaggtaagtggcatatccatcacctcacacacttatcattttgtggtgagaacatttaaaatctcatcttttagcaattttgaaatagtcattattgttaactatagtcaccatgctgtgcaacagatcaaaagaactgactcctcccatcagcagaaacttcatgccctttgaccagcatctctcctttccccgtccacgactaacccccagcccaagagaacagccaacacccacctcgctgctgccacacgacatgtcgggctttgatgggatggaggtgagggtggggaagacaattccaaagctggagcactggcctcacagctcagacactcttctacttatcctgagagaatgatgtgctgagaccaactaaacctcccctgctcttcccacatggcagaaaagaggcaacccagggaagccattgccaggacatcatggtcacccaacccttgtgcagaaaggaagcacctgcccaggatgccatagcacccaaccctcatccccaaggaaacacagcccagggcaccatggacacccaaccgtcatccccaggggaggacacagcccagggcaccatggacacccaaccctcatccccaggggaggacacagcccagggtatcttggacacccagccctcattcctaggggagtacacagcccagggcatcttggacatccaaccctcatccccagggaaggacacagcccagggcatcttggacacccaaccctcattcccataagagcacacagcccagggcatcgtggaggcccgaccctcatccctaggggaggacacagcccagggcaccatggacacccaaccctcatccccaggggaagacacaacccaggccaccattaacacccaatcatgtgcagggagggtgtccttggagcctgggactcttgccagtgaagcggtggacaagaaactgaggatgcgatcagcacacagaaatctcaggcagcctaggatacatgaggcctctcacccctgggaacactgagcagccaccaggagcccacaccttgaggtacagcaggagccatgcgctcttgctcttgctcactcacactcctgcacacagccactgacacacgccctcgtgcacgttgcagattaactccactggccttgcacttgcaacgctggaggctgagaggtatccccaggttcttttctcgtgagaggggcaggctgactttcactctcctccatgtgctagaggcagctccaccaacactggctgccctgagtggatgcacctggctctggaattcctgtcatttgctttggatccaggagcccctgcctcatgtagctacttaacagaaaggaggaatccacccaggacatgcccagacgggagcctcacaggatggacagtggtgtctggggtcacgggcagccctgacccagcagcgccagcaccagcacacccagtggggaaggcggggaggcccaaacgccacccacagtttgttactccactgggtgggacccggcacccctgccttcctgacaccctggagtccctgcctcctcctagagcccccaagcccatctgcctcagagcatccagagacagacctggggagccatttcctcaggccctggacaaggaaacagggaattccaggttatgggtgcctggggcaggtctcaggcaggtgctgggaaccagagagaggggtcaccgcgaggcctcaggcctggcaccagcactttgagcctcagtttaccagcccacgaggtgctgagtctggactggatgaccttcccacccccagtgacctctgccctttcccgagcatgtcagctctgctccagcatcctggtgtgagcgcaatgccactttttttctcaacaaatacgaaaggaggaaggtgcccccagggccctgtgccctgaggatgcctgtgtggaggggtccatttcatcactggtgtcactcacaggaagggacgaagccacctgccttgacggagcttactccacctccgccgaaggccggggaggtccctcacagagaacctgaggcccagcaggctgcagaggtgctggcatggaatgactgctcagacgcccggggccggcagagaggacggatgtgggggaggtgcacactgaggagcctctccttggaggtggagacacgtgcaccacatggaccaggacacagtccacgaagcctcgcatccccctgagctgcagctcaagggcctctctctgagcccagagtcccacccctgggaggcagctgccccagctctgagggaggagggcatccaccaggccctccatctcctgggggcaccagcccagcccagaggctctgcaggactctgcacctccaattcatggccaggactttctggatgtatcttaaggactgaggactccacatcagggaccacacaagaccggggtcccggacacgggggttgggggtgagcatgtcaccgggatgggctgtggcgtcactctggtacttcatccggacagccagggaccaaagccacgccctcagccccaccccacccctgcctcacatggcaacgcagggtctgcagatgcaggagagtgagaagcatggtagccaggcagactagaggacccgagctggggttgagcacctccctgtctacccagggcatggcctgtgagactgcaggtggcctagtgtgtgctgcaggctcaaggtcctgccccagggagcatgacattcaggcccagaaattgcatcgtgctgcacacagtccaaggggataaccctgtgaagttcaggtcaccagcaggcttggggtcaagaccgagctgcagaggacaggtttctggaaggcacagcatcatgggtggagggacttggagcaaggtccttagccccgggaccagtgaatgtgtgcccttatagggaaagggggtctgtgcagaagcaagttagctgaaaatcatgaagtggagaggctcccctggattaaaggggtgagccctaatgtaatcacaagtgtccttctaggaggttggcagagggagactgacatagacagaagccaggtgaggtgggaagcggaggcagaggccgagagagcagacgctacgccctggccctgaagacggaggaggagccgagagctcagggatggagagactggaggaggcagggaagttctccccgcaagcctggagggagcatggcctccagcacccccagaccttggccctgcaggattcatctggacctgtggtataaatggtgtttaagccactgggctgtgcaaattgtcatagcagccatggcgcattcctagagggagccctggtggggacccagcaggcagcgacggggccctcacaagcctgtgagccactcagagccgcgagagtggctaggcttggtgaggtgcaggccacgcgcacctccactaaggcagccttagggcccacacatcctctctctctctctctctctctctctctatctctctccctccctccttccctccctcccgctctcttggttggacagctctccatcatccccctggacacgaccacctcccaaggccgagctggggcgctttgctcgaggtgagcactgacatcctgggggtgtgaggggcacctgcccagcggccccgtgtgcaggatgggcggtgggccctagctggcactgggcatatggcccggctggtgcctgcaggctgcagcttttctggggtggctgggatcagtgaaggcctccagagtctgggcctgggatccctgcagtgctggctgaggacaggcggggctgggcagtgagggcactgggtcactatcaccacccacggtttattacttcactaggtgggacctggcacccctgccttcctgacaccctggaatccctgcctcctcctacagcccccaagcccatctccctcagagcctccagagacagacctggggaggcatttcttctgcccccagcagaagcccgggaggccgggaaggcacagtgggtctaaaggagaggatcccaggactgcctgaggggtgactccgacgaggcaagcatagagcccactgagaagcggggtgggagccccaccagggatgggctagttcctcatgaaggaccaggacccaggaaggacaagggggcctgctggggcagggtctgctatgccggagtccctgtgagcctggcccagacctgcctctctctttcctcattggtccccacaggtccgtggtggttgccgtatcgggaggccccatggtggcaggggtgggacacctggtatacgtcgccaggtgtgtccaataggctcatgctcacaccttctcctggcacctgggcaaagcctgagcacccaggcactgaagtgagggcaaggcctcggggccccacaggatggccgaggagacagctgcagggcgcctgggacccctgggctcaggaggtagaaggatacagcctgaaaacccacaccacaagctcaccggccagtgcaggcccacagagctcgaggaggcagccctgagcctcccagggagagatgctctgtgcacgccggcacaggccctgggttacaaaccctaggcacagcccaggagaggcccaggccccagtccagcaaggggttgcaggaagcaagaggtccccggccacagcatgagataagcccatcaagccagggccaggtgggcaatgggaggcaggcagggcttgggggtgagtccctgctgcagcgccgtccactgtcgaccggaggagtttcttccctgtgcggagtccacgggcctcctgtgagtgtgtgcatgggcacaagtgtgtgtgtggctctgctgtgtgtctgtacacacgtatgttttgggtttttttgtgtctcagaccacagagtctgcccctcccaccaaagcccaggcagaaggatgaacccacgcccctggggcccaggcctcagcagcctctgcaggatcattgttcccagttgtcacttgcctttgccacagccctatttctccacaattccttaaagtcctcaacatgcatttaaggcacaaaggtgaaactgcccagaaacatctgactccgccgtggaacccaggagcaagctgggttagctaaggagcggggccgttggcagaggctggggatccaggctgaactttggaggaggcatgtgccagcatgggctcctgactatgtcctcctgggacaaacccaaacccactctttgaatatgggagggactttgctggccccggccctgaccgcagcacttggaaactgaggagtggtcgcctcctccgtgtcacagctgcccgttcaccatcatagaagcaactctgtcacctccatgggcccctctgtggctgctgcctgggtccaagctgagcccagctgcccaggcccagaaggaaagcccaggccaggtgcccagcacagaggcagtcacataccccggggagagccacagcaagcagccaatgttgcccaggagaggagtagctgacaaggtagaacgtgagctgccatcggctcgagaggctttgctggtcctcctggggctctggacatgaccaggaggagcgagggaagaagtcgcatggtggtcccatcctgggtggggcctgatggcagctggccacccgtcccagagtggcagccagatgccagcgccattcccacagtcacatcattggtcacagaatgcaggacatagagtgtcttctttccatcacagtgctgtccagacccatagcctagggtagacctggaagattcaatgtccacacccggggctggagcgtagccatgagccacgccccctgcccgtgcatggaaagccagcccaagctctgctccatccctagccaaagtcagtgtcctttccccttctcccaagtgagctctagccacctgcctaccctgccatctgaggatgacagccttcattccattggaacctggctctgccaccagcaggcttgcagtcctgggcagactccgtcacctctctatgcctcagcctttccatctgcacaggaggaagatgatgatggtggtgatgatgatggcgatggtttccttttgcatctgaggcaaggactaattgagatgatacacatcaggcactgggtatggtgctggtccttcctgagcactcaatctatgtgagctgtccttgtgaaatgggtgtcaccacatttccccacgcagaacatcctttgtctgccatacttgaaacatctgccccaatattaacagttccttcatggaagatgtgcacacccacccaccctcatactcccaaaggtgcccgtgctttatcaagccaaagtccagccaggaactttacagcagcatccctttccctctccaagcaccaaggagcaaggcaaagcactacatcttccatctggaggcaatgccaccctcttctcccattttcactgccatccctaagaggcagtgcttccccaaaaggttccatagcagcctgcctacagcaactctgttcacacgagtttcagcatccttgcagtggctcccctgccatgctgtggctcttcattcaccctcttctcctgctccccgtgacaggcatagattctgagtgatctggatacattgctttgtttaataacattacagcttctgtgctgaaaaagatacagcagatagagaaggcaattgttgaacacaaaatagtgacagcagagatgacggcaagttggcatttttcttttctagcaataaaacttaaagctgactcaaggagaaatggaaatcataattggaacagtaatcctcaagaaagcattaagattattaaataattgccctcacagatgacttcaggccaagatggctttatgggtgaagtttagactttcacaaaactaatcagttcccataagaactgctccaggatttggaggaacatgggaaagtctattaaagggatcacaattcacagtccccagagtaaaacatgggctaacttgcattttggcaaagagccaaatgttataaatgacatcctagaaggccaaattctgtccatctcgttgaacaaggacttacaccaggaatttagaactatttatagctcatcccaccactcaggccaatgatgacccatgatcatctcaccagaaatggaaagactcagatgattaatagagtctcaatttctctgagacatctaagagcccagcccaagcccagacccaggagggcacccaggcctggacagagaacactgatatcacaccagccctccagagggaagcagagactccttcaagctctggaaacacaggcccagacagctgcctaaagttgggcaggcttcactgcaaacccaaatcatgaagctaggtaacacctttacagattctttacatttaaaaatcatcaaaacaagagtaaataataaactcaaataatattaatctaatatgtaaaggtcttgtaccattattatgcaaacaacatacataagctaataagaaaaagaacaaatcccttaagaaatcggcaaaaaggatataacacaatttctaaaagaaaacaaatggctagcacacataaggaaaacactttgtgaacagacattcttcagaacattatttataattataaaatagttgaaagcaagatagtgcctgaagaaattatggtgcatacattagtgggactattctgcaaacattcccaattatacttgtcacatatctgtgataacgtgacagccagcattcatggggtgacctcatttggtaaaagggtgcaaagctcaacacgcattgtgagatgactgtggtgtaaaattagtgggattattccgcaaacattcccaattatacttaccgcatatctgtgataacatgacagcattcatggggtgacctcatttggtaaaagggtgcaaagctcaacacgcattgtgagatgactggtgtaaatacaaagaccaaactgtgaaaaggagtccatcaattaatcgatgcttaccttcagttttgggctaatttttaaagtatgctataagcatatgctcctgttataacagaatggagggattatgagagatgatgcaggtgtgtcctgggcctcccctggcccactgggccctagagatgccttcccaggcatcgctgtcagggcttccctcagagggagtcctgtattgacctcaccaccaaggtctggagcaggggatccttagatattggttggggttatctcaccttaggtctgaatttggggttgtcttagactgttttgtgctgttagaatagaatacccaagactgggaaatttatactgaacggaaatttatttctcacagttctagaggctgtgaagtccaagagcacaggtgccagagcaagtccaagagcaagggaaagtccaaagcaagtccaggagcatctggcgaggaccttcttgctgtgtcatcacatggcggaaggcaagaaagagagcaagagggggccgaactcacccttttataacagcaccaatcccacccatgaggtggggaccttatgacctaatcactcttcatactgttacaatggcaatgaaatttcaacatgagttttggaggagagaagcattcaaaccacagcaagggtgctcctacctcctctctcagggcatctgcagaaagagctgcaactgcacgtccttcctccgtccatcctccatcccttcccaatgtccgtgcatatcctgtgacccaggaggtctggcatagggggtgctcctgccttaggtctgaggccctgtctgaagaggggtaggtgaggaggccatctgatggtctgggccaagacagtcacaggacgcatcatttatcatcaaggaggctgagggttgagtctccaggtccagggaactccccacaaagtgggaaccctgcccagctccacacagcctctgctgggggaccctgctctggtgcagagcctggggacaggtcttgagctcagccagagtctgcctccctgtcatttaggaactaaaccaagcggcaggatgctggagcccagcccccatctgaccttacagggccaaggctggggccctgggttcccctcaaggcgcagcaggactggagccccaggcagtgcaggagtggccaaagctggggcttcctccagagcccccaagcatcacggcaccaagaagggtaggaccctggcctgaggaattggcaccaaagccccagaaactaccctggacaccatggagagaggcctggaggggaagcaccaggcactgcctccccttctgatcccacctgaggtggctgccaagcccagagagccgctctgatgtcccccagccctgcagcccagggatacctgtactgtgcccctgggggacccctggccagtctgtgcaaagaagtcaccaccctacactcagagacagtgggggtcctcgtcccacatcctcagagcatggcccggctgctgcagggatggtctcctggtcctcagagcatggcccggctgctgcagggatggtctcctggtcctcagagcatggcccagctgctgcagggatggtctcctggaggccccccagtgctctattgtcagggctccctccaccccccgcaccaagagagagccagaccccagcaaggcttccagtggcttcaggtcacacccctaggctgaccccagccccattaacacctgcctgagaaagctccacgcaccagaactgaccgtctgctccaactcttgacctcccgttctcagggcgtctgctgaaaaggctgcaactgcacatccttcctccgtccgttcccgatgtccgtgtgtctcctgtggccaggaaggtctttctcgggacctgagagccgctccctgaagtgtccccattgggaaggatggggcctgtgtctccaggctctgggaggacagaatcctgacctcaacagtggccggcacggacacaactggccccatcccggggacgctgaccagcgctgggcaacttttcccttccccgacgactgagccccgagcaccctccctgctcccctaccacctccctttacaaggctgtggcctctgcacagatgataatggagcttggctcattcccctagagtcggtagggagttaaggacaaaactcagtttcctccacctgaactcaagtctgcctatgtttacctaatcacacctggtggacagtttggacaaacttgcacactcagagacacagacacttctagaaatcattatctccctgccccggggaccccactccagcagaagtctgctaggcactggcctgggccctcctgctgtcctaggaggctgctgacctcctgcctggctcctgtccccaggtccagagtcagagcagactccagggacgctgcaggctaggaagccgccccctccaggcgagggtctagtgcaggtgcccaggacaagaaagattgtgaatgcaggaatgactgggccacacccctcccgtgcacgccccctcctgccctgcaccccacagcccagccccccgtgctggatgcccccccacagcagaggtgctgttctgtgatcccctgggaaagacgccctcaacctccaccctgtcccacggcccaaggaagacaagacacaggccctctcctcacagtctccccacctggctcctgctgggaccctcaaggtgtgaacagggaggatggttgtctgggtggcccctaggagcccagatcttcactccacagaccccaacccaagcacccccttctgcagggcccagctcatccccctcctcctccctctgctctcctctcgtcgcctctacgggaaatccgggactcagcagtaaccctcaggaagcagggcccaggcgccgtttaataggaggcttcctcacaatgaaacttttagaaagccttgactacaatgatgaccttggtgtggctgtgaacactgtcagctcccacagctgctgcagcaaaaaatgtccatagacagggtgggggcccggggtcgtctgctgtcctgctcagcccacagcacgcatggaggatctgaggtgccacacctgacgcccaggccagaacatgcctccctccagggtgacctgccatgtcctgcattgctggagggacaggggcagcctatgaggatctggggccaggagatgaatcctattaacccagaggaaaactaacaggacccaagcaccctccccgttgaagctgacctgcccagaggggcctgggcccaccccacacaccggggcggaatgtgtacaggccccggtctctgtgggtgttccgctaactggggctcccagtgctcaccccacaactaaagcgagccccagcctccagagcccccgaaggagatgccgcccacaagcccagcccccatccaggaggccccagagctcagggcgccggggcagattctgaacagccccgagtcacggtgggtacaactggaacgaccaccgtgagaaaaactgtgtccaaaactctctcctggcccctgctggaggccgcgccagagaggggagcagccgccccgaacctaggtcctgctcagctcacacgacccccagcagccagagcacagtggagtccccactgaaccccactgaatggtgaggacggggaccagggctccagggggtcatggaaggggctggaccccatcctactgctatggtcccagtgctcctggccagaactgaccctaccaccgacaagagtccctcagggaaacgggggtcactggcacctcccagcatcaaccccaggcagcacaggcataaaccccacatccagagccgactccaggagcagagacaccccagtaccctgggggacaccgaccctgatgactccccactggaatccaccccagagtccaccaggaccaaagaccccgccccggtctctgtccctcactcaggacctgctgcggggcgggccatgagaccagactcgggcttagggaacaccactgtggccccaacctcgaccaggccacaggcccttccttcctgccctgcggcagcacagactttggggtctgtgcagagaggaatcacagaggccccaggctgaggtggtgggggtggaagacccccaggaggtggcccacttcccttcctcccagctggaacccaccatgaccttcttaagataggggtgtcatccgaggcaggtcctccatggagctcccttcaggctcctccctggtcctcactaggcctcagtcccggctgtgggaatgcagccaccacaggcacaccaggcagcccagacccagccagcctgcagtgcccaagcccacattctggagcagagcaggctgtgtctgggagagtctgggctccccaccgcccccggcacaccccacccacccctgtccaggccctatgcaggagggtcagagccccccatggggtatggacttagggtctcactcacgcggctcccctcctgggtgaaggggtctcatgcccagatccccacagcagagctggtcaaaggtggaggcagtggccccagggccaccctgacctggaccctcaggctcctctagccctggctgccctgctgtccctgggaggcctggactccaccagaccacaggtccagggcaccgcccataggtgctgcccacactcagttcacaggaagaagataagctccagacccccaagactgggacctgccttcctgccaccgcttgtagctccagacctccgtgcctcccccgaccacttacacacgggccagggagctgttccacaaagatcaaccccaaaccgggaccgcctggcactcgggccgctgccacttccctctccatttgctcccagcacctctgtgctccctccctcctccctccttcaggggaacagcctgtgcagcccctccctgcaccccacaccctggggaggcccaaccctgcctccagccctttctcccccgctgctcttcctgcccatccagacaaccctggggtcccatccctgcagcctacaccctggtctccacccagacccctgtctctccctccagacacccctcccaggccaaccctgcacatgcaggccctccccttttctgctgccagagcctcagtttctaccctctgtgcctaccccctgcctcctcctgcccacaactcgagctcttcctctcctggggcccctgagccatggcactgaccgtgcactcccacccccacactgcccatgccctcaccttcctcctggacactctgaccctgctcccctcttggacccagccctggtatttccaggacaaaggctcacccaagtcttccccatgcaggcccttgccctcactgcccggttacacggcagcctcctgtgcacagaagcagggagctcagcccttccacaggcagaaggcactgaaagaaatcggcctccagcaccctgatgcacgtccgcctgtgtctctcactgcccgcacctgcagggaggctcggcactccctgtaaagacgagggatccaggcagcaacatcatgggagaatgcagggctcccagacagcccagccctctcgcaggcctctcctgggaagagacctgcagccaccactgaacagccacggagcccgctggatagtaactgagtcagtgaccgacctggagggcaggggagcagtgaaccggagcccagaccatagggacagagaccagccgctgacatcccgagcccctcactggcggccccagaacaccgcgtggaaacagaacagacccacattcccacctggaacagggcagacactgctgagcccccagcaccagccctgagaaacaccaggcaacggcatcagagggggctcctgagaaagaaaggaggggaggtctccttcaccagcaagtacttcccttgaccaaaaacagggtccacgcaactcccccaggacaaaggaggagccccctgtacagcactgggctcagagtcctctccaacacaccctgagtttcagacaaaaaccccctggaaatcatagtatcagcaggagaactagccagagacagcaagaggggactcagtgactcccgcggggacaggaggattttgtgggggctcgtgtcactgtgaggatattgtagtagtaccagctgctatgcccacagtgacacagccccattcccaaagccctgctgtaaacgcttccacttctggagctgaggggctggggggagcgtctgggaagtagggcctaggggtggccatcaatgcccaaaacgcaccagactcccccccagacatcaccccactggccagtgagcagagtaaacagaaaatgagaagcagctgggaagcttgcacaggccccaaggaaagagctttggcgggtgtgcaagaggggatgcgggcagagcctgagcagggccttttgctgtttctgctttcctgtgcagatagttccataaactggtgttcaagatcgatggctgggagtgagcccaggaggacagtgtgggaagggcacagggaaggagaagcagccgctatcctacactgtcatctttcaagagtttgccctgtgcccacaatgctgcatcatgggatgcttaacagctgatgtagacacagctaaagagagaatcagtgaaatggatttgcagcacagatctgaataaattctccagaatgtggagccacacagaagcaagcacaaggaaagtgcctgatgcaagggcaaagtacagtgtgtaccttcaggctgggcacagacactctgaaaagccttggcaggaactccctgcaacaaagcagagccctgcaggcaatgccagctccagagccctccctgagagcctcatgggcaaagatgtgcagaacatatgtttgtcatagccccaaactgagaatgaagcaaacagccatctgaaggaaaacaggcaaataaacgatggcaggttcatgaaatgcaaacccagacagccagaaggacaacagtgagggttacaggtgactctgtggttgagttcatgacaatgctgagtaattggagtaacaaaggaaagtccaaaaaatactttcaatgtgatttcttctaaataaaatttacagccggcaaaatgaactatcttcttaagggataaactttccactaggaaaactataaggaaaatcaagaaaaggatgatcacataaacacagtggtcgttacttctactggggaaggaagagggtatgaactgagacacacagggttggcaagtctcctaacaagaagagaacaaatacattacagtaccttgaaaacagcagttaaaattctaaattgcaagaagaggaaaatgcacacagctgtgtttagaaaattctcagtccagcactgttcataatagcaaagacattaacccaggttggataaataaacgatgacacaggcaattgcacaatgatacagacatacattcagtatatgagacattgatgatgtatccccaaagaaatgactttaaagagaaaaggcctgatatgtggtggcactcacctccctgggcatccccggacaggctgcaggcacactgtgtggcagggcaggctggtacctgctggcagctcctggggcctgatgtggagcaggcacagagccgtatccccccgaggacatatacccccaaggacggcacagttggtacattccggagacaagcaactcagccacactcccaggccagagcccgagagggacgcccatgcacagggaggcagagcccagctcctccacagccagcagcacctgtgcaggggccgccatctggcaggcacagagcatgggctgggaggaggggcagggacaccaggcagggttggcaccaactgaaaattacagaagtctcatacatctacctcagccttgcctgacctgggcctcacctgacctggacctcacctggcctggacctcacctggcctagacctcacctctgggcttcacctgagctcggcctcacctgacttggaccttgcctgtcctgagctcacatgatctgggcctcacctgacctgggtttcacctgacctgggcttcacctgacctgggcctcatctgacctgggcctcactggcctggacctcacctggcctgggcttcacctggcctcaggcctcatctgcacctgctccaggtcttgctggaacctcagtagcactgaggctgcaggggctcatccagggttgcagaatgactctagaacctcccacatctcagctttctgggtggaggcacctggtggcccagggaatataaaaagcctgaatgatgcctgcgtgatttgggggcaatttataaacccaaaaggacatggccatgcagcgggtagggacaatacagacagatatcagcctgaaatggagcctcagggcacaggtgggcacggacactgtccacctaagccaggggcagacccgagtgtccccgcagtagacctgagagcgctgggcccacagcctcccctcggtgccctgctacctcctcaggtcagccctggacatcccgggtttccccaggcctggcggtaggtttggggtgaggtctgtgtcactgtggtattacgatttttggagtggttattatacccacagtgtcacagagtccatcaaaaacccatccctgggaacctgctgccacagccctccctgtggggcaccgccgcgtgccatgttaggattttgactgaggacacagcaccatgggtatggtggctaccgcagcagtgcagcctgtgacccaaacacacagggcagcaggcacaacagacaagcccacaagtgaccaccctgagctcctgcctgccagccctggagaccatgaaacagatggccaggattatcccataggtcagccagacctcagtccaacaggtctgcatcgctgctgccctccaataccagtccggatggggacagggccggcccacattaccatttgctgccatccggccaacagtcccagaagcccctccctcaaggctgggccacatgtgtggaccctgagagccccccatgtctgagtaggggcaccaggaaggtggggctggccctgtgcactgtcactgcccctgtggtccctggcctgcctggccctgacacctgggcctctcctgggtcatttccaagacagaagacattcccaggacagctggagctgggagtccatcatcctgcctggccatcctgagtcctgcgcctttccaaacctcacccgggaagccaacagaggaatcacctcccacaggcagagacaaagaccttccagaaatctctgtctctctccccagtgggcaccctcttccagggcagtcctcagtgatatcacagtgggaacccacatctggatcgggactgcccccagaacacaagatggcccacagggacagccccacagcccagcccttcccagacccctaaaaggcgtcccaccccctgcatctgccccagggctcaaactccaggaggactgactcctgcacaccctcctgccagacatcacctcagcccctcctggaagggacaggagcgcgcaagggtgagtcagaccctcctgccctcgatggcaggcggagaagattcagaaaggtctgagatccccaggacgcagcaccactgtcaatgggggccccagacgcctggaccagggcctgcgtgggaaaggcctctgggcacactcaggggctttttgtgaagggtcctcctactgtgtgactacagtaactaccacagtgatgaacccagcagcaaaaactgaccggactcccaaggtttatgcacacttctccgctcagagctctccaggatcagaagagccgggcccaagggtttctgcccagaccctcggcctctagggacatcttggccatgacagcccatgggctggtgccccacacatcgtctgccttcaaacaagggcttcagagggctctgaggtgacctcactgatgaccacaggtgccctggccccttccccgccagctgcaccagaccccgtcctgacagatgccccgattccaacagccaattcctggggccaggaatcgctgtagacaccagcctccttccaacacctcttgccaattgcctggattcccatcccggttggaatcaagaggacagcatcccccaggctcccaacaggcaggactcccacaccctcctctgagaggccgctgtgttccgtagggccaggctgcagacagtccccctcacctgccactagacaaatgcctgctgtagatgtccccacctggaaaagaccactcatggagcccccagccccaggtacagccatagagagagtctctgaggcccctaagaagtagccatgcccagttctgccgggaccctcggccaggctgacaggagtggacgctggagctgggcccacactgggccacataggagctcaccagtgagggcaggagagcacatgccggggagcacccagcctcctgctgaccagaggcccgtcccagagcccaggaggctgcagaggcctctccagggggacactgtgcatgtctggtccctgagcagccccccatgtccccagtcctgggggcccctggcacagctgtctggaccctctctattccctgggaagctcctcctgacagccccgcctccagttccaggtgtggttattgtcagggggtgtcagactgtggtggatacagctatggttaccacagtggtgctgcccatagcagcaaccaggccaagtagacaggcccctgctgtgcagccccaggcctccagctcacctgcttctcctggggctctcaaggctgctgttttctgcactctcccctctgtggggagggttccctcagtgggagatctgttctcaacatcccagggcctcattcctgcaaggaaggccaatggatgggcaacctcacatgccgcggctaagatagggtgggcagcctggcggggacaggacatcctgctggggtatctgtcactgtgcctagtggggcactggctcccaaacaacgcagtcctcgccaaaatccccacggcctcccccgctaggggctggcctgatctcctgcagtcctaggaggctgctgacctccagaatggctccgtccccagttccagggcgagagcagatcccaggccggctgcagactgggaggccaccccctccttcccagggttcactgcaggtgaccagggcaggaaatggcctgaacacagggataaccgggccatcccccaacagagtccaccccctcctgctctgtaccccgcacccccaaggccagcccatgacatccgacaaccccacaccagagtcactgcccggtgctgccctagggaggacccctcagcccccaccctgtctagaggactggggaggacaggacacgccctctccttatggttcccccacctggctctggctgggacccttggggtgtggacagaaaggacgcttgcctgattggcccccaggagcccagaacttctctccagggaccccagcccgagcacccccttacccaggacccagccctgcccctcctcccatctgctctcctctcatcaccccatgggaatccagaatccccaggaagccatcaggaagggctgagggaggaagtggggccactgcaccaccaggcaggaggctccgtctttgtgaacccagggaggtgccagcctcctagagggtatggtccaccctgcctatggctcccacagtggcaggctgcagggaaggaccagggacggtgtgggggagggctcagggccccgcgggtgctccatcttggatgagcccatctctctcacccacggactcacccacctcctctccaccctggccacacgtcgtccacaccatcctaagtcccacctacaccagagccggcacagccagtgcagacagaggctggggtgcaggggggccgccagggcagctttggggagggaaggatggaggaaggggagttcagtgaagaggcccccctcccctgggtccaggatcctcctctgggacccccggatcccatcccctccaggctctgggaggagaagcaggatgggagaatctgtgcgggaccctctcacagtggaatacctccacagcggctcaggcaagacccaaaagcccctcagtgagccctccactgcagtcctgggcctgggtagcagcccctcccacagaggatgaacccagcaccccgaggatgtcctgccagggggagctcagagccatgaaggagcaggatatgggacccccgatacaggcacagacctcagctccattcaggactgccacgtcctgccctgggaggaacccctttctctagtccctgcaggccaggaggcagctgactcctgacttggacgcctattccagacaccagacagaggggcaggccccccagaaccagggatgaggacgccccgtcaaggccagaaaagaccaagttgtgctgagcccagcaagggaaggtccccaaacaaaccaggaagtttctgaaggtgtctgtgtcacagtggagtatagcagctcgtcccacagtgacactcgccaggccagaaaccccatcccaagtcagcggaatgcagagagagcagggaggacatgtttaggatctgaggccgcacctgacacccaggccagcagacgtctcctgtccatggcaccctgccatgtcctgcatttctggaagaacaagggcaggctgaagggggtccaggaccaggagatgggtcccctctacccagagaaggagccaggcaggacacaagccccctccccattgaggctgacctgcccagagggtcctgggcccaccccacacaccggggcggaatgtgtgcaggcctcggtctctgtgggtgttccgctagctggggctcacagtgctcaccccacacctaaaacgagccacagcctcagagcccctgaaggagaccccgcccacaagcccagcccccacccaggaggccccagagcacagggcgccccgtcggattctgaacagccccgagtcacagtgggtataactggaactaccactgtgagaaaagcttcgtccaaaacggtctcctggccacagtcggaggccccgccagagaggggagcagccaccccaaacccatgttctgccggctcccatgaccccgtgcacctggagccccacagtgtccccactggatgggaggacaagggccgggggctccggcgggtcggggcaggggcttgatggcttccttctgccgtggctccagtgcccctggctggagttgacccttctgacaagtgtcctcagagagtcagggatcagtggcacctccctaacatcaaccccacgcagcgcaggcacaaaccccacatccagggccaactccaggaacagagacaccccaataccctgggggaccccaaccctgatgactcccgtcccatctctgtccctcacttggggcctgctgcggggcgagcacctgggagcaaactcaggattaggggacaccactgtgggcctgacctcgagcaggccacagacccttccctcctgccctggtgcagcacagactttggggtctgggcagggaggaacttctggcaggtcaccaagcacagagcccccaggctgaggtggccccagggggaaccccagcaggtggcccactacccttcctcccagctggaccccatgtcttccccaagataggggtgccatccaaggcaggtcctccatggagcccccttcaggctcctctccagaccccactgggcctcagtccccactctaggaatgcagccaccacgggcacaccaggcagcccaggcccagccaccctgcagtgcccaagcccacaccctggaggagagcagggtgcgtctgggaggggctgggctccccacccccacccccacctgcacaccccacccacccttgcccgggccccctgcaggagggtcagagcccccatgggatatggacttagggtctcactcacgcacctcccctcctgggagaaggggtctcatgcccagatccccccagcagcgctggtcacaggtagaggcagtggccccagggccaccctgacctggcccctcaggctcctctagccctggctgccctgctgtccctgggaggcctgggctccaccagaccacaggtctagggcaccgcccacactggggccgcccacacacagctcacaggaagaagataagctccagacccccaggcccgggacctgccttgctgctacgacttcctgccccagacctcgttgccctcccccgtccacttacacacaggccaggaagctgttcccacacagaccaaccccagacggggaccacctggcactcaggtcactgccatttccttctccattcacttccaatgcctctgtgcttcctccctcctccttccttcgggggagcaccctgtgcagctcctccctgcagtccacaccctggggagacccgaccctgcagcccacaccctggggagacctgaccctcctccagccctttctcccccgctgctcttgccacccaccaagacagccctggggtcctgtccctacagcccccacccagttctctacctagacccgtcttcctccctctaaacacctctcccaggccaaccctacacctgcaggccctcccctccactgccaaagaccctcagtttctcctgcctgtgcccacccccgtgctcctcctgcccacagctcgagctcttcctctcctagggcccctgagggatggcattgaccgtgccctcgcacccacacactgcccatgccctcacattcctcctggccactccagccccactcccctctcaggcctggctctggtatttctgggacaaagccttacccaagtctttcccatgcaggcctgggcccttaccctcactgcccggttacagggcagcctcctgtgcacagaagcagggagctcagcccttccacaggcagaaggcactgaaagaaatcggcctccagcgccttgacacacgtctgcctgtgtctctcactgcccgcacctgcagggaggctcggcactccctctaaagacgagggatccaggcagcagcatcacaggagaatgcagggctaccagacatcccagtcctctcacaggcctctcctgggaagagacctgaagacgcccagtcaacggagtctaacaccaaacctccctggaggccgatgggtagtaacggagtcattgccagacctggaggcaggggagcagtgagcccgagcccacaccatagggccagaggacagccactgacatcccaagccactcactggtggtcccacaacaccccatggaaagaggacagacccacagtcccacctggaccagggcagagactgctgagacccagcaccagaaccaaccaagaaacaccaggcaacagcatcagagggggctctggcagaacagaggaggggaggtctccttcaccagcaggcgcttcccttgaccgaagacaggatccatgcaactcccccaggacaaaggaggagccccttgttcagcactgggctcagagtcctctccaagacacccagagtttcagacaaaaaccccctggaatgcacagtctcagcaggagagccagccagagccagcaagatggggctcagtgacacccgcagggacaggaggattttgtgggggctcgtgtcactgtgaggatattgtactaatggtgtatgctatacccacagtgacacagccccattcccaaagccctactgcaaacgcattccacttctggggctgaggggctgggggagcgtctgggaaatagggctcaggggtgtccatcaatgcccaaaacgcaccagactcccctccatacatcacacccaccagccagcgagcagagtaaacagaaaatgagaagcaagctggggaagcttgcacaggccccaaggaaagagctttggcgggtgtgtaagaggggatgcgggcagagcctgagcagggccttttgctgtttctgctttcctgtgcagagagttccataaactggtgttcgagatcaatggctgggagtgagcccaggaggacagcgtgggaagagcacagggaaggaggagcagccgctatcctacactgtcatctttcgaaagtttgccttgtgcccacactgctgcatcatgggatgcttaacagctgatgtagacacagctaaagagagaatcagtgagatggatttgcagcacagatctgaataaattctccagaatgtggagcagcacagaagcaagcacacagaaagtgcctgatgcaaggacaaagttcagtgggcaccttcaggcattgctgctgggcacagacactctgaaaagccctggcaggaactccctgtgacaaagcagaaccctcaggcaatgccagccccagagccctccctgagagcctcatgggcaaagatgtgcacaacaggtgtttctcatagccccaaactgagagcaaagcaaacgtccatctgaaggagaacaggcaaataaacgatggcaggttcatgaaatgcaaacccagacagccacaagcacaaaagtacagggttataagcgactctggttgagttcatgacaatgctgagtaattggagtaacaaagtaaactccaaaaaatactttcaatgtgatttcttctaaataaaatttacaccctgcaaaatgaactgtcttcttaagggatacatttcccagttagaaaaccataaagaaaaccaagaaaaggatgatcacataaacacagtggtggttacttctgctggggaaggaagagggtatgaactgagatacacagggtgggcaagtctcctaacaagaacagaacgaatacattacagtaccttgaaaacagcagttaaacttctaaattgcaagaagaggaaaatggacacagttgtgtttagaaaattctcagtccagcactgttcataatagcaaagacattaacccaggtcggataaataagcgatgacacaggcaattgcacaatgatacagacatatatttagtatatgagacatcgatgatgtatccccaaataaacgactttaaagagataaagggctgatgtgtggtggcattcacctccctgggatccccggacaggttgcaggctcactgtgcagcagggcaggcgggtacctgctggcagttcctggggcctgatgtggagcaagcgcagggccatatatcccggaggacggcacagtcagtgaattccagagagaagcaactcagccacactccccaggcagagcccgagagggacgcccacgcacagggaggcagagcccagcacctccgcagccagcaccacctgtgcacgggccaccaccttgcaggcacagagtgggtgctgagaggaggggcagggacaccaggcagggtgagcacccagagaaaactgcagacgcctcacacatccacctcagcctcccctgacctggacctcactggcctgggcctcacttaacctgggcttcacctgaccttggcctcacctgacttggacctcgcctgtcccaagctttacctgacctgggcctcaactcacctgaacgtctcctgacctgggtttaacctgtcctggaactcacctggccttggcttcccctgacctggacctcatctggcctgggcttcacctggcctgggcctcacctgacctggacctcatctggcctggacctcacctggcctggacttcacctggcctgggcttcacctgacctggacctcacctggcctcgggcctcacctgcacctgctccaggtcttgctggagcctgagtagcactgagggtgcagaagctcatccagggttggggaatgactctagaagtctcccacatctgacctttctgggtggaggcagctggtggccctgggaatataaaaatctccagaatgatgactctgtgatttgtgggcaacttatgaacccgaaaggacatggccatggggtgggtagggacatagggacagatgccagcctgaggtggagcctcaggacacaggtgggcacggacactatccacataagcgagggatagacccgagtgtccccacagcagacctgagagcgctgggcccacagcctcccctcagagccctgctgcctcctccggtcagccctggacatcccaggtttccccaggcctgccggtaggtttagaatgaggtctgtgtcactgtggtattacgatattttgactggttattataaccacagtgtcacagagtccatcaaaaacccatgcctggaagcttcccgccacagccctccccatggggccctgctgcctcctcaggtcagccccggacatcccgggtttccccaggctgggcggtaggtttggggtgaggtctgtgtcactgtggtattactatggttcggggagttattataaccacagtgtcacagagtccatcaaaaacccatccctgggagcctcccgccacagccctccctgcaggggaccggtacgtgccatgttaggattttgatcgaggagacagcaccatgggtatggtggctaccacagcagtgcagcctgtgacccaaacccgcagggcagcaggcacgatggacaggcccgtgactgaccacgctgggctccagcctgccagccctggagatcatgaaacagatggccaaggtcaccctacaggtcatccagatctggctccgaggggtctgcatcgctgctgccctcccaacgccagtccaaatgggacagggacggcctcacagcaccatctgctgccatcaggccagcgatcccagaagcccctccctcaaggctgggccacatgtgtggacactgagagccctcatgtctgagtaggggcaccaggagggaggggctggccctgtgcactgtccctgcccctgtggtccctggcctgcctggccctgacacctgagcctctcctgggtcatttccaagacagaagacattcctggggacagccggagctgggcgtcgctcatcctgcccggccgtcctgagtcctgctcatttccagacctcaccggggaagccaacagaggactcgcctcccacattcagagacaaagaaccttccagaaatccctgcctctctccccagtggacaccctcttccaggacagtcctcagtggcatcacagcggcctgagatccccaggacgcagcaccgctgtcaataggggccccaaatgcctggaccagggcctgcgtgggaaaggtctctggccacactcgggctttttgtgaagggccctcctgctgtgtgactacagtaactaccatagtgatgaacccagtggcaaaaactggctggaaacccaggggctgtgtgcacgcctcagcttggagctctccaggagcacaagagccgggcccaaggatttgtgcccagaccctcagcctctagggacacctgggccatctcagcctgggctggtgccctgcacaccatcttcctccaaataggggcttcagagggctctgaggtgacctcactcatgaccacaggtgacctggcccttccctgccagctataccagaccctgtcttgacagatgccccgattccaacagccaattcctgggaccctgaatagctgtagacaccagcctcattccagtacctcctgccaattgcctggattcccatcctggctggaatcaagaaggcagcatccgccaggctcccaacaggcaggactcccgcacaccctcctctgagaggccgctgtgttccgcagggccaggccctggacagttcccctcacctgccactagagaaacacctgccattgtcgtccccacctggaaaagaccactcgtggagcccccagccccaggtacagctgtagagagagtcctcgaggcccctaagaaggagccatgcccagttctgccgggaccctcggccaggccgacaggagtggacgctggagctgggcccacactgggccacataggagctcaccagtgagggcaggagagcacatgccggggagcacccagcctcctgctgaccagaggcctgccccagagcccaggaggctgcagaggcctctccagggagacactgtgcatgtctggtacctaagcagccccccacgtccccagtcctgggggcccctggctcagctgtctggaccctccctgttccctgggaagctcctcctgacagccccgcctccagttccaggtgtggttattgtcaggcgatgtcagactgtggtggatatagtggctacgattaccacagtggtgccgcccatagcagcaaccaggccaagtagacaggcccctgctgcgcagccccaggcatccacttcacctgcttctcctggggctctcaaggctgctgtctgtcctctggccctctgtggggagggttccctcagtgggaggtctgtgctccagggcagggatgattgagatagaaatcaaaggctggcagggaaaggcagcttcccgccctgagaggtgcaggcagcaccacggagccacggagtcacagagccacggagcccccattgtgggcatttgagagtgctgtgcccccggcaggcccagccctgatggggaagcctgtcccatcccacagcccgggtcccacgggcagcgggcacagaagctgccaggttgtcctctatgatcctcatccctccagcagcatcccctccacagtggggaaactgaggcttggagcaccacccggccccctggaaatgaggctgtgagcccagacagtgggcccagagcactgtgagtaccccggcagtacctggctgcagggatcagccagagatgccaaaccctgagtgaccagcctacaggaggatccggccccacccaggccactcgattaatgctcaaccccctgccctggagacctcttccagtaccaccagcagctcagcttctcagggcctcatccctgcaaggaaggtcaagggctgggcctgccagaaacacagcaccctccctagccctggctaagacagggtgggcagacggctgtggacgggacatattgctggggcatttctcactgtcacttctgggtggtagctctgacaaaaacgcagaccctgccaaaatccccactgcctcccgctaggggctggcctggaatcctgctgtcctaggaggctgctgacctccaggatggctccgtccccagttccagggcgagagcagatcccaggcaggctgtaggctgggaggccacccctgcccttgccggggttgaatgcaggtgcccaaggcaggaaatggcatgagcacagggatgaccgggacatgccccaccagagtgcgccccttcctgctctgcaccctgcaccccccaggccagcccacgacgtccaacaactgggcctgggtggcagccccacccagacaggacagacccagcaccctgaggaggtcctgccagggggagctaagagccatgaaggagcaagatatggggcccccgatacaggcacagatgtcagctccatccaggaccacccagcccacaccctgagaggaacgtctgtctccagcctctgcaggtcgggaggcagctgacccctgacttggacccctattccagacaccagacagaggcgcaggccccccagaaccagggttgagggacgccccgtcaaagccagacaaaaccaaggggtgttgagcccagcaagggaaggcccccaaacagaccaggaggtttctgaaggtgtctgtgtcacagtggggtatagcagcagctggtaccacagtgacactcacccagccagaaaccccattccaagtcagcggaagcagagagagcagggaggacacgtttaggatctgagactgcacctgacacccaggccagcagacgtctcccctccagggcaccccaccctgtcctgcatttctgcaagatcaggggcggcctgagggggggtctagggtgaggagatgggtcccctgtacaccaaggaggagttaggcaggtcccgagcactctccccattgaggctgacctgcccagagagtcctgggcccaccccacacaccggggcggaatgtgtgcaggcctcggtctctgtgggtgttccgctagctggggctcacagtgctcaccccacacctaaaatgagccacagcctccggagcccccgcaggagaccccgcccacaagcccagcccccacccaggaggccccagagctcagggcgccccgtcggattccgaacagccccgagtcacagcgggtataaccggaaccaccactgtcagaatagctacgtcaaaaactgtccagtggccactgccggaggccccgccagagagggcagcagccactctgatcccatgtcctgccggctcccatgacccccagcacgcggagccccacagtgtccccactggatgggaggacaagagctggggattccggcgggtcggggcaggggcttgatcgcatccttctgccgtggctccagtgcccctggctggagttgacccttctgacaagtgtcctcagagagacaggcatcaccggcgcctcccaacatcaaccccaggcagcacaggcacaaaccccacatccagagccaactccaggagcagagacaccccaataccctgggggaccccgaccctgatgacttcccactggaattcgccgtagagtccaccaggaccaaagaccctgcctctgcctctgtccctcactcaggacctgctgccgggcgaggccttgggagcagacttgggcttaggggacaccagtgtgaccccgaccttgaccaggacgcagacctttccttcctttcctggggcagcacagactttggggtctgggccaggaggaacttctggcaggtcgccaagcacagaggccacaggctgaggtggccctggaaagacctccaggaggtggccactccccttcctcccagctggaccccatgtcctccccaagataagggtgccatccaaggcaggtgctccttggagccccattcagactcctccctggaccccactgggcctcagtcccagctctggggatgaagccaccacaagcacaccaggcagcccaggcccagccaccctgcagtgcccaagcacacactctggagcagagcagggtgcctctgggaggggctgagctccccaccccacccccacctgcacaccccacccacccctgcccagcggctctgcaggagggtcagagccccacatggggtatggacttagggtctcactcacgtggctcccatcatgagtgaaggggcctcaagcccaggttcccacagcagcgcctgtcgcaagtggaggcagaggcccgagggccaccctgacctggtccctgaggttcctgcagcccaggctgccctgctgtccctgggaggcctgggctccaccagaccacaggtccagggcaccgggtgcaggagccacccacacacagctcacaggaagaagataagctccagacccccagggccagaacctgccttcctgctactgcttcctgccccagacctgggcgccctcccccgtccacttacacacaggccaggaagctgttcccacacagaacaaccccaaaccaggaccgcctggcactcaggtggctgccatttccttctccatttgctcccagcgcctctgtcctccctggttcctccttcgggggaacagcctgtgcagccagtccctgcagcccacaccctggggagacccaaccctgcctggggcccttccaaccctgctgctcttactgcccacccagaaaactctggggtcctgtccctgcagtccctaccctggtctccacccagacccctgtgtatcactccagacacccctcccaggccaaccctgcacctgcaggccctgtcctcttctgtcgctagagcctcagtttctcccccctgtgcccacaccctacctcctcctgcccacaactctaactcttcttctcctggagcccctgagccatggcattgaccctgccctcccaccacccacagcccatgccctcaccttcctcctggccactccgaccccgccccctctcaggccaagccctggtatttccaggacaaaggctcacccaagtctttcccaggcaggcctgggctcttgccctcacttcccggttacacgggagcctcctgtgcacagaagcagggagctcagcccttccacaggcagaaggcactgaaagaaatcggcctccagcaccttgacacacgtccgcccgtgtctctcactgcccgcacctgcagggaggctccgcactccctctaaagacaagggatccaggcagcagcatcacgggagaatgcagggctcccagacatcccagtcctctcacaggcctctcctgggaagagacctgcagccaccaccaaacagccacagaggctgctggatagtaactgagtcaatgaccgacctggagggcaggggagcagtgagccggagcccataccatagggacagagaccagccgctgacatcccgagctcctcaatggtggccccataacacacctaggaaacataacacacccacagccccacctggaacagggcagagactgctgagcccccagcaccagccccaagaaacaccaggcaacagtatcagagggggctcccgagaaagagaggaggggagatctccttcaccatcaaatgcttcccttgaccaaaaacagggtccacgcaactcccccaggacaaaggaggagccccctatacagcactgggctcagagtcctctctgagacaccctgagtttcagacaacaacccgctggaatgcacagtctcagcaggagaacagaccaaagccagcaaaagggacctcggtgacaccagtagggacaggaggattttgtgggggctcgtgtcactgtgaggatattgtagtggtggtagctgctactcccacagtgacacagacccattcccaaagccctactgcaaacacacccactcctggggctgaggggctgggggagcgtctgggaagtagggtccaggggtgtctatcaatgtccaaaatgcaccagactccccgccaaacaccaccccaccagccagcgagcagggtaaacagaaaatgagaggctctgggaagcttgcacaggccccaaggaaagagctttggcaggtgtgcaagaggggatgcaggcagagcctgagcagggccttttgctgtttctgctttcctgtgcagagagttccataaactggtgttcaagatcagtggctgggaatgagcccaggagggcagtctgtgggaagagcacagggaaggaggagcagccgctatcctacactgtcatctttcaaaagtttgccttgtgaccacactattgcatcatgggatgcttaagagctgatgtagacacagctaaagagagaatcagtgagatgaatttgcagcatagatctgaataaactctccagaatgtggagcagtacagaagcaaacacacagaaagtgcctgatgcaaggacaaagttcagtgggcaccttcaggcattgctgctgggcacagacactctgaaaagccctggcaggatctccctgcgacaaagcagaaccctcaggcaatgccagccccagagccctccctgagagcgtcatggggaaagatgtgcagaacagctgattatcatagactcaaactgagaacagagcaaacgtccatctgaagaacagtcaaataagcaatggtaggttcatgcaatgcaaacccagacagccaggggacaacagtagagggctacaggcggctttgcggttgagttcatgacaatgctgagtaattggagtaacagaggaaagcccaaaaaatacttttaatgtgatttcttctaaataaaatttacaccaggcaaaatgaactgtcttcttaagggataaactttcccctggaaaaactacaaggaaaattaagaaaacgatgatcacataaacacagttgtggttacttctactggggaaggaagagggtatgagctgagacacacagagtcggcaagtctccaagcaagcacagaacgaatacattacagtaccttgaatacagcagttaaacttctaaatcgcaagaagaggaaaatgcacacagctgtgtttagaaaattctcagtccagcactattcataatagcaaagacattaacccaggttggataaataaatgatgacacaggcaattgcacaatgatacagacatacatttagtacatgagacatcgatgatgtatccccaaagaaatgactttaaagagaaaaggcctgatgtgtggtggcactcacctccctgggatccccggacaggttgcaggcacactgtgtggcagggcaggctggtacatgctggcagctcctggggcctgatgtggagcaagcgcagggctgtatacccccaaggatggcacagtcagtgaattccagagagaagcagctcagccacactgcccaggcagagcccgagagggacgcccacgcacagggaggcagagcccagctcctccacagccaccaccacctgtgcacgggccaccaccttgcaggcacagagtgggtgctgagaggaggggcagggacaccaggcagggtgagcacccagagaaaactgcagaagcctcacacatccacctcagcctcccctgacctggacctcacctggtctggacctcacctggcctgggcctcacctgacctggacctcacctggcctgggcttcacctgacctggacctcacctggcctccggcctcacctgcacctgctccaggtcttgctggaacctgagtagcactgaggctgcagaagctcatccagggttggggaatgactctggaactctcccacatctgacctttctgggtggaggcatctggtggccctgggaatataaaaagccccagaatggtgcctgcgtgatttgggggcaatttatgaacccgaaaggacatggccatggggtgggtagggacatagggacagatgccagcctgaggtggagcctcaggacacagttggacgcggacactatccacataagcgagggacagacccgagtgttcctgcagtagacctgagagcgctgggcccacagcctcccctcggtgccctgctgcctcctcaggtcagccctggacatcccgggtttccccaggcctggcggtaggtttgaagtgaggtctgtgtcactgtggtattatgattacgtttgggggagttatcgttatacccacagcatcacacggtccatcagaaacccatgccacagccctccccgcaggggaccgccgcgtgccatgttacaattttgatcgaggacacagcgccatgggtatggtggctaccacagcagtgcagcccatgacccaaacacacagggcagcaggcacaatggacaggcctgtgagtgaccatgctgggctccagcccgccagccccggagaccatgaaacagatggccaaggtcaccccacagttcagccagacatggctccgtggggtctgcatcgctgctgccctctaacaccagcccagatggggacaaggccaaccccacattaccatctcctgctgtccacccagtggtcccagaagcccctccctcatggctgagccacatgtgtgaaccctgagagcaccccatgtcagagtaggggcagcagaagggcggggctggccctgtgcactgtccctgcacccatggtccctcgcctgcctggccctgacacctgagcctcttctgagtcatttctaagatagaagacattcccggggacagccggagctgggcgtcgctcatcctgcccggccgtcctgagtcctgcttgtttccagacctcaccagggaagccaacagaggactcacctcacacagtcagagacaaagaaccttccagaaatccctgtctcactccccagtgggcaccttcttccaggacattcctcggtcgcatcacagcaggcacccacatctggatcaggacggcccccagaacacaagatggcccatggggacagccccacaacccaggccttcccagacccctaaaaggcgtcccaccccctgcacctgccccagggctaaaaatccaggaggcttgactcccgcataccctccagccagacatcacctcagccccctcctggaggggacaggagcccgggagggtgagtcagacccacctgccctcgatggcaggcggggaagattcagaaaggcctgagatccccaggacgcagcaccactgtcaatgggggccccagacgcctggaccagggcctgcgtgggaaaggccgctgggcacactcaggggctttttgtgaaggcccctcctactgtgtgactacggtgactaccacagtgatgaaactagcagcaaaaactggccggacacccagggaccatgcacacttctcagcttggagctctccaggaccagaagagtcaggtctgagggtttgtagccagaccctcggcctctagggacaccctggccatcacagcggatgggctggtgccccacatgccatctgctccaaacaggggcttcagagggctctgaggtgacttcactcatgaccacaggtgccctggccccttccccgccagctacaccgaaccctgtcccaacagctgccccagttccaacagccaattcctggggcccagaattgctgtagacaccagcctcgttccagcacctcctgccaattgcctggattcacatcctggctggaatcaagagggcagcatccgccaggctcccaacaggcaggactcccgcacaccctcctctgagaggccgctgtgttccgcagggccaggccctggacagttcccctcacctgccactagagaaacacctgccattgtcgtccccacctggaaaagaccactcgtggagcccccagccccaggtacagctgtagagagactccccgagggatctaagaaggagccatgcgcagttctgccgggaccctcggccaggccgacaggagtggacactggagctgggcccacactgggccacataggagctcaccagtgagggcaggagagcacatgccggggagcacccagcctcctgctgaccagaggcctgccccagagcccaggaggctgcagaggcctctccagggggacactgtgcatgtctggtccctgagcagccccccatgtccccagtcctgggggcccctggcacagctgtctggaccctccctgttccctgggaagctcctcctgacagccccgcctccagttccaggtgtggttattgtcagggggtgtcagactgtggtggatacagctatggttaccacagtggtgctgcccatagcagcaaccaggccaagtagacaggcccctgctgtgcagccccaggcctccagctcacctgcttctcctggggctctcaaggtcactgttgtctgtactctgccctctgtggggagggttctctcagtgggaggtctgttctcaacatcccagggcctcatgtctgcacggaaggccaatggatgggcaacctcacatgccgcggctaagatagggtgggcagcctggcgggggacagtacatactgctggggtgtctgtcactgtgcctagtggggcactggctcccaaacaacgcagtcctcaccaaaatccccacagcctcccctgctaggggctggcctgatctcctgcagtcctaggaggctgctgacctccagaatgtctccgtccccagttccagggcgagagcagatcccaggccggctgcagactgggaggccaccccctccttcccagggttcactggaggtgaccaaggtaggaaatggccttaacacagggatgactgcgccatcccccaacagagtcagccccctcctgctctgtaccccgcaccccccaggccagtccacgaaaaccagggccccacatcagagtcactgcctggcccggccctggggcggacccctcagcccccaccctgtctagaggacttggggggacaggacacaggccctctccttatggttcccccacctgcctccggccgggacccttggggtgtggacagaaaggacacctgcctaattggcccccaggaacacagaacttctctccagggaccccagcccgagcacccccttacccaggacccagccctgcccctcctcccctctgctctcctctcatcaccccatgggaatccggtatccccaggaagccatcaggaagggctgaaggaggaagcggggccgtgcaccaccgggcagcaggctccgtcttcgtgaacccagggaagtgccagcctcctagagggtatggtccaccctgcctggggctcccaccgtggcaggctgcggggaaggaccagggacggtgtgggggagggctcagggccctgcgggtgctcctccatcttcggtgagcctcccccttcacccaccgtcccgcccacctcctctccaccctggctgcacgtcttccacaccatcctgagtcctacctacaccagagccagcaaagccagtgcagacaaaggctggggtgcaggggggctgccagggcagcttcggggagggaaggatggagggaggggaggtcagtgaagaggcccccttcccctgggtccaggatcctcctctgggacccccggctcccatcccctcctggctctgggaggagaagcaggatgggagaatctgtgcgggaccctctcacagtggaatatccccacagcggctcaggccagacccaaaagcccctcagtgagccctccactgcagtcctgggcctgggtagcagcccctcccacagaggacagacccagcaccccgaagaagtcctgccagggggagctcagagccatgaaagagcaggatatggggtccccgatacaggcacagacctcagctccatccaggcccaccgggacccaccatgggaggaacacctgtctccgggttgtgaggtggctggcctctgtctcggaccccactccagacaccagacagaggggcaggccccccaaaaccagggttgagggatgatccgtcaaggcagacaagaccaaggggcactgaccccagcaagggaaggctcccaaacagacgaggaggtttctgaagctgtctgtatcacagtggggtatagcagtggctggtaccacagtgacactcgccaggccagaaaccccgtcccaagtcagcggaagcagagagagcagggaggacacgtttaggatctgaggccgcacctgacacccagggcagcagacgtctcccctccagggcaccctccaccgtcctgcgtttcttcaagaataggggcggcctgagggggtccagggccaggcgataggtcccctctaccccaaggaggagccaggcaggacccgagcaccgtccccattgaggctgacctgcccagacgggcctgggcccaccccacacaccggggcggaatgtgtgcaggccccagtctctgtgggtgttccgctagctggggcccccagtgctcaccccacacctaaagcgagccccagcctccagagccccctaagcattccccgcccagcagcccagcccctgcccccacccaggaggccccagagctcagggcgcctggtcggattctgaacagccccgagtcacagtgggtataactggaacgaccaccgtgagaaaaactgtgtccaaaactgactcctggcagcagtcggaggccccgccagagaggggagcagccgccctgaacccatgtcctgccggttcccatgacccccagcacccagagccccacggtgtccccgttggataatgaggacaagggctgggggctccggtggtttgcggcagggacttgatcacatccttctgctgtggccccattgcctctggctggagttgacccttctgacaagtgtcctcagaaagacagggatcaccggcacctcccaatatcaaccccaggcagcacagacacaaaccccacatccagagccaactccaggagcagagacaccccaacactctgggggaccccaaccgtgataactccccactggaatccgccccagagtctaccaggaccaaaggccctgccctgtctctgtccctcactcagggcctcctgcagggcgagcgcttgggagcagactcggtcttaggggacaccactgtgggccccaactttgatgaggccactgacccttccttcctttcctggggcagcacagactttggggtctgggcagggaagaactactggctggtggccaatcacagagcccccaggccgaggtggccccaagaaggccctcaggaggtggccactccacttcctcccagctggaccccaggtcctccccaagataggggtgccatccaaggcaggtcctccatggagcccccttcagactcctcccgggaccccactggacctcagtccctgctctgggaatgcagccaccacaagcacaccaggaagcccaggcccagccaccctgcagtgggcaagcccacactctggagcagagcagggtgcgtctgggaggggctaacctccccaccccccaccccccatctgcacacagccacctaccactgcccagaccctctgcaggagggccaagccaccatggggtatggacttagggtctcactcacgtgcctcccctcctgggagaaggggcctcatgccgagatccctgcagcactagacacagctggaggcagtggccccagggccaccctgacctggcatctaaggctgctccagcccagacagcactgccgttcctgggaagcctgggctccaccagaccacaggtccagggcacagcccacaggagccacccacacacagctcacaggaagaagataagctccagaccccagggcgggacctgccttcctgccaccacttacacacaggccagggagctgttcccacacagatcaaccccaaaccgggactgcctggcactagggtcactgccatttccctctccattccctcccagtgcctctgtgctccctccttctggggaacaccctgtgcagcccctccctgcagcccacacgctggggagaccccaccctgcctcgggccttttctacctgctgcacttgccgcccacccaaacaaccctgggtacgtgaccctgcagtcctcaccctgatctgcaaccagacccctgtccctccctctaaacacccctcccaggccaactctgcacctgcaggccctccgctcttctgccacaagagcctcaggttttcctacctgtgcccaccccctaacccctcctgcccacaacttgagttcttcctctcctggagcccttgagccatggcactgaccctacactcccacccacacactgcccatgccatcaccttcctcctggacactctgaccacgctcccctccctctcagacccggccctggtatttccaggacaaaggctcacccaagtcttccccatgcaggcccttgccctcactgcctggttacacgggagcctcctgtgcgcagaagcagggagctcagctcttccacaggcagaaggcactgaaagaaatcggcctccagtgccttgacacacgtccgcctgtgtctctcactgcctgcacctgcagggaggctccgcactccctctaaagatgagggatccaggcagcaacatcacgggagaatgcagggctcccagacagcccagccctctcgcaggcctctcctgggaagagacctgcagccaccactgaacagccacggaggtcgctggatagtaaccgagtcagtgaccgacctggagggcaggggagcagtgaaccggagcccagaccatagggacagagaccagccgctaacatcccgagcccctcactggcggccccagaacaccccgtggaaacagaacagacccacagtcccacctggaacagggcagacactgctgagcccccagcaccagccccaagaaacactaggcaacagcatcagagggggctcctgagaaagagaggaggggaggtctccttcaccatcaaatgcttcccttgaccaaaaacagggtccacgcaactcccccaggacaaaggaggagccccctgtacagcactgggctcagagtcctctctgagacaggctcagtttcagacaacaacccgctggaatgcacagtctcagcaggagagccaggccagagccagcaagaggagactcggtgacaccagtctcctgtagggacaggaggattttgtgggggttcgtgtcactgtgagcatattgtggtggtgactgctattcccacagtgacacaaccccattcctaaagccctactgcaaacgcacccactcctggggctgaggggctgggggagcatctgggaagtatggcctaggggtgtccatcaatgcccaaaatgcaccagactctccccaagacatcaccccaccagccagtgagcagagtaaacagaaaatgagaagcagctgggaagcttgcacaggccccaaggaaagagctttggcaggtgtgcaagaggggatgtgggcagagcctgagcagggccttttgctgtttctgctttcctgtgcagagagttccataaactggtattcaggatcaatggctgggagtgagcccaggaggacagtgtgggaagagcacagggaaggaggagcagccgctatcctacactgtcatcttttgaaagtttgccctgtgcccacaatgctgcatcatgggatgcttaacagctgatgtagacacagctaaagagagaatcagtgaaatgcatttgcagcacagatctgaataaatcctccagaatgtggagcagcacagaagcaagcacacagaaagtgcctgatgccaaggcaaagttcagtgggcaccttcaggcattgctgctgggcacagacactctgaaaagcactggcaggaactgcctgtgacaaagcagaaccctcaggcaatgccagccctagagcccttcctgagaacctcatgggcaaagatgtgcagaacagctgtttgtcatagccccaaactatggggctggacaaagcaaacgtccatctgaaggacaacagacaaataaacgatggcaggttcatgaaatgcaaactaggacagccagaggacaacagtagagagctacaggcggctttgcggttgagttcatgacaatgctgagtaattggagtaacagaggaaagcccaaaaaatacttttaatgtgatttcttctaaataaaatttacacccggcaaaatgaactatcttcttaagggataaactttcccctggaaaaactataaggaaaatcaagaaaacgatgatcacataaacacagtggtggttacttctactggggaaggaagagggtatgagctgagacacacagagtcggcaagtctcctaacaagaacagaacaaatacattacagtaccttgaaaacagcagttaaacttctaaatcgcaagaagaggaaaatgcacacacctgtgtttagaaaattctcagtccagcactgttcataatagcaaagacattaacccaggttggataaataagcgatgacacaggcaattgcacaatgatacagacatacattcagtatatgagacatcgatgatgtatccccaaagaaatgactttaaagagaaaaggcctgatgtgtggtggcaatcacctccctgggcatccccggacaggctgcaggctcactgtgtggcagggcaggcaggcacctgctggcagctcctggggcctgatgtggagcaggcacagagctgtatatccccaaggaaggtacagtcagtgcattccagagagaagcaactcagccacactccctggccagaacccaagatgcacacccatgcacagggaggcagagcccagcacctccgcagccaccaccacctgcgcacgggccaccaccttgcaggcacagagtgggtgctgagaggaggggcagggacaccaggcagggtgagcacccagagaaaactgcagaagcctcacacatccacctcagcctcccctgacctggacctcacctggcctgggcctcacctgacctggacctcacctggcctgggcttcacctggcctgggcttcacctgacctggacctcacctggcctcgggcctcacctggcctgggcttcacctggcctgggcttcacctgacctggacctcacctggcctgggcctcacctgacctggacctcacctggcctgggcttcacctggcctgggcttcacctggcctgggcttcacctgacctggacctcacctggcctgggcttcacctgacctggacctcacctggcctcgggcctcacctgcacctgctccaggtcttgctggagcctgagtagcactgaggctgtagggactcatccagggttggggaatgactctgcaactctcccacatctgacctttctgggtggaggcacctggtggcccagggaatataaaaagccccagaatgatgcctgtgtgatttgggggcaatttatgaacccgaaaggacatggccatggggtgggtagggacagtagggacagatgtcagcctgaggtgaagcctcaggacacaggtgggcatggacagtgtccacctaagcgagggacagacccgagtgtccctgcagtagacctgagagcgctgggcccacagcctcccctcggggccctgctgcctcctcaggtcagccctggacatcccgggtttccccaggcctggcggtaggtttgaagtgaggtctgtgtcactgtggtattactatgatagtagtggttattactaccacagtgtcacagagtccatcaaaaactcatgcctgggagcctcccaccacagccctccctgcgggggaccgctgcatgccgtgttaggattttgatcgaggacacggcgccatgggtatggtggctaccacagcagtgcagcccatgacccaaacacacggggcagcagaaacaatggacaggcccacaagtgaccatgatgggctccagcccaccagccccagagaccatgaaacagatggccaaggtcaccctacaggtcatccagatctggctccaaggggtctgcatcgctgctgccctcccaacgccaaaccagatggagacagggccggccccatagcaccatctgctgccgtccacccagcagtcccggaagcccctccctgaacgctgggccacgtgtgtgaaccctgcgagccccccatgtcagagtaggggcagcaggagggcggggctggccctgtgcactgtcactgcccctgtggtccctggcctgcctggccctgacacctgagcctctcctgggtcatttccaagacattcccagggacagccggagctgggagtcgctcatcctgcctggctgtcctgagtcctgctcatttccagacctcaccagggaagccaacagaggactcacctcacacagtcagagacaacgaaccttccagaaatccctgtttctctccccagtgagagaaaccctcttccagggtttctcttctctcccaccctcttccaggacagtcctcagcagcatcacagcgggaacgcacatctggatcaggacggcccccagaacacgcgatggcccatggggacagcccagcccttcccagacccctaaaaggtatccccaccttgcacctgccccagggctcaaactccaggaggcctgactcctgcacaccctcctgccagatatcacctcagccccctcctggaggggacaggagcccgggagggtgagtcagacccacctgccctcaatggcaggcggggaagattcagaaaggcctgagatccccaggacgcagcaccactgtcaatgggggccccagacgcctggaccagggcctgtgtgggaaaggcctctggccacactcaggggctttttgtgaagggccctcctgctgtgtgactacggtggtaactcccacagtgatgaaaccagcagcaaaaactgactggactcgcagggtttatgcacacttctcggctcggagctctccaggagcacaagagccaggcccgagggtttctgcccagaccctcggcctctagggacacccgggccatcttagccgatgggctggtgccctgcacaccgtgtgctgccaaacaggggcttcagagggctctgaggtgacttcactcatgaccacaggtgccctggtcccttcactgccagctgcaccagaccctgttccgagagatgccccagttccaaaagccaattcctggggccgggaattactgtagacaccagcctcattccagtacctcctgccaattgcctggattcccatcctggctggaatcaagagggcagcatccgccaggctcccaacaggcaggactcccacacaccctcctctgagaggccgctgtgttccgcagggccaggccgcagacagttcccctcacctgcccatgtagaaacacctgccattgtcgtccccacctggcaaagaccacttgtggagcccccagccccaggtacagctgtagagagagtcctcgaggcccctaagaaggagccatgcccagttctgccgggaccctcggccaggccgacaggagtggacgctggagctgggcccacactgggccacataggagctcaccagtgagggcaggagagcacatgccggggagcacccagcctcctgctgaccagagacccgtcccagagcccaggaggctgcagaggcctctccagggggacacagtgcatgtctggtccctgagcagcccccaggctctctagcactgggggcccctggcacagctgtctggaccctccctgttccctgggaagctcctcctgacagccccgcctccagttccaggtgtggttattgtcagggggtgccaggccgtggtagagatggctacaattaccacagtggtgccgcccatagcagcaaccaggccaagtagacagacccctgccacgcagccccaggcctccagctcacctgcttctcctggggctctcaaggctgctgtctgccctctggccctctgtggggagggttccctcagtgggaggtctgtgctccagggcagggatgactgagatagaaatcaaaggctggcagggaaaggcagcttcccgccctgagaggtgcaggcagcaccacagagccatggagtcacagagccacggagcccccagtgtgggcgtgtgagggtgctgggctcccggcaggcccagccctgatggggaagcctgccccgtcccacagcccaggtccccaggggcagcaggcacagaagctgccaagctgtgctctacgatcctcatccctccagcagcatccactccacagtggggaaactgagccttggagaaccacccagccccctggaaacaaggcggggagcccagacagtgggcccagagcactgtgtgtatcctggcactaggtgcagggaccacccggagatccccatcactgagtggccagcctgcagaaggacccaaccccaaccaggccgcttgattaagctccatccccctgtcctgggaacctcttcccagcgccaccaacagctcggcttcccaggccctcatccctccaaggaaggccaaaggctgggcctgccaggggcacagtaccctctcttgccctggctaagacagggtgggcagacggctgcagataggacatattgctggggcatcttgctctgtgactactgggtactggctctcaacgcagaccctaccaaaatccccactgcctcccctgctaggggctggcctggtctcctcctgctgtcctaggaggctgctgacctccaggatggcttctgtccccagttctagggccagagcagatcccaggcaggctgtaggctgggaggccacccctgtccttgccgaggttcagtgcaggcacccaggacaggaaatggcctgaacacagggatgactgtgccatgccctacctaagtccgcccctttctactctgcaacccccactccccaggtcagcccatgacgaccaacaacccaacaccagagtcactgcctggccctgccctggggaggacccctcagcccccaccctgtctagaggagttggggggacaggacacaggccctctccttatggttcccccacctggctcctgccgggacccttggggtgtggacagaaaggacgcctgcctaattgtcccccaggaacccagaacttctctccagggaccccagcccgagcacccccttacccaggacccagccctgcccctcctcccctctgctctcctctcatcactccatgggaatccagaatccccaggaagccatcaggaagggctgaaggaggaagcggggccactgcaccaccgggcaggaggctccgtcttcgtgaacccagggaagtgccagcctcctagagggtatggtccaccctgcctggggctcccaccgtggcaggctgcggggaaggaccagggacggtgtgggggagggctcagggccctgcaggtgctccatcttggatgagcccatccctctcatccaccgacccgcccacctcctctccaccctggccacacgtcgtccacaccatcctgagtcccacctacaccagagccggcagagccagtgcagacagaggctggggtgcaggggggccgccagggcagctttggggagggaggaatggaggaaggggaggtcagtgaagaggcccccctcccctgggtctaggatccacctttgggacccccggatcccatcccctccaggctctgggaggagaagcaggatgggagaatctgtgcgggaccctctcacagtggaatacctccacagcggctcaggccagatacaaaagcccctcagtgagccctccactgcagtgctgggcctgggggcagcccctcccacagaggacagacccagcaccccgaagaagtcctgccagggggagctcagagccatgaaggagcaagatatggggaccccaatactggcacagacctcagctccatccaggcccaccaggacccaccatgggtggaacacctgtctccggcccctgctggctgtgaggcagctggcctctgtctcggacccccattccagacaccagacagagggacaggccccccagaaccagtgttgagggacacccctgtccagggcagccaagtccaagaggcgcgctgagcccagcaatggaaggcccccaaacaaaccaggaggtttctgaagctgtctgtgtcacagtcgggtatagcagcggctaccacaatgacactgggcaggacagaaaccccatcccaagtcagccgaaggcagagagagcaggcaggacacatttaggatctgaggccacacctgacactcaagccaacagatgtctcccctccagggcgccctgccctgttcagtgttcctgagaaaacaggggcagcctgaggggatccagggccaggagatgggtcccctctaccccgaggaggagccaggcgggaatcccagccccctccccattgaggccatcctgcccagaggggcccggacccaccccacacacccaggcagaatgtgtgcaggcttcaggctctgtgggtgccgctagctggggctgccagtcctcaccccacacctaaggtgagccacagccgccagagcctccacaggagaccccacccagcagcccagcccctacccaggaggccccagagctcagggcgcctgggtggattctgaacagccccgagtcacggtgggtatagtgggagctactaccactgtgagaaaagctatgtccaaaactgtctcccggccactgctggaggcccagccagagaagggaccagccgcccgaacatacgaccttcccagccctcatgacccccagcacttggagctccacagtgtccccattggatggtgaggatgggggccggggccatctgcacctcccaacatcacccccaggcagcacaggcacaaaccccaaatccagagccgacaccaggaacacagacaccccaataccctgggggaccctggccctggtgacttcccactgggatccacccccgtgtccacctggatcaaagaccccaccgctgtctctgtccctcactcagggcctgctgaggggcgggtgctttggagcagactcaggtttaggggccaccattgtggggcccaacctcgaccaggacacagatttttctttcctgccctggggcaacacagactttggggtctgtgcagggaggaccttctggaaagtcaccaagcacagagccctgactgaggtggtctcaggaagacccccaggagggggcttgtgccccttcctctcatgtggaccccatgccccccaagataggggcatcatgcagggcaggtcctccatgcagccaccactaggcaactccctggcgccggtccccactgcgcctccatcccggctctggggatgcagccaccatggccacaccaggcagcccgggtccagcaaccctgcagtgcccaagcccttggcaggattcccagaggctggagcccacccctcctcatccccccacacctgcacacacacacctaccccctgcccagtccccctccaggagggttggagccgcccatagggtgggggctccaggtctcactcactcgcttcccttcctgggcaaaggagcctcgtgccccggtcccccctgacggcgctgggcacaggtgtgggtactgggccccagggctcctccagccccagctgccctgctctccctgggaggcctgggcaccaccagaccaccagtccagggcacagccccagggagccgcccactgccagctcacaggaagaagataagcttcagaccctcagggccgggagctgccttcctgccaccccttcctgccccagacctccatgccctcccccaaccacttacacacaagccagggagctgtttccacacagttcaaccccaaaccaggacggcctggcactcgggtcactgccatttctgtctgcattcgctcccagcgcccctgtgttccctccctcctccctccttcctttcttcctgcattgggttcatgccgcagagtgccaggtgcaggtcagccctgagcttggggtcacctcctcactgaaggcagcctcagggtgcccaggggcaggcagggtgggggtgaggcttccagctccaaccgctccactagccgagactaaggaagtgagaggcagccagaaatccagaccattccatagcaaatggatttcattaaagttaccagacttcagtgtaagtaacatgagccccatgcacaacaatcccttatgaaggggaagtcagtgtcgcctcggatttcttgaaaaacacaaaaacttatcaatgcctgtaaaagtctgttggaaagaaaatatgattcaagaatgttatgcccaacaaagctggcatattttctacccggacacactcagggaatgtggtcgcttgagtgcttctctcactgcgtaaatcctacgtggtgtttaagcatattcataaatgtgtatgtctatttttatgtgtaagatggttcatttttattttatttattcaatatgtacaataaagaatattgacaaataggctggacatggtggctcccacctgtaatcccagccctttgggaggccgaggcgggcagatcacctgaggtctggagttcgagaccagcctggccaacatgatgaaaacccatctctactaaaaatacaaagattagccaggcatggtggtgcatgcctgtaatcccagccactcaggaggctgagacaggagaaatgcgtgaacccggaaggcggaggttgcagtgagccgagatcacaccactgcactccagcctggcgacagagcaagattccatctcaaaaaaaaaagacaaagaaatttgtttttttgaataaagacaaatttcatcacacgaagataaagatgcaaagctccagacaggaaggcacggacagcacagtgaagcctggagcgggcgctggggggccaggggcatggcgggggtgccagcgtctctcagtgcctaccatggccactccagcctgtgttctcacgaggatggctgtgcaatgctaggagcgtgttcgaagctctagggcaaccactggaagtgaggctgaggagcagagcccagaggcccgtggagctgatgaaaagaaagctggagaaagtgtttgctgcctcccaacatggtaagaaaagatagaaagagagagcacacggcaaagggagcttgctgagggactctttacaatggcttgcacagagctcagggggtctgggaggctagggccctgcgcagggcagtcaccccagcctgctgaccaaggtttgctgcaggcagctctgggggtggttgaggcgcggtccctggagccacccctcaagggaacgaggcagcagagtgggccaaggcccaggtcggctgcaaggctgcccaggacttggggtccttacatcagcagccactgatgcagctggcccagagagaggcgccgagcaggttgcctccaggggacaaaccaggtcggagagggtgaggcagtggatggagccacaacaaccccgggcacgggtgacacgcacgttcatgcacatctgacccttcctccctcaccaaacaggtccccctgccttccccatggttgcgaaaaagcaaaatgtagacgttttttcttttttaattcatgttttaattgacaaatgaagccgtatatatttattgtgtacaacatgatgctttaaaatatgtatacatcgtggaacagcaacgtcgagctaatttaacacgcattacttcacatacttgtcatcttttgtggcgagaatgcttaaaatccactctcttagtattttttaagaatgcaatacattgttgtcaactgtggtcaccgtcatgcatagccaagctcccgacctcaccctcctgccagctcaggctgtgcatcctttcaccagcatcccccaccccggcccctggccctggtaactaccactctatactctacgtatgagttcagctttttaagattccacagatgaatgagatcatacagtatttgctttctatgcctggcttattttagttaacacactgtcctccagatccatccgttgttgcaaatgacagggtttcattctttttaaagtctaaagagtattccattgtgtcaatggacctcatttgctttatccatgcatcaactatggacatttaggttgattccatttcttagctgttgtggatggtgctgcagtaaacatggggctgcagatgtctcttcaacatactgacatcatgtcctttggataaatacccagtagtgggatcgctggatcacaatgtacagttttttttttaatggaaactttcattttttggtgaaattaggaaaacagataaaacccacagaatccaaaatatatgtgaagatgccaaaaacagttgacattgggcagaggtcacatggaaggaagtgaatacatgacggggtgtgagggcccagaggcagctgaaatacgctttctaaacacaaggacctcttctgagagggcagaagttttatcctgcacatgcaatgaccagcacagctaaaatacactttctaaacatgaggacctcttctgagagggcagctttatcctgcaaatgcaatgaccagcacaggacccagaataaagagagttgccagcggacgcctggtgtccatgtgtccaggtgagttcgagatgcggacggcgctggccagccagtcacaccctaagtcaatctgctgcatgcatttgtccttgccacagcagaaaacgagaaagcctttgggctgcaaagcttcacaggctcctcttctcccgactccatggaaacagctacaaagagcaggcccagtagagcttaattcatgaaaatgagtaataaacttgaactggaacagtatcgactttttagaaacggcagcaaagtgtataaaaaatattcaccagaacaatatttccaaacgatgagatgagaatttcagccaagtaatcctccatggatagaaaataatgaagggattggatttatgaaggaaaatcatggagctcaaatacaagagaagagaatcaaaaatgaacaggaggagataaaatatggtttggccaaagttacaaaataaattttttaaaaacccttcatcatggcaagtagaaagagcgagaggaaaaacagatcccgtggaagacacaaataggacatggggagaaaaatgaatgagatgaaacagagcagaaataaaattttacggaactaaagacaagtgatctgaacctgcctggggcctgggggacctcgccaccctgaagggaaagaacatgcctggctggctttgccacctgctcattgcagagccccacagcttgcaacaaacataggcggtagccagggagtggttacagcaggccttgagcaagacccagtgttgtgctgacttcaggtctgacccagcactgtcatagtggtggtgtccatagtggtagtgggggtgcttgtgtcactccacccccatctccaggaggctcagaacagacagagagagactccatttgtttgggagaaagtaagggatgagaacaagagtctctgcctggtaatccagagaattattctagatcttggccaagattatcaaagcagtacctctatgagtcttttgggcttggagtccccctaaagcagatatagctaagatcacaacacccaagtccttttgaatatgtgggaagacttcccaaggacaggagcaaacaaacaagcccagactgcaaaaaaacaagcccagactgcaataaacacctcactcttcaatgcccaggcactgaagaacatctcctagcagcaacaccatccaggaaaacatggcctcaaccagtgaactaaataaggcaccagggaccagtctcggagaaatagaggtatgttatctttcagagaattcaaagtagctttgttgaggaaactcaaagaaattcaagataacacagtgaaggaattcagaatcctatccgataaatttaacagagattgaagcaattaaaaagaattaagcagaaattatggagctgaaaaatgcaattggcatactgaaaaatgcatcagagtattttcatagcctcatatatcaagtagaagaaagaattagtgagcttgaaaacaggctatttggaaaagcacgataaaaggagacaaaagagaaaagaataaataacaatgaagcatatctacaggatctagaaaatagcctcaaaaggccaaatctaagaattattagccttaaagaggaggtagagaaagagggatggagagtttattcaaagggataataacagaaaacttcccaaacctagagaaagatatcaatatccaaatgcaagaaggatgtagtacaccaaggagatttaatgcaaagaagactacctcaaggcattcaatactcaaactcccatatgacaaggactttaaaaagatcctaaaagcagcaaaagaaaagaaatgaataaaatactatggagctccaatatgtctggcagcagacttttcagtgaagactttatatgccaggagagagtgtcataatggatttaaagtgctgaaggaaaaaacttttaccctcgaacagtatagctggtgaaattatccttcaaacatgaaggagaaataatttgtttccagacaaatgttgagggatttcatgaacaccagacctgtcttttaagaaatgctaaagggagtacttcaatcagaaagaaacacgttagtgaacaataagaaatcatctgaaggcacaaaactcaccggtaatagtaagtacacagaaaaacacagaatattataacactgtaactgtggtgtgtaaactccttttgtttgtttgtttgtttgtttgtttgtttgtttttgtttttagacggagttttgctccagcccaggctggagtgcaatggcacaatctcagctcactgcaacttccacctcctgggttcaagcaattctcctgcctcagcctcccaagtagctgggattacaggcatgtgctaccatgtccagctaattttgtattttagtagagacggtgtttcaccatgttggtcaggctagccttatcttgagtagaaaaactaaatgatgaagcaatgaaaaataataactacaacttttcaagacatagtacaataagatataaatcataacaaaaagttaaaaggtggagggatgaagttaaggcatagagtctttattagttttctttttacttgtctgtttatgcaaacagtgttaagttgtcatcagtttaaaataatgggtcataagatactatttgcaagcctcatggtaacgtcaaaccaaaagcaatacaacagatacacaaaaaacaaaaagcaagaagctaaattacgtcatcagagaaaatcaccttcactaaaaggaagacggagaaaagaatgaagagagagaagaccaaaagcaaatagcaatatggcaggagtaagtccttacttatcaataataccattgaatgtaaatggactaaactctccaatcaaaagacatagagtggctgaatcaattaaagaaaaaacaagacccattgatctgttgtccacaagaaacacactttatctataaagacacacatagactgaaaacaaagggatggaaaaagatactccacgccaatggaaaccaaagaaagagcaggagtagctacacttatatcaggcaaaatagatttcaagacaaaaactataagaagagacaaggtcactaatgataaacaggtcaattcagcaagaggatataacaattgtaaatatatatgcacccaatgctggagcacccagatatataaagcaagtatttactagagctaaagagagaaatagactccaatgcaataatagctggagatttcaacatcccactttcaacattgaacagatcctccagatagaaaatcaacaaagaaatattggacttaatctgcactatcgaccaaatggatctaacagatatttacagaacatttcatccaacagctgcagaacacacattcttttcctcagcacatagatcattctcaaggatagaccatatgttgggtcacaaaacaagttttaaaatattcaaatacattgaaataatatcaagcatcttctgtgaccacaatggactaaaactagaaatcaataacaagaggaattttggaaactatataaatatatggaaattaatgaatgctgagtgggtcaatgaagcaattaagaaggaaactgaaatttttcttggaacgaatgatcatggaaacagaaaataccaaaacctatgggatacagcaaaagcagtactaagagggaagtttacagctacaaatgcttacattaaaaaagaagaaaaacttcaataaaaaaacctaacaatgcatcttaaagaactagaaaagcaagaggaaatcaaatccaaaattagtagaagaaaacagtaaaggtcagagcagaaataagtaaaattgaaatgaagaaaacaatacaaaagatcaataaaacaacaggttgttttcttgaaaagttaaacaaaattgacaaacctttagccagactaagaaaaaaagacagaagatccaaataaataaaatcagagatgaaaaaggtgacattacaacttacaccacagaaattcaaaggatcattagtggctactataagcaactatatgccaataaattggaaaatctagaagaaatgcagaaattcctagacacatacaacctcccaagattaaaccaagaagaaattcaaaacctgaacagactgataacaagtaatgagatcaaagccgtaataaaaagcctcccagtaaagagaagcccaggacccgacggcttcactgctgaattctaccaaacatttaaagtagaactaataccaatcctactcaaactattccaaaaaatagaggtggaaggaatacttcaaaactcattatacgaggccagtattaacctgacaccaaaactagacaaagacacatgaaaaaaagaaaactacaggccaatatgtctgatgaatattgacacaaaaatcctcaacaaaatactagcaaaccaaattcaactacacattagaaagttcactcatcatgaccaagtggaatttatctaacttgggatgcaaagatggttcaacatatgcaaatcaatcaatgtgatacatcatatcaacagaatgaacaacaaaaaccatttgatcatttaattgatactgaaaaagcatttgataaaattcaacattccttcataataaaaattctcttctatactaggtacaaaagaaacttacctcaacataataaagccatatatgacagtcccacagtatgatactaaatgaggaaaaactgagagcctttcctctacgatctggaacatgacaaagatgcccactttcatcactgttattcaacatagtactggaagtcctagctggagcgatcagacaagagaaagatataaaaggcatccaaattggaaaggaataagtcaaattatcctcatttgcatatggtatgatcttctatttagagctaactaaagactccaccaaaaaaagttattagaactgacgaacaaattcagtaaagctgcaggatacaaaatcaacatacaaaaatcagtagcatttctatatgccaacaatgaccaatgtgaaaaagaaattaaaaagtaaccctatttacaataaccacaaataaacacctaggaattaaccaaagaggtaaaagatttctgtaatgaaaactataaaacactgatgaaagaaattgaagagtacaccaaaaaatggaaagcaattgcatgttcatggattagaagaatcagtgttgttataatgtccatactatccaaagcaatctacagattcaatgcaatccttatcaaaataccaatgacatcattcacagaaatagaaaaaaaaaatcctaaaatttacgtggaaccacaaagacccagaatagccaaagctctcctaagcaaaaagaacgaaactgtaggaatgacattgcctgtcttcaaattctactacagagctatagatagtaaccaaaacagcgtggtactagcataaaaacagacacagagacaaacagaacaaaatttaaaaacccagaaataaatccacacacctacagcaaattcatttttgacaaagttgccaagaacatactctggggaatagataatgatatctcttcaataaataatgtggggaaaactggatatccatatacataacagtgaaactagacccctctctctctcactatatacaaaaatcaaatcaaaattgtttaaggacttaaatctaagacctcatactatgaaaccactgcaagacaaccttggcggaaactctccaagacatcagtccaggcaaagatttcttgagtaatatcccacaagcacagacaaccaaagcaaaaatggacaaatgggatcacatcaagttaaaaagcttctgcacagtaagggaaacaaccaacaaaatgaagagacaacccacagaatgggagaaaatatttgaaaaatacccatctggcaagggattaaaaaccagaatatatgcagaatatataaggagctcaaacagtgctatagaaaaaaaaatctaataatctgatttaaaaatgggaaaaatgttagaatagacatttcttaaaataagacatacagatggcaaaccgacatggaacggtgctcaacatcatggattatcacagaaacacaatcaatcaaaactaaaactaaaatgtgctatcatctcaccccagttaaaatggctgatatccagaagacaggcaataacaaatgctggcaaggatgtggggaaaagggagcccccatacactgttgctgggattgtaaattagtacaaccactgtggagagcagcatgaaagttcctcaaaaaactgaaagaaagctaccataggatccagcaatcccactgctgtgtatatactacaaaagaaaggaagtcagtatatgaagaggtatctgcactcccatgtttgttgcagccctgttcacaacagccaagatttggaagcaacctaagtgtccatcagcagttgaatgtataaagaaaatgtggtgcatatacacaatggagtattattcaataataaaaaggaatgagattgagtcatttgcaacaacatggatggaactggagatcattatgtgaagtgaaataagccaggcacagaaagacaaacattacaatgttcttacttattaatgagatctaaaaatcaaaacaattgcacccatgttcataaagagtaaaaggatggttaccagatgctgagaacggtggtggggggatagggaaaggtggcagtggttaacgggtacaaaaaaatagaaagaatgaataagacttactacttgatagcacagcaaggtggctatagtcagtaatttagttgtatatttttaataatgaaaggtgtataattggattgtttctaacacaaaggataatgcttaagaggatggataccccattttccatgatgtgattatttcacattgcacgcctagatcaaaacatccaatgtaccccataaatatatacatcttctatgtacccataaaaattctgtaaaataaaatatataaaaagaggtgacagatatggaagacaggcaaagaagagacgacatccacataatccgagtacctaagaaagaatggagtccagtgcatctcaggagccaccattctaagccaattttctctggttctctcagtcaccctaccaatacgtgggcaatcttgttttatttcaggatagagtttttgaaattatagatttaagtatgctttctgttctattacttttggtaattaattttagaaagaactaatttgggcacaaatttgaaaaaattctaaatccaaaaaaaaaaagaaaaaaacacacacacaatcatctataagggggatgatgaccagtcctagatttctcaccagccacattcaagatcagtaaatggtaggacaaaacctgtagggtccttaagggggaaagaagtagtggatagtccagagtctatatacagccaactgttcttgaagaaaaaaggctgctgaaaaggagttccaaacattctataatccataatctcatgatgaaactactagaggaagaccaccagccatcaaaaggtgcttggagaacccagggccaagaaccaaaagtaaatattaagtgtccttaactgcgagactaagatagaaatgactgtgggggaccatgtggcctcaacagaggtgaaatggtgtctgcctgacaaagtggacattttacaatgatcaaaacacagaatatgagatagagagcacttctgaattactgcctcactccaaataactctcagccaaaggacttcagtaaaaccaaattgggcatattagacagtacaaacaaattctaagaaaataatattactgattacaatcacatgatgctagagatggaggggaaaaggaagaggaaaccaggtaatttcatactcgtatatagtaaagaactaaagtacattgtccaaagaagaacaaagaatattttggaaagttataaaggtagccactacacatagaagatagcaaagaacaagaaaacttaagatggaaaactttttggaagcataaaaatagaaaatataaactactaagataagattgaagccaaacagatctatgaaaacaacaaacatcaatggccttaacttgcctattaaaaggaagagactttcaaattggaccacaagataaaacccaactctatatagcatatgagtattacacacaaaatgggaaaagctgaaaaaacttgggcaaaattcaccccaagcaaattccactgtttcctttgggacaaaatgccaagctccatgccagggaagatgattctcctcagaccttctcctcactctcccagtcctcttagggaaggaattgggtgttagaggagggagactctgtcgattatcagctgaagcagtggtgtgctcctgcgttgcttctgacctgggaaatgaagcagcaagactctttctgctgtgtctttgcccagaagggccatccccccagagcagagtacccaggccggcaggagcagtggtggaagcgtggaaaccacgtctcctacagcagagaccatcagaagcggagcctcgggtataagggaaacaacgcgttctccctaacctgggagtgacagacagcgtcattcctcacagtgataccctgtgttctagccatctggcccatgacagagccagcccagagccagcccagagccagcccctcaccaacctggagcctggccagctcgccaagctgcaccataggcctggaaggcgtggagacctgcggcagtgccctgtcctcccgtgaggcctgccatccctgccaggggtcgcctctggcttctccttctccaggaccgcacggtccagaggctcagtgcctggagtaggtgttgcccccctgcttctaggcccagaccctcccttgttcctgaccccgggcctttccctctggcttggacatccagggccctgtctcagctggggagctgctcctgctcaaggactgtcttccgcgggatcgaaaggccgcgtcctgaacaatgcgtgggccacgtgagcggagcaggctctaaaggccgcgtcctaaacagtgcgtgggccacgtgagcggagcaggctctaaaggccgcgtcctaaacagtgcgtgggccacgtgagcggagcaggctctaaaggccgcgtcctaaacagtgcgtgggccacgtgagcggagcaggctctaaaggccgcgtcctaaacagtgcgtgggccacgtgagcggagcaggctctaaaggccgcgtcctaaacagcgcgtgggccacgtgagcggagcaggctctaaaggccgcgtcctaaacagtgcgtgggccacgggagcggagcagactctaaaggccgcgtcctaaacagtgtgtgggccacgtgagcggagcgccctctccactgccctcggggccgcagctcccagctcagctcccagccctgctcagggcagccaggccaggaggtaccatccaggctaagtgaccctcaggggggacaggtgccccaggagatgccagctgttgggagaggctgggggaccaactcgacctggcctgtgggccctgccctggccacccattgtaggatccagccgccacgcctgtgacactcgtgtgctttccctggtgtgtgcttgtggcaggtgggggcagagggtcctcaggccagagagccactcccccagcgccagaccaccctcttcctcactcccccacctcaccccctcacaggtgcctcccaggccatcagggcccaaccacccctaaacaaatgggttctcggcccctcgtggctggaggtgggttctctcaccattcccagcctaagactccatccccatgctggcagctgttcaaccatgtctagagagatccactgtcccagacagcacctcagggtcccccgtcctgcctggaaccctgtaggaaactccacaaaccgccgccattctgtccacacccctacaggagccccaaccctctccccacatccaggcttccctcccagacccctcatccctgcccgcacggtgcctgagggggccttcttgggcagcgcctaagcaagcccccagcacccttcggccccttcaaggcacacaggccccctttccacccagcctcaggaaaccacctgtgtcctccaacgacaggtcccagcctcccagcctttgccttgcctgttcctctccctggaactctgccccgacacagaccctccccagcaagcccgcagggcacctcccctgcccccagacaccctgtgcccatcagttcatccccagcagaggccctcaccaggcacacccccatgctcacacctggccgcaggcctcagcctccctgagggccccacccagcccgcgtctggccagtggtgcgtgcaaagcccctcacccagactcggcggaaggcagccagtgcaggcctggggaggggctctccttagaccaccttgcaccttccctggcacccaccatgggaagagctgagactcactgaggaccagctgaggctcagagaagggacccagcactggtggacacgcagggagcccacgccagggcgccgtggtgagtgaggcccagtgccacccactgaggcctcccgttcagtgggacgacggtgaacaggtggaaccaaccaggcaacccccgccgggccccacagacgggatcagagcaggaaaggcttcctgcccctgcaggccagcgaggagccctggcgggggccgtggccctccaggcgaggaggctcccctggccaccgccacccgggcctctctgctgctgggaaaacaagtcagaaagcaagtggatgagaggtggcgtgacagacccagcttcagatctgctctaatttacaaaagaaaaggaaaaacacacttggcagccttcagcactctaatgattcttaacagcagcaaattattggcacaagactccagagtgactggcagggttgagggctggggtctcccacgtgttttggggctaacagcggaagggagagcactggcaaaggtgctgggggcccctggacccgacccgccctggagaccgcagccacatcagcccccagccccacaggccccctaccagccgcagggttttggctgagctgagaaccactgtgctaactggggacacagtgattggcagctctacaaaaaccatgctcccccgggaccccgggctgtgggtttctgtagcccctggctcagggctgactcaccgtggctgaatacttccagcactggggccagggcaccctggtcaccgtctcctcaggtgagtctgctgtctggggatagcggggagccaggtgtactgggccaggcaagggctttggcttcagacttggggacaggtgctcagcaaaggaggtcggcaggagggcggagggtgtgtttttgtatgggagaagcaggagggcagaggctgtgctactggtacttcgatctctggggccgtggcaccctggtcactgtctcctcaggtgagtcccactgcagccccctcccagtcttctctgtccaggcaccaggccaggtatctggggtctgcagccggcctgggtctggcctgaggccacaccagctgccatccctggggtctccgccatgggctgcatgccagagccctgctgtcacttagccctggggccagctggagcccccaaggacaggcagggaccccgctgggcttcagccccgtcagggaccctccacaggtagcaagcaggccgagggcagggacgggaaggagaagttgtgggcagagcctgggctggggctgggcgctggctgttcatgtgccggggaccaggcctgcgctttagtgtggctacaagtgcttggagcactggggccagggcagcccggccaccgtctccctgggaacgtcacccctccctgcctgggtctcagcccgggggtctgtgtggctggggacagggacgccggctgcctctgctctgtgcttgggccatgtgacccattcgagtgtcctgcacgggcacaggtttgtgtctgggcaggaacagggactgtgtccctgtgtgatgcttttgatatctggggccaagggacaatggtcaccgtctcttcaggtaagatggctttccttctgcctcctttctctgggcccagcgtcctctgtcctggagctgggagataatgtccgggggctccttggtctgcgctgggccatgtggggccctccggggctccttctccggctgtttgggaccacgttcagcagaaggcctttctttgggaactgggactctgctgctggggcaaagggtgggcagagtcatgcttgtgctggggacaaaatgaccttgggacacggggctggctgccacggccggcccgggacagtcggagagtcaggtttttgtgcaccccttaatggggcctcccacaatgtgactactttgactactggggccagggaaccctggtcaccgtctcctcaggtgagtcctcacaacctctctcctgctttaactctgaagggttttgctgcatttctggggggaaataagggtgctgggtctcctgccaagagagccccggagcatcctggggggctcaggaggatgccctgaggcaacagcggccacacagacgaggggcaagggctccagatgctccttcctcctgagcccagcagcacgggtctctctgtggccagggccaccctaggcctctggggtccaatgcccaacaacccccgggccctccccgggctcagtctgagagggtcccagggacgtagcggggcgccagttcttgcctggggtcctggcattgttgtcacaatgtgacaactggttcgacccctggggccagggaaccctggtcaccgtctcctcaggtgagtcctcaccaccccctctctgagtccacttagggagactcagcttgccagggtctcagggtcagagtcttggaggcattttggaggtcaggaaagaaagccggggagagggacccttcgaatgggaacccagcctgtcctccccaagtccggccacagatgtcggcagctggggggctccttcggctggtctggggtgacctctctccgcttcacctggagcattctcaggggctgtcgtgatgattgcgtggtgggactctgtcccgctccaaggcacccgctctctgggacgggtgccccccggggtttttggactcctgggggtgacttagcagccgtctgcttgcagttggacttcccaggccgacagtggtctggcttctgaggggtcaggccagaatgtggggtacgtgggaggccagcagagggttccatgagaagggcaggacagggccacggacagtcagcttccatgtgacgcccggagacagaaggtctctgggtggctgggtttttgtggggtgaggatggacattctgccattgtgattactactactactactacatggacgtctggggcaaagggaccacggtcaccgtctcctcaggtaagaatggccactctagggcctttgttttctgctactgcctgtggggtttcctgagcattgcaggttggtcctcggggcatgttccgaggggacctgggcggactggccaggaggggacgggcactggggtgccttgaggatctgggagcctctgtggattttccgatgcctttggaaaatgggactcaggttgggtgcgtctgatggagtaactgagcctgggggcttggggagccacatttggacgagatgcctgaacaaaccaggggtcttagtgatggctgaggaatgtgtctcaggagcggtgtctgtaggactgcaagatcgctgcacagcagcgaatcgtgaaatattttctttagaattatgaggtgcgctgtgtgtcaacctgcatcttaaattctttattggctggaaagagaactgtcggagtgggtgaatccagccaggagggacgcgtagccccggtcttgatgagagcagggttgggggcaggggtagcccagaaacggtggctgccgtcctgacaggggcttagggaggctccaggacctcagtgccttgaagctggtttccaagagaaaaggattgtttatcttaggaggcatgcttactgttaaaagacaggatatgtttgaagtggcttctgagaaaaatggttaagaaaattatgacttaaaaatgtgagagattttcaagtatattaatttttttaactgtccaagtatttgaaattcttatcatttgattaacacccatgagtgatatgtgtctggaattgaggccaaagcaagctcagctaagaaatactagcacagtgctgtcggccccgatgcgggactgcgttttgaccatcataaatcaagtttatttttttaattaattgagcgaagctggaagcagatgatgaattagagtcaagatggctgcatgggggtctccggcacccacagcaggtggcaggaagcaggtcaccgcgagagtctattttaggaagcaaaaaaacacaattggtaaatttatcacttctggttgtgaagaggtggttttgcccaggcccagatctgaaagtgctctactgagcaaaacaacacctggacaatttgcgtttctaaaataaggcgaggctgaccgaaactgaaaaggctttttttaactatctgaatttcatttccaatcttagcttatcaactgctagtttgtgcaaacagcatatcaacttctaaactgcattcatttttaaagtaagatgtttaagaaattaaacagtcttagggagagtttatgactgtattcaaaaagttttttaaattagcttgttatcccttcatgtgataactaatctcaaatactttttcgatacctcagagcattattttcataatgactgtgttcacaatctttttaggttaactcgttttctctttgtgattaaggagaaacactttgatattctgatagagtggccttcattttagtatttttcaagaccacttttcaactactcactttaggataagttttaggtaaaatgtgcatcattatcctgaattatttcagttaagcatgttagttggtggcataagagaaaactcaatcagatagtgctgaagacaggactgtggagacaccttagaaggacagattctgttccgaatcaccgatgcggcgtcagcaggactggcctagcggaggctctgggagggtggctgccaggcccggcctgggctttgggtctccccggactacccagagctgggatgcgtggcttctgctgccgggccgactggctgctcaggccccagcccttgttaatggacttggaggaatgattccatgccaaagctttgcaaggctcgcagtgaccaggcgcccgacatggtaagagacaggcagccgccgctgctgcatttgcttctcttaaaactttgtatttgacgtcttatttccactagaaggggaactggtcttaattgcttgatgaagagcaggagactcatttatgtgagtcttttgagtgaccattgtctgggtcactcccatttaactttccctaaagcccatttgaaggagaggtcgcacgagctgctccacaacctctgaatggggatggcatgggtaatgatgcttgagaacataccaagccccactggcatcgcccttgtctaagtcattgactgtaggtcatcatcgcacccttgaaagtagcccatgccttccaaagcgatttatggtaaatggcagaattttaagtggcaaattcagataaaatgcatttcttggttgtttccaatgatgactgttatctagagggaatttaaaggcaggggtttactgcagactcagaagggaggggatgctccgggaaggtggaggctctgagcatctcaataccctcctcttggtgcagaagatatgctgccacttctagagcaaggggacctgctcatttttatcacagcacaggctcctaaattcttggtctcattctcaagatgttttaatgactttaaagcagcaaagaaatattccacccaggtagtggagggtggtaatgattggtaatgctttggaaccaaaacccaggtggcgctggggcaggactgcagggaactggggtatcaagtagagggagacaaaagatggaagccagcctggctgtgcaggaacctggcaatgagatggctttagctgagacaagcaggtctggtgggctgaccatttctggccatgacaactccatccagctttcagaaatggactcagatgggcaaaactgacctaagctgacctagactaaacaaggctgaactgggctgagctgagctgaactgggctgagttgaactgggttgagctgagctgagctgagctgggctaagttgcaccaggtgagctgagctgagctgggcttggctgcactaagctgggctgagctgggcagggctgggctgagctgagctgggctgggctgagctgggctgggctgggctgggctgagcgggtctgagcggggctgagctgagctaggctgggctgggctgagctgggctgagctgggctgagctgggctgagcaaggctaggctgagctgggctgagctgagctgggccgagcaaggctaggctgagctgagctgagctgggctgcgctgagctgggctgggctgcgctgagctgggctgggctgagctgggctaggctgggctgagctgggctgagctaggctgggctgggctgggctgagcggggctgagcggggctgagctgagctaggctgggctgagcggggctgagctgagctaggctgggctgggctgggctgagccaagctgaaccgggttgagcgtgctgtgctgggctgagccaagctaggctgagctgagccaagttgagcttagctgggctgagctaacctgggcaaggctgagctgggctgagctaacctggactggggctgagctaacctgggcagagctgagctgggctgagctaacctggactggggctgagctaacctgggcagagctgagctgggctgagctaacctgggctggggctgagctaacctgggctgggctcagctgagctgagctacgctgggctgggctgggctgagccgagctgaactgggctgagcaggctgtgtcgggctgagccaagctgggccgagctcagcagagctgagccgagctgagcttagctgggctgagctaaccagggctgggctgagctgggctgagctgagctgagctgaactgggctgaacgggctgaggcgagcagggccgagctgagcagagctaagccgaggctgggctgggctaacctgggctgggccgagctgagcagagctaagccgaggctgggctgggctaacctgggctgggctgagctgagctgggttgggcagggctgggctgggctgagctaagctgaactagggtgagctgggccgagccaggctggtttgggctgagttgagctgacctggactggggctgagctaacctgggctgggctcagctgagctgagctacgctgggctgggctgggctgagccgagctgaactgggctgagcaggttgtatcaggctaagccaagctgggccaagctcagcagagccaagccgagctgagcttagctgggctgagctaaccagggctgggctgagctgggctgagctgagctgagctgaactgggctgaacgggctgaggcgagcagggccgagctgagcagagctaagccgaggctgggctgggctaacctgggctgggctgagctgagctgggttgggcaaggctgggctgggttgagttgggctgagctaagctgagctagggtgagctgggctgagccaggctggattgggctgagttgagctgacctcaactgagctgacctaggctgagctgagctgagctgaagtaggctgtgctgggctgagctgggatgacctgggctgggctgagctgatttgggctgggttgagcagacctgggctgagccgggttgagctgagctgaaccaggatgagctgggctgagctgagctgggctgggtggtccaggctgggctgacctggaccaggctgggccaggttgagctgggctaagccgagctgagctgagctgagctgggatgatctgggctgggctgggctgggctgagctgacctgggctgggctgggctgagctgagctgagctgagttaagctgagctgagctgaactgggctgtgctgagctaggctgggctgggctgagctgggctgggctgggctgagccagattgtgcctggctgaactgagctgggctaagctgagctgggctgagctgggctgagctgagctgggctgagtggggcggggctgagctgagccggactgggctgggctgggctcagctgagctgagctgaactgggctgggctgaactgggctgggctgagctgagctgaactgggctgggctgaactgggctgggctgagctgagcttggatgagctgggctgaactgggctgggttgagctgggctgggctgagttgagccaggctgatctgggctgagccgagctgggttaagccgagctgggttgggctgggctgggttgggctgggctgagccggactgggttgggctgagctgagctggactgggctgagctgagctggtctgggctggctgagctgagctgtgttgagccaagctaggctgggctgggctgagctgggctgaactgggctgagcggagctgagctgagctgggctgggttgagcagagctgggggctgagctgggctgggctgggctgagttaagctgggctgacctgggctgagttaagctgggctgacctgggctgagctaagctgggttgagccgatccgggctgggctgggctgggctgagccaggctaggttgagctgggctgggctgggctctgctgtgctgtgctgaacagggctgagctgaactgagctgagctgggctgagctgggctctgctgtgctgtgctgagcagggctgagctgaactgagctgagctgggttgagctaagctaggctgggctgggctgagctgggatgagctgggctgggctgggctgggctctgctgtgctgtgctgaacagggctgagctgaactgagctgagctgggctgagctgggctctgctgtgctgtgctgagcagggctgagctgaactgggctgagctgggctgagctgggctgagttgagcagagctgggttgagcagagctgggctgggctgggctgagttgagccaggctgacctgggctgagccaagctgggttgagccaaactgggctgggctgggctgagccaggctggattgagctgggctgggctgggctaagctgagccgagcaaggttgagcgagctgggctgggttgggctgagctgagctgggctgggctgagctgggctgtgctgcactgagctgggctgagctgggttgaactgtgctgagctgagctgggctgtgctgaactatgcttagctgggctgggctatactgggcttagctgggctgggctaaactgggcttagctgggctgggctatactgggcttagctgggctgggctaaactgggcttagctgggctgggctatactgggcttagctgggctgggctgagctgagatggtcttaggtggtctgagctcagctaggctgggctgagctggtctgagctcatctgagttgggctgagctgagcttggctttgctgagctggggtggggtgggctgggctggattgagctggcctgggctgggatgaactggattgagctggcctgggctgggatgaactggaggacatggcactgggccaatcttcatgatcttgttggacatagatggatagcctcagctgagtctacactgcgttccccatcacacccaccctccctatactcactcccaggcctgggttgtctgcctggggagacttcagggtagctggagtgtgactgagctgggggcagcagaagctgggctggagggactctattggctgcctgcggggtgtgtggctccaggcttcacattcaggtatgcaacctgggccctccagctgcatgtgctgggagctgagtgtgtgcagcacctacgtgctgatgcctcgggggaaagcaggcctggtccacccaaacctgagccctcagccattctgagcagggagccaggggcagtcaggcctcagagtgcagcagggcagccagctgaatggtggcagggatggctcagcctgctccaggagaccccaggtctgtccaggtgttcagtgctgggccctgcagcaggatgggccgaggcctgcagccccagcagccttggacaaagacctgaggcctcaccacggccccgccacccctgatagccatgacagtctgggctttggaggcctgcaggtgggctcggccttggtggggcagccacagcgggacgcaagtagtgagggcactcagaacgccactcagccccgacaggcagggcacgaggaggcagctcctcaccctccctttctcttttgtcctgcgggtcctcagggagtgcatccgccccaacccttttccccctcgtctcctgtgagaattccccgtcggatacgagcagcgtggccgttggctgcctcgcacaggacttccttcccgactccatcactttctcctggaaatacaagaacaactctgacatcagcagcacccggggcttcccatcagtcctgagagggggcaagtacgcagccacctcacaggtgctgctgccttccaaggacgtcatgcagggcacagacgaacacgtggtgtgcaaagtccagcaccccaacggcaacaaagaaaagaacgtgcctcttccaggtgagggccgggcccagccaccgggacagagagggagccgaagggggcgggagtggcgggcaccgggctgacacgtgtccctcactgcagtgattgccgagctgcctcccaaagtgagcgtcttcgtcccaccccgcgacggcttcttcggcaacccccgcaagtccaagctcatctgccaggccacgggtttcagtccccggcagattcaggtgtcctggctgcgcgaggggaagcaggtggggtctggcgtcaccacggaccaggtgcaggctgaggccaaagagtctgggcccacgacctacaaggtgaccagcacactgaccatcaaagagagcgactggctcagccagagcatgttcacctgccgcgtggatcacaggggcctgaccttccagcagaatgcgtcctccatgtgtggccccggtgagtgacctgtccccaggggcagcacccaccgacacacaggggtccactcgggtctggcattcgccaccccggatgcagccatctactccctgagccttggcttcccagagcggccaagggcaggggctcgggcggcaggacccctgggctcggcagaggcagttgctactctttgggtgggaaccatgcctccgcccacatccacacctgccccacctctgactcccttctcttgactccagatcaagacacagccatccgggtcttcgccatccccccatcctttgccagcatcttcctcaccaagtccaccaagttgacctgcctggtcacagacctgaccacctatgacagcgtgaccatctcctggacccgccagaatggcgaagctgtgaaaacccacaccaacatctccgagagccaccccaatgccactttcagcgccgtgggtgaggccagcatctgcgaggatgactggaattccggggagaggttcacgtgcaccgtgacccacacagacctgccctcgccactgaagcagaccatctcccggcccaagggtaggccccactcttgcccctcttcctgcactccctgggacctcccttggcctctggggcatggtggaaagcacccctcactcccccgttgtctgggcaactggggaaaaggggactcaaccccagcccacaggctggtccccccactgccccgccctcaccaccatctctgttcacaggggtggccctgcacaggcccgatgtctacttgctgccaccagcccgggagcagctgaacctgcgggagtcggccaccatcacgtgcctggtgacgggcttctctcccgcggacgtcttcgtgcagtggatgcagagggggcagcccttgtccccggagaagtatgtgaccagcgccccaatgcctgagccccaggccccaggccggtacttcgcccacagcatcctgaccgtgtccgaagaggaatggaacacgggggagacctacacctgcgtggtggcccatgaggccctgcccaacagggtcaccgagaggaccgtggacaagtccaccggtaaacccaccctgtacaacgtgtccctggtcatgtccgacacagctggcacctgctactgaccctgctggcctgcccacaggctcggggcggctggccgctctgtgtgtgcatgcaaactaaccgtgtcaacggggtgagatgttgcatcttataaaattagaaataaaaagatccattcaaaagatactggtcctgagtgcacgatgctctggcctactggggtggcggctgtgctgcacccaccctgcgcctcccctgcagaacaccttcctccacagcccccacccctgcctcacccacctgcgtgcctcagtggcttctagaaacccctgaattccctgcagctgctcacagcaggctgacctcagacttgccattcctcctactgcttccagaaagaaagctgaaagcaaggccacacgtatacaggcagcacacaggcatgtgtggatacacatggacagacacggacacacacaaacacatggacacacagagacgtgctaacccatgggcacacacatacacagacatggacccacacacaaacatatgtggacacacatgtacaaacatgcacaggcacacaaagagaacactgactacaggcacacacacacacgggcacactacccacaggcacacaacagatggacacgcgtacacagacatgcacacacccacaggcacaacacgtgcgcatgccggccggcccccgcccacattctcccagggccctgccggatactctgtccctgcagcagtttgctccctgcgctgtgctggccccggggctttgggcccaggctctgcttgtccttctgtctctgcttggaggtgctgccatggcacccagcttgggctctgcctggggagcggaggccccagggatagcatgtgacccctgctgaggccaggctcctgatgaaggcagcagatagcccccacacccaccggtgagcagaaccagagcctgtgccatgtgctgagagcaggcagtgactaagcatatgggcccagagggcagagtggctgccctgggcagctgctcctcttagcaggaggcctcaggagatgagctagagcaagtctgcccctgcaaataccacctgctccccaacccacagcagggagcaggcgaggtcagacagcagcagcccgggaaggaccgagccccagcagggaaggcagggcccgagtgaggtctccacacccaacgcacagtgctgtctctaactggggccacctccgagtccccgccacactcttggccctttggagtcctgggctccaggtgtctcccaagggcccatctgtgcaggggatgcaaccccccgaatgtcctcatcccactgtggagctcaggtctctgtctgctccctgggtcctggcagggtaggacaagtccgccaggatgtccccatgcagactctgctccaagagggagctggagagtcagggccttggtgagggagtcaggatcgggttccccccagctcagtcctcccacctgccagcccccacagcacagggcagggccacaccccctgcttccccctccaggagagtcaggacatgctggccgctgctccgctggggccccgccctccagcccccaccttggtctgtgtgctgcatcccccacgctctctctgccaccccaggactctgaggaaaagacctcagagtcccagccctgcccagcctcggcctgtgcccccgctgcatcaggctttcaggggcccagcccatgccctgggcagtgcccgagcccccctgcacttgctctccccacccctgggtgcagcacagcctaggggccaagggtgggcctagaggatgggccccgggggggctttgctgggtgccaccccagcctgaccctattcccccgtgctgtgtctcctgcagagggggaggtgagcgccgacgaggagggctttgagaacctgtgggccaccgcctccaccttcatcgtcctcttcctcctgagcctcttctacagtaccaccgtcaccttgttcaaggtagcacggctgtggcacagggaggagggcgcagggcgaatgtggggcccagggagcagcctgggctggacgtctagcccggaggcccccacaccaccccactgggtcatctctgccccggctcccttcccgaccacagggaaagcatttcacactgtctctgttgcctgtaggtgaaatgatcccaacagaagaacatcggagaccagagagaggaactcaaaggggcgctgcctccgggtctggggtcctggcctgcgtggcctgttggcacgtgtttctcttccccgcccggcctccagttgtgtgctctcacacaggcttccttctcgaccggcaggggctggctggcttgcaggccacgaggtgggctctaccccacactgctttgctgtgtatacgcttgttgccctgaaataaatatgcacattttatccatgaaactgctttctggtgagggtttttgtttctttttcaaaactttcatgctacatgggcatctcaagggggaccccagttccaaagggagctgtggaaaagagcgctgggtcagccagcgcagggggttcgaggaaagccacgtgcccaggaaaggggccgcagaagcaggtgggccagactcagactcggggcatgcccagcctgatggaaggaaggggactgagcaggagagggttccaggcctggtcctccaagcacagcctgaattgggagactggggctcaggcctcgggggcctctgtgtgtgctccacatgcctacaactgcccgggtcaccttgccacccttcccagcaagcccagacagttcttggccttgccccaaaccttcatgatgtgtggtgcacgccaccgggatccaggaggtgcaggctgagccctcgagagcatgtgggcctcaccgggatccaggaggtgcaggctgagccctcgagagcatgtgggcctgtctgcacagtgtgggggccttgcactccacaggagcacaggggtggggtagcagtcgcgcccgtggcaggggagtggaagttggagcaaaagtttcaggtgaacgagtgtcttagtctaattgggcagctatcacaaaacactatcggctgcaaagcttgagcaacagacatttgcctcccacagcgctggaggctgaaagtctaagatcaaggcgccggcaacttcaacgtctggcgagggccaattcccagctcagagacgcgcctcctcactgcatcctcgcgcagccgaagatggtgaaggagctctcagggtctctgtcatacaggcactaagcccgtcacgagggtctctgtcatacaggcactaagcccgtcacgagggtctctctcatacaggcactaagcccgtcacgagggtctctctcatacaggcactaagcccgtcacgagggtctctctcatacaggcactaagcccgtcacgagggtctctctcatacaggcactaagcccgtcacgagggtctctctcatacaggcactaagcccgtcacgagggtctctctcatacaggcactaagcccgtcacgagggtctctctcatacaggcactaagcccgtcacgagggtctctctcatacaggcactaagcccatcacgaggtcctcatcattgcccagatgctagggctcccagtgccatccccttgtggatgaggatggggggcgtgaccatgtcgtccttagaagccgttagggaatgcatagtggggaggacaagtctctgccatcaccctgaagatgggcaggtggtggccaggcttggggcagtgccgaaaaatgactccccaggtaggtgggagcaggatcaaagagcaggggattttttcagagatggcagccaagccaaagttgggggctcatgccaggaggctcacttggccatggtgcagtcacccaggggtgacccacagtccgtggcaaagtcaaggacagcagtggctgtgagaccagggtggaggcaggtggctggggggagaggaccaggctggaaggactgggcagaccccaaggccatagaagtgtcctagaggaagcatccaggatggcgtcttgggagggctcataagctgggggcccagaaggaggccatttcaggttctgaggagcagcctggcacttgctctgagccagctgtcatgggtatctgggggctgctgggtacaagttgtgtccctcccactaaatgtgctctccacatggacccggcccgcccttctgtccctgctggatccctgagctggcaccagccctgccctcagagacaatgtccaggagacaggtggaggtgcacgtgtgggtccctggggaaatccatcctccaaccgtgggctccgagtcgcctcccagcctctcgctccagcttcaccccatgtagctcatcacaggctcaacctcccagcctgggggaggatggagtgaggagccccacactgcccagggcacacccagggggctggggagtctgcactgggctggggcagggaggcctcgtgcagcctgtggggctggcagctcaggacaacactcgtatccgttaactgtggccctggcaacactgcaccccagactgcgtggcttaaacaacagacgtttattccgtcctggttctggaggccgggcatctgggatggaggcctcggcggggctggctcctctgtgtcacgggagactctgttccaggctctctccctgctgctgggctttgccggccgtctctggtgctcttggcttatggaagcagcaccatcttcacagggcgttctccccacgtgctgtctgtgcccagattcccccttttcatgaggacagcagtcatattggatcagaggcttgccctactccagggtgacctcatctgaacttgattgcagctgcaaagactgtttccagacaaggtcacattctgtggtcctgggggttaggacttcgacacattaatttacaggggacacattttaacccatgacagtttgccctccgttccccccataatcatgtccttctcacatgcaaaatccctgcatcccatagcaacatctccagaacggctgaccccttccagcaccaactcttagtccacaatctcagcgaaatatcacctgcatcaagtgtgggagaaacccagggtgagattcattctgggtgaaattcctctccatctgtggacctttgtaacttgacaagaagttatctgcttccaaagtacaatgatggggcaggcataggatggacattcctattctaaaagggatacatagaaagggagagaggagccatgggtcccaagcaagcccaaacccagcagggaaagctgcattagatttaaggctcaaggctcatcctcctgggtccgtgctccatcttccaggcccactggggtgaccccatgctcttcgcccatggtggccagagcccccacagcctcctcatctttggctctgatctcaaagtcacccttccttcattttttctggtcttctttcccttccatccaattggcattgtttcttctgttttacaattcacaaaatccttgtcagcttcccatgaaattcatgggggtttgagtcatcagacaagagagccctgcacagttatatcctcaataaccttatctctactcctggtttctgctgagatggttgattggatccataagtcatgattccaatctctttaacaaatggttgcccagacacatccttggccttgtttccagagcatgctattggacaggctgagaattttccagctgttcaagttgtgggtcctgtttactgaacactttctctcactttttactataagcagtcaggagaaatcaggttgtgccttcaacacttttcttagaaatatcctcagctaaaatccaggttcatcacttgtaagtcctacttaccataaatagaatgcaattcagccaagtgctttgccactttctaacaaaggtcacctttcctccaattttcaataacatcttcctcatttctgtctggggcctcaccagaggcatctttaacattcacatttctagcaacattctgtttgtgacaatttatgtattctctaagatgacaggagttttctctatagctctcctctttctttctgagcccccaccaggatcaccttcaatgtccaaatttctaccatagtcttcaaggaaatctaggctttttctaacatgcacctgaaaactcttctcacctctacacattaccctatcccaaattcatttccacagttttaggtatcaattaaatcagataaataaatcattaccctgaattatttcagttaagcatgttagttggtggcataagagaaaactcagtcagatagtgctgaagacaggactgtggagacaccttagaaggacagattctgttcagaatcactgatgcggcgtcagcaggactggcctagtggaggctctgggagggtggctgccaggcccggcctgggctttgggtctccccggactacctggagctgggatgcgtggcttctgccgccgggccgactggctgctcaggccccagcccttgttaatggacttggaggaatgattccatgccaaagcttttgcaaggttcgcagtgaccaggcacccgacatggtaagagacaggcagccgccgctgctgcattcacttctcttaaaactttgtatttgatgtcttatttccactagaaggcgaattggtcttaattgcttctcttaagccaccacttctaaagccaaaatctgttttagtttcttatgagctattgtaacaaagtaccacaactgcatggctgaaacaacagaagtgtattctgtctcatttctggaggccaggtgtctgagatcaagctgtgggcagggttggctcccctgggttggcagggagaatctgttccaggtgtctgtcctggcttttgttggtttgctggaaagctttggtgttccttggcttttggaaacagctcctccgcctccatctttaccttcacatggcattctgcctgcgtgcatgtctgtgtctaaatttccactttgcataaggacaccagccatattgggtcagaggctcacctgcctccagcgtgacctcatcttaacttgattgcatctgcaaaactctgcttccaaagaagggcacattctgaggccctacgggtcagagcttcaacacgtccatttatttggagacacaactcaacccataacaagacccatccctagtgtctcaccagtggtgctgtagagggaggcctggcagggctgacatcccagaacctcagggaaaaatgaaaacagcccagaggggtccaagaggtggctcgaggaagggaattaggaacacactgttcaggtggaagattctgagatgggccgtgaatactgcctaggatgtggagggttgacaatgggttgacaatcctgctcagaaaatcccaggataaaggatgtaaatggggagaagaggagggtcatccagaatttgggaaagcagggcgacagtttctgccccaagggagaagggaaggaggatggggccaccgccacaccagatgaccttgcgtaccaggccaaagaacgggaacacctggccccacctgagcagcaatagtcagtgtggtggtgggcagacatgggtggaggcagggggtgagtagaaggttagactaagacggagcacctggggcctccagggacccaggcaagaaccctgcacttgctcagctgccctgggtacccaggtctccaggaaagtgaggctgagagccaagcccagcaggcagccacacattctgggacctgccaccctacagcctgctgtccatgagtaacaccccttacaaggggccaggtcagctcatgggtttatcccaggcagcagagcccctggggccaggaatcagggagaggagcatccaatcccaccagctcctctggagccactcagagggccagacgcatggccctccacagggaccccatggcccctgcagggcagctgaggacccgtggctgggagcctgggcaggagggtcatacagccctaggcccgttgctcccaggcttgagtgcccctcctcccctcaggggcccaagggaagtgggttccagagaggttgggggcagcagggaaggtggaggtcccaggaatgcccagaggggcaccaaagcctctggagggaagacccctcccttccaggagctctcggcaacaagagcccagggtccacaaagccacaggtcccactcggttattctgactcacaacacaggagcggcagcaggggcattcgtgttcacgggccacttggtcagccccgctcaccctgggcactcctcctgggccccttttccctgccttccctgtcaccctgctgccagggtcctctgccctgccctgccccttgtcctcagagcctccagcctcagactcccactgtgtctgtcttccagcacccaccaaggctccggatgtgttccccatcatatcagggtgcagacacccaaaggataacagccctgtggtcctggcatgcttgataactgggtaccacccaacgtccgtgactgtcacctggtacatggggacacagagccagccccagagaaccttccctgagatacaaagacgggacagctactacatgacaagcagccagctctccacccccctccagcagtggcgccaaggcgagtacaaatgcgtggtccagcacaccgccagcaagagtaagaaggagatcttccgctggccaggtaggtcgcaccggagatcacccagaagggccccccaggacccccagcaccttccactcagggcctgaccacaaagacagaagcaagggctgggctgtgaggcaacccccacctccccctcagagcacgttcctcccccttcaccctgtatccacccctccggaccctccccatctcagtccctccgctccctctctctgaggcccatctcccaatacccagatcactttccttccagacccttccctcagtgtgcacggaggcagcttgcccagcaaaggtgactgtctagtgggcttcccacagccaagctcccaccccatgctgcggcccttcccttcttcctgcttggctgcctgtgccccccacctgcctgtccacaacccagcctctggtacatccatgccctctgccctcagcctcacctgcacttttccttggatttcagagtctccaaaggcacaggcctcctcagtgcccactgcacaaccccaagcagagggcagcctcgccaaggcaaccacagccccagccaccacccgtaacacaggtgagaagccccttccctgcacactccacccccacccacctgctcattcctcagccgcctcctccaggcagcccttcataactccttgtctgagtctccaagtcacactttggtaaggagagggacactgaacggacctctaacaaacacctactgccagccagccccagtctgggggccagcagatgccaaacagccagcagactcccagagcagacctgggccggctccctggcccatggacccagctctgcctcgctgagctgaggcatgggctctcagcgcagcctcacatagagccaccctgccgaggcagtccggcttgcagactcacaggtcacttgggccgcagcagcccctccccgtgaccctcgcctcccgcccgccccagcctggctctctccaagtgttggatcttggtggccagcctgcttctcaccctcaccctgcctgccacctcagaatggcaggggaaagagggccctcaccaagaactttatctgaggagtctgaggcttgtgactctgacctgcctgagatgtccatgtggccggggggacgggttcagtgttcgggagaactcgggtacgtgcctgactttctctgagtagggcaggaagctgttaggagaagcagcagtgaggtgggctggaccaacaggcagaatgactgtccctcagccaccctctgggatgtgggtcaagctctgacaaaggcatggcacagccatggtggcccctgcttggatgagtggccacggtgccctcaccctgggccagaatctgcctccactctgcaggtgcagaaacacgacattcccgtctctaaacacacctagctcctaggcttggggtgggcctatcaaatgcagggagatggacacagcacaagggccagagcttcccatgagaaaggtgagggcagctgctccctgacccgggcatctgcacttgtccctctccaccctcctcatgggcagtggagactcagcaacaaaacaagttgagtgcattagcagccagctctggagccaagtcactcaccccacggccttggctgctggtggaggggccttcccctgggcagcctccaagaagacggccaagtgctcttactcagaccacggcgctgcttcctggcacctcgatttcccacaacaacatggggtgcagacaggctagggccccctgccctggggcctggacggcatccagttaaagatgacccttcacgggcggtgcctgaggtgtgctgacctcagcagctaagccctcaggtctggtctgcactgccccacctggaggacccaactgacccagacacagccagggttatggcatgaccccgtggacggtgacccacaggccagatgcagccaggggctgttttgtgtggcctagaaatgtctttacagttgtagtgggatggaggaggaagaggaagagaggaggggagagaaaagcagggaaggggaaaaagaggagttcaatgcaaccccaaaagccagaacagttttgagctgaaagaacaaggcaggaaacatcccagtacctgacttcaaaacatactataaagcagttgtaatcaaaacaggatcataaaaacagacacacagacccatggaacagaaaagcgagcccagaaataaatctacatgcttgcagtccattgattttcaacaaaggcaccaggaaaacacaatggggagaggacagtttcctcaataaatagtgctggggaaactggatatccatgtgcagactaatgaaactacacaaaaatcaattgaaaacagtctaggccaggcgcggtggctcatgccggtaatcccagcactttgggaggccgagacaggcggatcacctgaggtcaggagttcgagaccagcttggccaacatggcgaaacccggtctccactaaaaatacaaaaattagcacatggtggcctacgtctgttatcccagcttttcaggaggctgaggcaggagaatcgcttgaatccgggaggtgaaggttgcagggagccaagattgcgccactgcattccagcctgggcaatggagcgagactgtctcaaaaaaaaaaaaaaaaagaaaagaaaacagtctaaaggtttaactgaacagataaagctactagaagaaaacatagggggaaaactccatgacattagtctgagcaacgatttttggatatgatcccaaaagctcaggcagcactagtcacaaaagccaagatacagaaccaacctaagcacccctcagcagatgcacaggtaaagaaaatgtggtacgtatggggcacaatggaatacgattcagcctttaaaaacagtgaaattctgtcattggcaacaatgtagatgaacctgaaggacacttatgctaagtgaaataagccaggcacagaaggagcaatactgcatgattgcacttacatctggcaggttaaaaaggcaaactcttagaggcagacagtagagaggtggtgccagggagcgggcactggtggctggggagatgttggtcaaagggcacaaaactgcagttgggaggaattagttcaggacatcccttgtacatggggacagtggttagtaacaacggattgtatccttgaaaaccgctaagaaaatagtttttaagtgttcttgacacaaaaagtgacacgtatgtgagatactgcatggtcattagctggatttagccattccacaatgtacacatatttcaaacattgtgttgtatatgataaacatgtataatttttgtcaattaaaaatttttaggaagaggaggagaagagaagaagaaggagaaggagaaagaggaacaagaagagagagagacaaagacaccaggttttttctgacccctgggctatcaaaacacctattgcccaataactagttggccgttggtgccctaaactattgaagcgattgctgttatgtggatgggccccggacacttagaaactcgtgacccctgaggacccccacgaggacagtcagggtccccccgaactcagggagcactgaggaaggagctcttagaggcgtggggcccctcaggcccctcagagggctctgccacatgggtcaggggcaggctgagggggagtcccaggctccatgcccagcctctgtgcctctgaccagggtgtcccccacaccgcctcctccccagtgccctccactggccacacctggccagaagctggggagaggagagcacagtggttaagtcagtccctgcagggagacggcaccagaaaaacctggcctgtggatgagtcccggcctggcagccacagagcagagagctctagaagcaacgaaggcccgagtctgctcagggaagagcgggcagcagccccagggccggacagtgaccaagagtggcaccgcccatggctcaacgggtctttgcccacagatcccccagcccctggagacagggtctgtgtgcctggccgtgcaggcaggcaccacactcagggggaggccactgtggagctctgtgcagagccccgggcgggagcctactgctcccgaaggtccggccacagctgctctcgtttgctctcccctgcagagtgtccgagccacacccagcctcttggcgtctacctgctaacccctgcagtgcaggacctgtggctccgggacaaagccaccttcacctgcttcgtggtgggcagtgacctgaaggatgctcacctgacctgggaggtggccgggaaggtccccacagggggcgtggaggaagggctgctggagcggcacagcaacggctcccagagccagcacagccgtctgaccctgcccaggtccttgtggaacgcggggacctccgtcacctgcacactgaaccatcccagcctcccaccccagaggttgatggcgctgagagaacccggtgagcctggctcccaggtggggagacgagggtgcccacagcctgctgacccctacgcctgccccagggccatgaccccagctgggccccagcagcaccggtcatcctccacaggaaaggagaagggaggcaccagcaccctggccggccccacttctctcccagtgcccccgtggccagaggctgacagcctcccccacctccccgcagctgcgcaggcacccgtcaagctttccctgaacctgctggcctcgtctgaccctcccgaggcggcctcgtggctcctgtgtgaggtgtctggcttctcgccccccaacatcctcctgatgtggctggaggaccagcgtgaggtgaacacttctgggtttgcccccgcacgcccccctccacagcccgggagcaccacgttctgggcctggagtgtgctgcgtgtcccagccccgcccagccctcagccagccacctacacgtgtgtggtcagccacgaggactcccggactctgctcaacgccagccggagcctagaagtcagctgtgagtcacccccaggcccagggttgggacggggactctgaggggggccataaggagctggaatccatactaggcaggggtgggcactgggcaggggcggggctaggctgtcctgggcacacaggccccttctcggtgtccggcaggagcacagacttcccagtactcctgggccatggatgtcccagcgtccatccttgctgtccacaccacgtgctggcccaggctggctggcacagtgtaagaggtggatacaacccctcgccgtgccctgaggagtggcggtttcctcccaagacattccccacggctgggtgctgggcacaggccttccctggtgtgaccgtgaatgtggtcaccctgaacagctgccctctctggggacatctgactgtccaagaccacagtcagcacctctgggagccagaggggtctccagagacccccagatgtcaggcttgggctcagtgcccagcgaaaggtcagccccacacatgcccataatgggcgcccacccagagtgacagcccccagcctcctgccaggcccacccttttccgcccccttgaggcatggcacacagaccagtgcgcccactgcccgagcatggccccagtgggatgtggtggccacgaggggctgtacacacagcaggaggctgtccgccctgctcagggcctgctgcctatgccccagctgtccaaccaagggaggcatggaagggcccctggtgtaagctggagccaggcacccaggcccccggccaccctgcagagccaaggaaaggaagacacccaagtcaacaaggggcagggctgagggctgtcccaggctcttttggcccgaggggctgccagcagccctgacccggcatgggccttccccaaaagcgaccctgtgaggtggcctcacagagaaccccctctgaggacagtgtctgaccctgcctgcctcacacagatgggccccacagcagtgggcaacctggggggcagcagcccaacctgaccctgcagggactgccccctgcagcagcagctgcttctcagtcccccaacctccctgtccccgccagagggtcttccccgaagctgcagccccaacccatggctgcccacctggaaccgggactccctgtccactgccccctccccttcggggccccatctgtgctggggcccaggttcggcctacagattcccatcattgccatggcctcctgaccttgcctatccacccccaaccaccggctccatgctgaccctcccccaggctcccacgcccagctggccggccatccccaggcacagacagtctgggatctcacaggttagcctggaccatccacctggccagacctgggagaggctggaagctgccctgccaccatgctccagggccccaggttgcagtactatggggtgagggtgtgtgtgcacacctgtgtgtacctaggatatccgagtgtacccttgtgcccccaagcacaagtctccctcccaggcagtgaggcccagatggtgcagtggttagagctgaggcttatcccacagagaaccctggcgccttggtcaaggaagcccctatgcctttcttgcctcgatttcccctcttgtctgctgagccagcaggggccacgtcctgggctgctgtgaggaggaagcaagttggtgctaggaggggctcctgtgtgtgcatgggcgggaggggtgcaggtatctgagcaccccggtctccacttgagagagcagggcaggagctccctgacccacccagactacacacgctgtgtccacgtgtctcccattatctgtggcagaggatccggcttctttctcaatttccagttcttcacaaagcaatgcctttgtaaaatgcaataagaaatactagaaaaatgatatgaacagaaagacacgccgattttttgttattagatgtaacagaccatggccccatgaaatgatcccggaccagatccgtccacacccgccactcagcagctctggccgagctcacagtacaaccacaataaactcttgttgaatgaactctaggaagtctgtgacgtggctggttcttgtcaatgcttcctgcctgcccacaggctcttcctcgtggatggggctgtgcttgccacggaagcgcgtttttcccggcctaggcttgccttgggccccactgccgtctccagctggagatgaccttctatacacacatttgctcatgacagacccttgcttagcccccttccatggctccctcctgctgctgggataaaatcaccttgcctggatatcccctcctgggcccctttccaccctccttagtcagcacccccagttcagggcacctgctttccccgctgcggagaagccactctctccttgctgcccggctgtgtcttgccttccacaccttgtcacagtggccacttcctaaggaaggcctccctgtgtgcaggtgtgcagaagtgccccagcctcccgtcacctttgtcacgggagcccaatccatgagagtctatggttctgtctgtctgccccactcagggcagcgacaagtccaggcggggaggacacagtaggcagagatttgtcgaggggacatatgagcaagagggtgaggctgggagctccctggagataaccacgcctcctgggaagactcgccgtcatttcagctccacgctgtgcgggggtgggtggaggggtagcctggccctcatgaccagggagcttctcactcagcccctgttcctccccagacctggccatgacccccctgatccctcagagcaaggatgagaacagcgatgactacacgacctttgatgatgtgggcagcctgtggaccgccctgtccacgtttgtggccctcttcatcctcaccctcctctacagcggcattgtcactttcatcaaggtcaggggagcggccaggctctcagtgaccctcggggtgggtgtggggcaaggtgcccttccaggggacatgccagagctggtccagggatcctggaccaggcagaggcagggctgagggagcctggaggacatgcaggccctctgtggcctgtggacactgtcgaaggccctcttgaccctgtggataaaggacaacaccccctcccctgctcctctgtctcccctgcccctccacccctcaggcttctagccccctgtctgaccccaggggctgtctttcaggtgaagtagccccagaagagcaggacgccctgtacctgcagagaagggaagcagcctctgtacctcatctgtggctaccagagagcagaaaggacccaccctggactcttctgtgtgcaggaagatgcgccagcccctgcccccggctcccctctgtccgccacagaatccagtcttctagaccagggggacgggcacccatcactccgcaggcgaatcagagcccccctgccccggccctaacccctgtgcctccttcccgtgcttcccccagagccagctacacccctgccccggccctaacccccatgcctccttcctgtgcttcccccagagccagctagtcccacctgcagcccgctggcctccccataaacacgctttggttcatttcacctgcctcctgttctttgtcccagtggtctggattcacctcaagttaaaggacacagggagctaacggcaacggggagggagtttggggtgtcagcagcaacagggaacgcaatagccaaagctgtcacagcaagaactgagcggagaccttgctctgaagttcatgggttaagaaacgcccctccccacaccaaacacaaacatttcacgctcactcgtacatgcacacacatgcacacaagcatctatgcacacatgcacatgtgcacagctcacgaataaacatatatgcacacacatgcagtacactcacatgcaaacaggcagatgcacaggcatgggcacacatgcacaaggcatgcatgtgcaggtctgcagacacacacatctgcatgcacatacacggacgtgcacctgcacacacacaagtgcacataggcatcaaagacacacatgctcgtgcacgcgcatacacacagacatgcacacttatgcatgcacacgccatgacaggatggcacgggaacaaccttgcacatggagcctgttctgtgtgtatcgagagcctgcacctcttactgtctgcatgactgtgggcaagagcctgaactccgtacctccatttcctcatcagaatggggtgaaaatacacctgtcaagtagagtgaggtgagaagtgagtaaaatcctatctgaaaggggctcagcaaggacccaggtattggtcggacctcctgttatcatctgctgtgggctgaacatttgtgtcctcctgaaattcatacattcgtatattcatacctttccccctgaaatcctaacctccaatgtaatggtattagaagatggggcttttgggggtgctgaggtcataaaaggggggccctcatgaagaggattagcacccttatgagaggggccccagagagctccctcaccctttctcccctgtgaggagatgccgtctatgagctgggatgcaggcctcaccagacacccatctgctggagccttggtctgggacattcagcctccagaatggtgggaaataagtttctgttgtttctcagccaccacgtctgtagtatgtggaagtcatcagaatcaaaattgagtcacctgtggttttttttttttctaaatccctgacaaatagagcctaggaaggccaagaagagaagagggttctcatccataaacacttgataacaaaaactatcaccaaggactctacaaaaactgcaactggcacaaagaccatcacaaccttacacagaaagtacttctgtgaggacatcttcccagcaacgggctgtccaacctcagactggcattgcctttgttattggtccttgtagagagggtaattatctcaaagcaatcatgtaatcctcctcatttttcctttgaaagccttggtctccctttgcctccctgaatacgcacatagctgatcatggcaggtgtatcccactgcagtgctctacctccaaatagatatctttttcttttagacggcatttctcttgttatttagattgagatacatggagtcagaagtgggatgtggagaaggatcactgctggaaggagtcagtaattcttgggccggtgtgcagtattcacttgagccctttgagctctcagctttttctgagctactccgtcttctctcaggccaaccctccctctttttggaagatgcttttttaatattatgtggggtttgtttattagactgccttaataaaggaccttatgtccctcctgggatgataaaaggcttttcgtgctttctggcaagtcctgtttagcataaagacattccagcctgagtactctggtttccacagagtttgcattctgtctctgagggatgtcttctctggtgaggtgcctcctttaatactttgttggatatgcatgcctgggtgaacatatttgtgagcacccttatcttgccttcttttgctgtggttatgtgtatctgtaaatgacctggctcttttcctctgcttgcttctaaaaatctttggagagcaaaataaacattctaaatggtgggcacaggctgtctcattagaagctgctacagcagtcaccaccgtctaaagcaccagtccaaactgccggcgtggcctcatagtatctgtagaatgttctttactgtaaaaagattaataagaagggggatggtttttaaatattaaggcacagtaagttttctggaactcccgctggctacgtctttgtgcacatttttaaactaatgggcaaattacgtcaaggaaaatttagagttccaatggttatttttcgaactctaacaaaaaccctgcaacagtagtcatcatgcagtgcctcctaagtcctctatctctctattttgtttttctgcctactttaaatctgctgacttttttactcatgttgcaataaaactcactggttacagcattccagccaagatatttttggttttttgtttgtttgttttttgttttttgtttttttagatggagtctcgctctgtcacccaggctggaatgcagtggcgctatcttgggtcgctgcaacctctgcctctcgggttcaagtgattctcctgcctcagcctcctgagtagctgattacaggtgcccgccaccatgcccagctaatttttgtattttagtagagacaggctttcactgtgttggccaagctcgtcttgaactcctgacctcaagtgatccacctgccttggcctcccaaagtgctaaaactataggcgtgtgccaccgtgcctggcccaagattttttaaagtttcctaaaggttttaaattagtggctttacaaattacaacagctctatggtaaccaatgacctagatgtaagagtcatttcttttgaaaatgtagattagctttgcttggctaacaactgcttaggctgatggaatagctaactgaaggactgatggtctcaaagaacagaactaggtaaatatttacagaaattgggctttcagatcgaacaggccaaaatcttgagcttagagcagtaatataaggtatctctgtctgccataaaaattttgctttgccacaggtgccagaaaaaggaaaaacactgctaaatgcttccctgcatgcattgtctagtccagaaaatcagaccagcaaccaaaaaatagatttgttactagtatagacgagttgaagattttgtttttcatatacaattcagccagtcctagctaaaacgcaatcactggaaatttaaccttaaattcatttaaaactgaaaaaggtcttttgaaatcaaactaatgcagaaactgctttacccaaaattctgatccatggccctcattagacgacccatcaggacaaataaagtttagcttgtgaacaagtcccagttttgtcaaaaatataatttggattgaagtgtcttttagaaactgacacatttgtgttattatctcatgaccaaaattctaaaatgaaagctacagtgtctttatttgtgtgcgtatgtggttaagtgtgtttatgcatatgtatgtgtattatgttgtatgttgttatctacatggtaaaatctggcatcatcaacaaaaaatctattaagggattctatttagattggcttagataaataagcattcataaaaaatatgtactaattaacccaaatgccttttagttcatgtgacttaggtatatctttaataaacaaatcagttttaaaattgttggtaaaataaaaatacaaatgttctcagaattgtcagcatatatttttccctgagtttactcgtcagacagctttatatttgtctctgatagatgttttaagatgtcagggtttgacacaaagatgataaaactataaacccatcctaaaacagaataatctttgtatgatctttgataaataagactaatttggctgagtgcagtggttcatgcctgtaattccagcactttgggaggccaaggtgggcagatgactagaggtcaggactttgagaccagcctggccaacacagcaaaaccccatccctactaaaagtacaaaattagccaggtgtggtggtgggcataatcccagctacttgggagcctgaggcaggaaagtcactggaacccgggaggcagaggttgcaatgagccaagagagcgccactgcactccagcctaggcaacagcgagactccatctcaaaaaaaaaaaaaaaggctaatttaatattgcaggcttaataaaaacagctgtatcttatgagctatcgacaaaatacccatacacttcactaagtttcttactaagtgaacatctaataatcacaggctataaaaatggttaaaagggaaataactttaagtaatggctagctttgtctaatatctcaattttcataagtaatctaggtaaattattaaaaataaattaattaagcctggtgtcatggcacacgcctatagtcctagctactcaggaggctgaggtgggaggattgcttgagcccggaagttcagaccaccctgagcgatgcaacaagacccccatcactaaaataaataaataaataagataaatgtcaagaaaataaatgtttataaataagcttcttatgtaatttaagatcttaaaattatgttatcttcagttaaataatagatactcattaaatgtctgggtcatttccaaataagatttttaaaactaacacaaattactgaacataaatgtttgttcttggcttcttaaattttatagaaattttgtagaaagactaaatttatttgggtctattaatatatgtaaaaattatgtcatagaaatatgttttcaaaaattataaaatttttctcatctataaaatagtgatatgtgacaaatggttaaaatttgcttgctagaaaataaggttactaagagttaaaattctaattaatatatataattctgtctacaaagtataccacaaaaaataagatgtgtttttcatttttaaaaactataagacaggcatttataatttattttactgcaaaaaaaaatttatctaatttggagtttgtttaaaggttgtttcaaagcacagatttaggaaaaaagtaaaaacaagatggaaaagaaccactctcatctgcccccacgtaagacgtacctgctccccttccaccacgactgtgtttcccaaggcctctccagccatgtggaactgaatttaatctacaaatagagttgatcaagtaactttaaggtatatggacaataatatgctttgcagcataaagacctgaaaacaaactaaatgcccatcagtgggaaattgtttcaataaaccacagaacattccgtggaaaactccacagccattcaaaagaatgaagggggagagatcatcatggtggacaggagtcaggactagattgcagtccgactgggatggacagagcacatgtggaggctggcaccgtgaattttagctccagaacaactgcaggaataaatcaggaatcccaagaggatccacagaccatgtgaaggaagcagcctgctcctgcaggacccagagacaccccaaatactgtgagtgcccaaactgtggaagtgggaatgggagatcgtccatcctgcacacacaccctcactagagaaaccaaaggtctagttggtgggaaaaggttccaaccttacctggagctgagtcaatttagaaagctgagcgaaatacaggggtacagggagcagcgggaaaggccctgggagcttcctgggtccccaggcaggccattcctgcatggcaccatatgaatactttgggagggtggccagaggcacagggaaaatgtcacagggagaaggaagtctccagctgaacgcaggggagggcacgaatcctgcagaccccactggtagaggaacaaccaaagcccttcttcatagctgggaagtaggtagcctggggcaagttctctgcttgcccaatgcctggaaacagactcagtgctgttggcgaggggcatggtgtgagtgagacccaccttcagtttgcatgggagctgggtgacacctgtgactgccggctttccccacttccctgacaacctgcatgactcagcagaggcagtcataatcctcctaggttcacaactccattgacctgggaacctcacagccatcccccccagcagctgcagcaagaactgtccaaggagactctgtgagctcagacacacctagccctgcccgcatctgatggtccttccctacccccccttgtagttgaagacagagggcatatactcttgggagttctagggccctacccactgctggttcctctccatactaccaccactgatgctctctggaaaacgccatctcctggcaggaggccaaccagcacaaaaacagagcattaaaccaccaaagctaagaaccttcatggagtccatttcaccgccccaccacctccactgggacagttgctggtatgcacggcggagaaacccacagacagttcacatcacaggactctgtgcagacaacccccagtacaagcctggagcctggtagacttgctgggtggctagatccagaagagaaataacaatcaccacagctcggctctcaggaagccacatccacaggaaaagggggagagtgctacatcaagggaacaccccgtgggacaaaggaatctgagcaacagccttcagccccagaccttccctcagacagagcctactcaaatgagaaggaaccagaaaaccagctctggtaatatgacaaaacaaagctctttaacacccccaaaaaatcgcactagctcaccagcaatggatccaaaccaagaagaaatccctgatttacctgaaaaagaattcaggaggttggttattaagctaatcatggaggcaccagagaaaggcaaagcccgatgcaaggaaatccaaaaaaagatacaagaagtgaagggagaaatgttcaaggaaatagatagcataaagaaaaacaataaaaacttcaggaaacattggacacacttatagaaatgcaaaatgctctggaaagtctcagcaacagaactgaataagtagaagaaagaaattcagagctcgaagacaaggtctttgaattaacccaatccaacaaagacaaagaaaaaagaataagaaaatatgagcaaagcctccaagaagtctaggattatgttaaatgaacaaacctaagataattggtgtccctgaggacgaagagaaatctaaaagtttggaaaacatgtttgggggaacaattgagggaagcttccccagccttgccagagacatagacatctaaatacaagaggcacaaagaacacctgggaaattcatcacaaaaagatctttaaaactaaaactaaaacaagcaatctacaaaacctaggcacattgtcatctggttatctaaagttaagatgaaggaaagaatcttaagagctgtgagacaaaagcaccacatgcttagtttcactggatacaaaattcttggctgataattgttctgttggaggaggatgaagatagggctccaatctcttctagcttgtagtgtttctgctgagaaatctgctgttaatctgataggttttcgtttataggttacctggtgctttcggttcaaaaatttttttaatttccatcttgatttcgtttttgacccaataatcattcaagagcagtttatttaatttccatgtatttgcatggttttgaaggttccttttggagttgatttccagttttattccactgtggtctgagagagtgcttgatataatttcaattttcttaaatttattgaggcttgctttgtggcctatcatacggtctgtcttggagaatgttccatacgccgttgaatagaatgtgaccatatgataggaaataaactccaaaagaagccgaacaacaacagtgacacaacctgttgaaacctctgggatacagcaaaggcggtgccaagaggaaagttcacacccctaggcgcctacgtcaaaaagactgaaaaagcacaaattgacattctaaggtcacccctcagggaaccagagaaacaagaacaaaccaaatccaaacccagcagaagaaaggaattaatcaagatcagagcaaaactaaaggaaattgagacaaaaaaatacaaaagataaatgaaacaaaaagctggttctctgaaaagataaataaaattgatagaccattagcaagattaaccaagaaaagaagaaagtcccaataacctcaataggaaacgaaatgggaaatattacaactgacaccacagaaatacaaaagatcattcaaggctactatgaacgcctttacacacattaactagaaaacctagaagagatggataaattctcaggaaaatacaaccctcctagcttaaatcaggaagaattatataccctgaagagaccaataacaagcagcgagattgaaatggtaattttaaaattaccaagaacaaaaaaaagtccaggaccagattcacagtagaattctaccagacattcaaagaagaattggtcctattggtactattccacaagacagagaaagcgggaagcctccctaattcattctatgaagccagcatcaccctaataccaaaaccgggaaaggacgtaaccaaaaaagaaaactacagaccgatatccctgatgaagatagatgccagaaatccttaacaaaatgctagctaaccaagtccaacaacatatcaaaaagataatccaccccaatcaagtgggtttcataccagagatgcagggatggtttaacatacgcaagtcagttaatgtgatacaccacataaacagaattaaaaacaaaaatcacatgatcatctcaatagatgcagaaacagcatttgacaaaatccagcatcgctttatgattaaaactctcagcaaatcagcataccaagggacatacctcagtgtagaaaaagccatccatgacaacataattctgaatggggaaaagttgaaagcattccctctgagaattgaaacaagacaaggatgcccactgtcaccactcctcttcaacacagtattggaagtcctagccagagcaatcagacaagggaaagaaataaagggcatccatatcgataaagagaaagtcaaactgtcactactgatgatatgattgtttacctggaaaaccctaaagactcctccagaaagctcctaggactgaaaaaaaaattcagcaaagtttccagatagaagattaatgtacacaaatcagtagctactctatacaccaacagtaattaagcagagaatcaaatcaagaactcaaccccttttacaatagctgcaaaaaataaaataaaatacttagaaatataccttaccaaggaagggaaagacctctacaaggaaaactacaaaacgctgctgaaagaaatcatagatgacacaaacaaatggaaacacataccacgctcatggatgggtagaatcaatattgtgaaaattaccacactgccaaaagcaatctacaaattcaatgcaatccccatcaaaataccatcatcattcttcacagaattagaaaaagcaattctaaaattcatatggaggccaggcatggtggctcatgcctgtaatcctagcactttgggaggccaaggcagtaggatcacttgaggtcaggagttcaagaccagcctggccaacatggtgaaaccccatctctactaaaaatacaaaaactagccgggtgtggtggcatgtgcctgtaattccagctactactcaggaggctgaggcaggagaatcacttgaacctggaaggtttgcagtgagcccagattgtgccattgtactccagcctgggcaaaagaatgagaatctgtcacaaaaaaaaattcatatgaaaccaaaaaagagcctacatagccaaggcaagactaagcaaaaagaacaaatctggaggcaacacacggcctgattccaaactctactataaggccatagtcaccaaaacagcatggtactggtataaaaataggcacatagaccaatgtaacagaatagagaacccagaaataaacccaagtacttacagccaactgatctttgacaaagcaaacaaaaacgtaaagtggggaaaggacaccctattcaacaaatggtgctgggataactggcaagccacgtgtaggagaatgaaactggatcttcatctctcatcttatacaaaaatcaactcaagatggatcaaagacttaaatctaagacctgaaactgtaaaaattctagaaactataaaaatttccaataacattggaaaaacccttccaggcattggcttaggcgaggacttcatgaccagaacccaaaagcaaatgcaataaaaacaaagataaatagctgggacataattaagctaaagagcttctgcacagcaaaaggaacagtcagcagagtaaacagacaacccacagagtgagagaaaatcttcacaatctgtacatctgacaaaggactaatatccagaatctacaacaaactcaaacaaatcagcaagaaaaaaacagacaatcccatcaaaaagtggggtaaggacatgaatagacaattctcaaaagaagatatgcaaatggccaacaaatatatgaaaaaatgctcaacatcactaatgattagggaaatgcaaatcaaaaccacaatgcgataccaccttacccctgcaagaatggccataatcaaaaaatcaaaaaacattagatgttggtgtggatgcagtgatcaggggacacttctacactgctggtgggaatgtaaactagtacagccgctatggaaaacagtgcagagattccttaaaggactaaaagtagaactactatttgatcctgcaatcccactactgggtatctacccagaggaaaagacgtcattctacgaaaaagatacttgcacactcatgtttgtagcagtacaattttcaactgcaaacttgtggaaccaacccaaatgcccatcaatcaacaagtggataaaggaactgtagtatgtatatgtgatggaatactactcagccacaaaaaggaatgaattaatagcattcacagcgacctggatgaggctggaggctattattctaagtgaagtaactcaggaatggaaaaccaaacatcgtatgttctcactgacatgtgagagctaagatatgaggatgcaaaggcataagaatgatacaatagactttgggaacttgggggtgagggtgagagaggaaagagggagaaaagactacaaatatggtgcagcatatgctgctcgggtgatgggtgcaccaaaatctcacaaatcaccactaaagaacttattcatgtaaccaaacaccacctgtattccaataacctatggaaaaataaacattaaaaaaattaagaagactgaaagaattaaaaaatttaaaaaacagtaagtagaagagaggtatttgaaggaagttatgggtatgaagatgtatttttggtacggaaggttaaaaagaaaagagaatttttttaaaaaaggaagaatcttgcgtgataaatttttgtcataaagtaaaatgactgcttactttaaaaaaagaggtatcacacacaccagggcctgttgtggggtggggagaggggggagggataggattaggagatatacgtaatgtaaatgacgagttaatgggtgcagcacaccaacatggcacatgtatacatatgtaacaaacctgcacgttgtgcacatgtaccctagaacttagagtataataaatatatatatatataaagaaaattccacacctgaagccatgtgacaggctacagacaaaacacagttaaaactttgtttcatgtacaaagttatttaaaatattgtacaaaatcaccttcaggctgtctgtataaggtgtacatgaaatacaaatgaattttgtgtttagacttgggtctatccaagatatctcattatatatatgcaaatatcccaaaatccaaaaaatataaaatctgaaacacttctggtcccaagcatttcagacaggggatcgttagcctgtaatgagagggagtatgggtcaattatgacgttgaagattcaaaaaaaatttttttttaattttcagtcaagctctaccaactacactaactagaaaacactcaggcagattgctttttgctaggttaatatggcatgattacaactgtgcatatgaataacatgtatcagattccttttgtttgggaattatttcattacaacactaaacactgcttatgtacgctgggtctctttttcaaagactacaaataatgcttggttctttgctttcaaaatataccaaacatgaggtacaagaatgtacccatccatatttgaccaggggtagaattaaaaggtttgggttgaagaagatgacataacatcccaagagggttgcatccctaggggtcatgggaacaaatgtggccaagtccctttttaactggaaaggatttcagatccctgaacaagacaattcatcagtcttaagcgtagtaagtcatcagcaaataagagaatgataaacactagaaaaataatcaaatcattgtctaaattcattataaaactatatgagaaaactataaaactatatgagagagataaacagagacaagaagacaaggataaaataaaaaaagaggtatcaaacaaagcagaacgcctcaacatgtcataaaacatctgagtaagtcataataaggtttgcaaataatgaatttacgaaaggaattttgcgtgtgatcaagatggctataattagaagggaattatttataagtctttctaaagactgaggtttgctattaaaaatatgctaatataaaactaaagatttagtttcctgtgttagaacaacaaagttatcttgaagtattgatctgttcttaaaactacaagaagtttttatttttaattctaaaatctgtttctttaacagaccatttctattgcttcctgggatccatttactttccctagtttcaggttggaagtcctcttcatgtaaaacgagaatttcatttcttgacatagtcttttccccctaaagcttctcagttttagatttcagaacttcaacttctgttgtatttcacagcacatgatttatagatcatgtatataaatatggatttatagatcatgtatataaatacagacttatccatcagtgccttcagctcttcctccccatgagatggcctggggtgatagctctctctttcaactttttttttatcaactcctataacattttttctcccattacaactctgttgttatggctcgatgctgaaatgtttatcccgaaagtctagaaaacaaatgttctctccagtataattccagtataattgaattttcccttgtaaccaggaagtttctcatgctgttgctttttctatgtgttcccctgctcaggtactagttatcttgtttacatttctctactaatggtttacacttatagccttggacatactctttctctgcctaattaaactcagtgtctttttcatcagatttgacttccagtttatctacatgggcttcccaagaggagacacaatcacactgcaggaggcatttctttaacttttgggtaagtagcctaaaaaaaacaaagattttgtattttattaggataattttttgtgttgtctttatgaggtttttggttacttaggtaacttgagctttgaagaagttaggtccttttaatccatgtaactttccgtattactcttcaagtcttttgatgatcactggttgaatacatggctatatttaatagtgacctgagattctgctttgattagccatgttgaacctttgacatctttggcaggcttcctcaggatcaaaattctaaaataagtctttttttatctagaattgacttagggattttacagttagacccctggaaagcctcaaagaatttatctctcatcctatagagaaaataaatgattaggcttatttggtaaattatatgggaaacattgtcaaataataagtgatattagatcttctttcagttacatttgtgggtatgctattgatatgatgtttcaaagattatataaattcatatcagtctataacgttatcagccataattttggttatgctacatcttctttaaagctatatttgtatggagacgttactgatgtgagtatattctaaagattatgtgaaatttataaaaccctgatggttctgatgtgatgctatcagtcacagtcatgattctgtttgctaccttaaaacactatagtaatttttaaaaagtcaatttccttatcaattgctgattataatgaatttttatcagatgtttaaccatggccattttgtttttgtgacccagagttattgttttgatttttctccaaaagcatttgtaatcagctattgtccaaaattgcttttcatggaagagactcaaacaggaactcttaaatacggtttcccgataaaagatcaatggactcaataaaaaattttcagaactctaataaagaaactgagaaattcaaaaacctccaatcaagctcaagcagaaaagctgacttcatgatattgaagaagtgatgaggggaatatttttatgaattttatttgaagcatcgttcgttcttaaatgttttgtttgccagatttaaggaaattttctctcgtaagtcatctatagtttacagtaatttaatacagtatactttttgtgaacaaagatgaaagcaattattttcccccctacgtgactcctccaaaatttagaaactattcacaagtgttcttatgacgatgtggccatttgtataagtccagataaaaactagttgtctcctcactgcaggatgtaattggaaacatcaggtatattactaaggctttggctgaaataccatatttgaaaaatatacatagaatgcctagtttcagccgggcggggtggctcacccctgtaatcgcagcactttggaaggccaagccaggcggatcacccgaggtcaggagttcgagaccagcctggccaacatggcaaaaccccatctcaatcccgtctctactaaaaatacaaaaattagccaggtgtggtggtgggcacctataatcccagctgctcgggagactcaggcaggagactcttttgaacatggaaggcagaggttgcagtgtgccaagatcacgccactgcactccagcctcggcaacaaagtgagactccgtctcaaaaaaagaaaaaagaatgcctggtttccagggttccttataatgagtaaaaatcatcacttcctggcaagcccagaaaccttaaaactgtaagtaaaagctaaagcctgtcttggtttggcttaccagcataaagaggtattgaagtacgagattcctatgtgatcaatgtacagaggaaaacttatgcttccaaagaaaagctgtaacacacctgcttttagattgtagctctgtgcattattttcaagttcttgttttctacctatagactagatcctgaattcttctagattattccaatccaactttcttccatggagaaaaatgagaactgctctgttcctgaagccctataagctgaagctagataaatgctaagaaacaagtctcatgcttgatgtccgagccagacagaaagttcaccagactgcccaatgccacgactagagacattcaaactgcaaagcaagatgaggaatttcacattttcactctgtagacagcttctcccaagtcatgggaacaagactccatatcataatgggactcttacctgtcctagggcctacagtttttacttagcttcctattttatttattcaattaattgccttgaatcctggattcattatttattcaattaattgcctttaatcctagacattgcataatcctattatgcaaactaggattgtcatgttattactaattttactttttattttccctttttaaactttgtatctgttacttgctgaattttttcagaagtacaacttctaacagaataatgctagcccagcactttgagataatagcaaaagaccacaccacagacaaaattgaacttaatcatttactccaggtagacttagcctgaaagccactgtcttcaaacctcctttgttactcaaatgtggctaaaaggattttgacactgactcctagacatcaatcactccttcaaacatgtgaccagaccagacacctgggacaggcccatccaaatactgagggacatcagaacctaccacagcatggtccatcagtgaggcttccagagaaagaccttgaccaaagggagaaaatatgatgaaagtcgtcagaatcaaaatggagtcccttgtgttaaaaaacaaacaaacaaacgaaactctgacatataaagccagagaaggctgagaagcattctcatgcataaacacctactagcaaaaactatcacaaaagactataaaaaacacagccttgcacaaaggccattgcaaccttacacaaaaaaatacttctgtgaggacagctgcccagcaactgcctgtgcgcctcatactggcatcacccttgttattgatccttgtagccaaagattatttcaaaacgatcatgtaatcgtcctcatttttcctttaaaaacctttgtcgtcttttacctccctgaatatacacatagtttatgatggtacgtgtgctcccactgcagtgcttggggaccaagctccctccacacctcactgttcccaaataaatattttctgttagagcctctctctgttcattatttagctcgacaggtatttggtacagcagccaaaacaggccaagacattgcccggaatcttccagcagtagactgggggcccggatttgaccctggtcagttggacacgggcttctctcactccaccagatgaggaacaaatagtgaggtgtggcgggagcttggtccccaaacagctcctccggccatttgccctccccacccacggaccagagacaggacgagggtgagccccggtgtcagccatgtgccccaaccccggtgcctcatttgctcctaggatgcgtcctgtaggtcatcttcttgcagctgtcccgctcagtctcccctcaacccctgctcatgctcttggtgagcttatcaatattatggtttccaatagcttctgttcatagtttcaactcatatctgtccctaagtgtggacttttattccacgcgttggcactggcagtcagctatgtgcctcctactcaaggcatctgaaactgcaggtgggtagttggctaagtcaggccccaaaagtgtcttcatccagattcccagaactgtgactctgagatcttacatggcaaaagggactttgcagatgagattaagccaatgatcttgagatgaggagaggggcctggattacttgggtggctccgaatgtgggcacaggtgtcacaggagggaggcagagggagacgtgagaaggagaaggtgccatgactccgaagccagaggctcctgctgatcctccggccccacccccaccccacggaccatgtggtctttttaaaacatgaatctatcaggacggcccattcaaacccacagagaggttcccactgcaccaagaacaaagtcagaactctcaggcctgacccactgccctcggccaccctggagccccagtgcccccagacccggtcctggcctcagagtgtaacaggctcgctcccaccacccatctgcatggcaggcgccttgccatcgcctcccctctgagagcacagacagccacagctggcctccgggtgaaaggatggatgaacagtcaggccgggcgagtgctctcagagcctgctggccaacggaggcagccgctcaggcctctgcctgagccatgtgcgatcacagctgctgcccagctgtcccaaggaggcagctcttggcttttcccctgggagtcgaattcgcagggagtcccatccacaggcccctgggaggcgggaagacatctcggtctccaaagccagtaacctgtgattcccctgaggatggtgggaacctggtgtggggcagatgatctgtatttgagctttgtttctctctagcaattatacctaggaaataccctaaaatgcacgacgcaatgcacattgaccccagcaaactccccaccctgcgcctgtttctagtgccggggctgctccagcacagcctgtgcacttgaccgaatgtctacagccctggccctcagccacactgtgttgttttcatgcaccttcacccaacagaattgctccaacagagtgattcagggggctgccctccagcaccacttcccctttccatgttacataaatgtccattgagtcctgactgactacagaaatctgtcttctgggggcatgtgatgccccaggtggcccagggccccgcacaggaatgtgtttacagctttcccggcactgaagccacagtcgtaactcagcctcctgacatgggccagggccctcgcctccgcacgctctgcagctcacccgtgtcgccacagcctgctgggcctggacgccaccctctgaggtggcactcggggcagaaacatctgtttccagctggtaacaaacaggacatgtctgcctcccacacctaaatcaatgcttgacaagcctggcctgatctcggggcgctcaccaccagccacctgcctgggcccagccgacctcctctcccttggtattttgagggaagggtctgagccctttctgcccccctagacttgtggacagaggccccccaagacctggacagaaatcaggccatagtctccagccccaaagagacttccagaggcctgcacctctcctctccagccgaggccctgatgtctgtggctgtggccacagccggctctatacctgccaagtttattctagaaaacattggtttggacaagacctcaaaacggaattgggaaaatgaaagagaaaagagaaaggatttctgctctcattgtaaggacaaaaagcaaattgaagaccagcactgatacagatcaataatcacaccagaaaaaaatatggcaaaatatctatattctcttaaggtgaataagtgttctctcagaatgaggctaaggccaggaacagtgaaaagtaagactgataaatttgcccacaaggaaaaaaataaagtctctataaggacaaagccaccaaaaacaaagtaagcaccccaggaaagaaagtgaccaaagtatctaacatgaaagagagcctgtattcgcatgagctcccgagaaacagaacccatagatgtggatgtggatatcgacagaaataggtatcaacatagacacaggctatggccacaggtatggatagagggagagatgcgagagagagattttaaggaattggctcacacagttgtggagacgaatgtccaaaatctgcagggcaaaccagcaggctggtgacccagagaagagctgaggctgctgctcccgtccaaagttcagcctgctggcagaattctgtcctccttggggactgccgtctgttttctcttaaggcctccaactgcctggatgaggcccacccacattatggatgatgatctgccttacccaaagtccacaggttgaaatgttaataacatctaaaaatcacctgcactatctagactggtgtttggccaaatatctgggtagtatggcctgcccaagttaacacctaaaattaactatcagagtccaagtaagtgaatgtaaaaaacaaacaaacaaaaaaaaaaaaacatgatgaatgagacaagctcgaccttgaagaagttttcagtggaacgtggggaagaggagttctctttagccagctgcagacacaaatagccaatagaacacatggagagtgttaaaagtcacaaatcgtcaatggaaagcaacttacaatgtgatgttcattgaacatctactgtgtgccaggccaagggctaaggtggacacgtgcagtgtgtctgcactgcggcactaaggtcctggtggggaatggataatacaattaaaaacaaatcacaaagaaaccagaagaggaaaaaaagcaattaaaaacaaataaatgctccataaaggacaacagcgccagctgagggtgtggccatcaatgccaggcatccagaatatgtccttggggacatggaccactgggaggtgcatcccaggcaaaaggagcaggaggggaagggtccaggccagaaacatgcttgccaagttcaagagcggtgggaaggccagtgggcttgggaaggagtgggctggaaggacaggccagaggccagactgcatggggccagactggccctgattccagccttggacttcactctgtggtgataggagaccctcagagggacttggggaggggttgtgtgttttcctgggagccacagaaaagtgagtgacactgggctgaggaaggaagtcacaggacccaccagtgtctgcgcaggagtcccagtggaagagcagaaaaaatccaggagaagatacaaaagtattcaaaagtaattcaaaatagcaaaaatccaaaatattcaataatttaaatggtattacttaaaatagtattataaataataaaaatatattattaaaaataatagattactggctttaataccaatgtacagaaatccgttttatttctatagaccagcaacaaacggaaaatgtgattcttataaagatgccagatgtctgcttctattaagggcatacagggaactcggaccagttagcaaatctgaaagaagtattttaaaaatctgtttgaaggtaatggagagataccagagtggtgaataatagccaccaaagtagctgccatttgcagtcacttccccctgagcccctccccaaaagcatttgctgattctgggatagtcagtgagaagctgagcagaaatcctgacaatcttagagctagggagaaaaactcagaggccaggactcaccaggagaaaggcgcttgggaagtacatgcactttggattagaaacccatggactttccttataggagcaaaggtgaaggaaatcatccctcacaggaactgcaaccagatgcactttattcaggtccttagaaaagctcaacctctaccactgggttaagttgatctcagattttgaattccaccaggaaccagccagaagcatatgaaaaccgtctctggaaaattataacgtcattttaggttcagttgctcaacccaatacttctgaatacagtatccagcacacaatcacaaagaaccacacatacaagtagacgaagcaacatgagtaagaacagcaaaaacggaagatcaacagggactccagacctcagctatgggaattagcacatgaagactttcttaatattttttatttcaatagcttttgggatacaagtagtttttggttacacggatgaattctatagtggttaattctgagattttagggcacccatcatccaagtagtgtacactgtacccaatatgtagttttttatccctcacctcccccacccacttgtaatcccagtgctttgagatgccaggaggtttgggaccagcctgggcaacatggcaagaccctatctctacaaaaaatgtttaataattacctgggcatagtggtacttgtctgtagcccccactatctgagaggttaggtgggataatcacttgagccagaagtttggggctacagggagctgtgattgaatcactgcactccagcttgggtgacagagtgaggccccatctctgaaaaaaaataaaaataagtaaaattttaaaactgataaaataacagtgctactaggtttgaagagtttaaacacaatctgaaaatttcatcataaattgaaaactataaaacacacatagcagatcttttttaattcagaattttagaacagaagtatacaatgaagagctcaaatgatgggtttaagagcagacttaacacagctgaagaaagaattagtgaatcagaagttggatcagaagaaaatatctagaatgaaggatagacaaaaacacagcatggaactggagggttaaaagaagagagtatccaccgataaggtctaacatataggtagttagagtcccagaaggagaagtgagaaggaagagaagaaacatttttaaagaggcaattgcagaaatcttcccaaacttaaggaaatatcctaccccatcattcatatggaataaaatacgtagaaaatctcatctaggccaggcgtggtggctcatgcctgcaatctcagcaactttgggaggctgaggcaggcagatcacttgaggccaggagcttcagaccaacctggccaacatggtgaaaccctgtctctagtaaaaatacaaaaattagctgggtgtggtagtactcatctgtaattccagctgcttgggaagctgaggcaggagaatctcttgaacccgggaggtggaggttgcagtgagccaagatcgcaccactgcactccagcctgggtgacagagcaagactctgaagaaaataaaataaaataaaaccacatctatccataacattataaaactcctgaagactaaaaaaaaaaaagaggctatcttaagagtagccaaggtcggggaagctcacaatacctttaaaggaggaccagtgaggctggcagctaatgtcgtaacagaaacaagaacagaatgagatgctgtcttaggctggcagctaatgtcgtaacagaaacaagaacagaatgagatgctgtctttacagtgctaaaagaaatacctgctaagccagggaaactatctttggaaaataaagatgacttttctttttctcttcttttcaattttcattccctagggctatcctaacaaggaccgtaaagaacagaagtgtattcttgcacagctctggaagctggaagtctaaactcaaggtgtcaggagggctgggctctctctaaagcctctagggtaggatgcttcttgccccttctagcttctttttttttttttttttatttctaaaacgactttattgctaagaaccatgattattacttaaaatagatttttcagttactgatataaaatatgttccttttgagaacacatggacacatagaggggaatgacacacactggggcctattggagggtggaggccgggaggagggagagggtcaggaaaaataactaaggggcactaggcttaatacctgggtgatgaaatcatctgtacgacagatccccatggcacacgtttacctgcgtaacaaacctgcacgtgtacccctgaactcaaaataaaaggttttttaaaaaatgttctttgtgcttctaaaaatgtctaaataatcctatatgcatttttcttatttgcctcttatgcgtagcttacagatttaaaagtacaatgttgcttgttttgtattcatcttggtggatctaataatttacaaataggacataggcatgctgatacagtcagcagttaattcctccttctgacagtggggtttggacatacaaccagcaatgcgtgcaggtggagagacatagaggatctttttttttttttttttttttgagatggaattttgctcttgttgcctaggctggagtgcaatggttcgatctcggttcactgcaacctccgtctcctgggttcaagcgattctcctgcctcagcctcctgagtagctgggattacaggcatgcgccaccacgcccagctaattttgtatttttagtagagatggggtttcaccatgatggtcaggctggtctccaactcccaatctcaggtgatccacccgcctcggcctcccaaagtgctgggattacaggcgtgagccaccacgccctgtacgaagttttaggtcatctgtgattcacaaacgaccggcttcgagaagctctggaacgtgccaaacaaggcactgtggagtagtttggctccatgtgacctaagagaggaaaatctgttgtctttgggaacattacacaattcaggtaagatatgtgcatattctcaagggaaatttaaggtgctcatactcaataaataaacacaagagcagcgttacagataatattcaaagagacagaggcttcttcatacctgatgtggtgggaagaccactggatgactggacactgagatacgtggttgacagtctcgtctctgaaacacatgatttgagttttgagcttagacaaacttgtttttctccagcatcagttttttcatcagtaaacaataataataatactgtgtttatgccaacatcattaggaagatcactttaaatggtgtatataaaaggatccatcaactttaaagccagtacccaatatacactcatagatatcagcgtattacagaaaaatagtatttattttgtggtcaagcatatctggattctaatcccaattctactaattgctcccttatcttttgtgtcccgtgatcatcaatgtttttatcattagaatcttgataatatctagctcaccatgtttttctggaaattatatgagataacatatgcaaaggacttagtgcagcaccagatgtgactcttccagctcctgtggttgccgactgccctgggtgttcccgggcctgcagacgcatcgctccagcctctgcctctgtcttcatgcagtgttctccctgtatctgtgtctaaatgtttctcttcttataatggcactggccatagtggatctaggacccactctactgtagagtggcctcatgttatcgtgattatatctgccaagtccctctttccaaataaggccacattctcaagttcttggtggacataaatttgggggtgactctattcaacccagtatactttctcttcctgagaagagcagtttggactcaaagctgttcggtgggcagatcaagggttggggggtgtctgcatggtgggggtaggaggagagatgcaggggcccagagcgggaagccagtgtggagtccaggctcggagcacccacatgagcagaggtgggcagcctgatatagaaagtcagatcttaagtggggtgagaagggttccagatggggaggagtgcacactagaatggagggggagccagaatggcagaggggaagggagtactggcagagagggcaggttggtcacacaaggggattggtcaagtaagtaaatacaccgaaaagaatagaaaagagagaaggcagttccaaataccaaaagggagtgatatggtttggatctgtgtccccacccaaatctcatgtcgaattgggtttcaatctgtgtccccacccaaatctcatgtcgaattgggtttggatctgtgtccccacccaaatctcatgtcgaattgtaatccccggtgttggaggtggggcctggtgggaggtggttggatcacgggggtgggttctcatgaatggtttagcaccatccccctagtgctgttttccttatagagtcctcccgagatctggctgtttaaaagcacgtggcacctccctggtctccttttctcctgctccgggaatgtaagacatgcctgcttcccttcaccttcaccttccaccatgattttaagttcctgaggcctccccagaagccaagcagaagccactatgcttcccggacagcctgcagaaccgtgagtcaattaaacctcttttccttataaattacccagcctcaggtatttctttatagcagttcaagaacagactacagggagaaactggaatgaatcctatggtactggattggaatttgatccgtaagtttgaattcatggtttctaacataaatagccattatataggagttgtcctgatttgtagaaaacacactaaaatattcatgaaggaggaggtgtcaggtcaaaaaaatactctcttgaatgattcagataaaaattgtttgtacttttcttgcaacttccaatttttggctgaagctaaagaaatattttcagacaaaacagaatatttgttgccagaagacacacactaaaggaactgcttaaagataggtttaagaaagaaggaaaatgatcccagaggaagcctcagagatgaaaaaaagaatttaagagtgtaaagtacacaggtgagtacattttaagagttattaactaataacaatgatgatgtgatggatagtgaggatagaaaattaaaacaattcagatgcatagcaataacatataagtaatgaagggctaataacactgcatcatcatatctgaaaagaagatcaaagaattagtgacaaatttcttgataaatttaactaatagaaaaaaatgcaactgtaagaaagtccatccaaagggaagcaaggaaaaagggataaaagaagaccaacaaggacagcattatctcacttatttgtggaatcttaaaagagttgagctcataaaagtagatattagaatggtggttaccagaggctagaggcagagagggagagaatggagcgtggttggtcaaagggtacaaagtctcaggtagacaggaggaataagttctgagatctattgcatgacagagtgactatattcagtaataatgtatattttgagataactaagagagtaaattgaaagggtctctccacaaaaaaataagtaaatgaggtaacagatatattaattagcttgattcaatcattccacgttgtttacatgtatgaaaatattgtggctgggcacagtggctcacacctgtaatcccagcactttgggaggccaaggcgggtggatcacttgatgtcaggaatttgagaccagcctggccaacatggtgaaacctagtctccactaaaaatacaaaaatcagctgggcgtggtggcacatgcctgtaatcctagctacttgggaggctgaggcatgagaatcacttgaacccaggagacagaggttgtagtgagctgagatcatgccactgcactccagcttgggtgacagagccagactctgtctcgaagaaacaaacaaacaaacaaaaaacattgcattgaactccataaatgtatctaattatgatttgtcaattagaaattatattaattttaaaaccacattgctagataggagatttaggctcaaatatatcagtatttacattaaatgtaaatgggctgggagtaatgtcactgaaaatggcagctccaaaaatgtgtcccttcacgaaagcaacaattaagctggcaaaaaactgacagaattcattttttcataactctagaatataaccaaaaacttaaaacaaagggtgcttaatgaagaaagaaactgctaaatttgggtaagagagaattgtggaattttcttacctgcctataaagccctcattttccagctcagaagtagccagggcaacagcagcccatcttcccggtgtggtttgctggtgccagagggagtaaaaaagccgttgtcatcaaagaattgtgcttgcgaatctcaacctatctgacagctctctgagggatcagctcaggatcttgcctttgttttgctcaccctgctcctgcccttcctcccctgtgtcctacccccaacaaacacacacagaattctctacaggatggaacagcctcctgggcagcatacatggaaagtatttaaaggtatatacttgtcacaaccatctaggtcaacagataatagaaagggaaaacagtagacaggctaaaacgcctaggaagaaaaaggctaaggaaggaaacgtggggaaatgagaactttaaaaaactcccacatatactaaggaattcaaacagccacatgtatttctagatgtatgctcagataagacctgagaagaccctaagcttttacctctggctggtcattaggcttcacatgagcaggaagtaaaggctaaggcagagttgtaaatgacctggttaagtgttgcagcagtgctctaacccagagccagcctgcaaagaacaggagggtcttcttcctctttctttctttctttcttcttttggcttaagaaatttaagaagatctgtgaaaacactagctgaccactaaactaacataacaaagatttcagtggccacatatgacaaaagtcttcacaaaagtagtttagacaagtcactaaacaactataacacaaaacaagcagcaataacaaaccctagggagaagaaagaatctagtttcccatattataatatttattcaaattttccagtttttaacaaagaagtatgagacatgcagaaaaacaagaaatatgaccctttcacaggaaaaggtaaattaacggaaacttcccctgaggaagcccaggctgtgaacttactagaaaaaggccttaaatcaactgtcttaaatattctcaaagagctaaaggaaaccaggagaacaatgcctcagaactagtgattatcagtaaagagatagaaattataaaatagcgccaaatagaattcttgaaatgcaaagtactgtaactaaagtgaaaaactcactacaggttcaagaggaaacttgagcaggtagaagaatcagtgaacttgaaggtaggccaattaaaattctcccaactaaagagcagaaaaaagataaggaaaatgagcttaatttgaacaatatgatcaataaatttgatctactaggcatatacagaccttagaaagagcagctacagaatgcaccttcattttgagccaggtggaatattcacacattataccatttatgaccacaaaggaagatttaacacattttgaaaggctaaaagtatttagttatgatgtgatcacagtgctaagtcagaaataaataacaaagaggtaagttaaaatacacatatgcttggaaaataagataaaaactgctaaataaccctgaagctaaagaagaaatcataatggaaacattaaaattttaaaaagtttaaaatatttttaactgaataataagggaaatactacatatcaaaacatggtgagatgcagcctaaacagtgcttagaggaaaacttatagccttagaagcatgtattatgaaagataaaatcctgaaagttgatgaactaaaaattcacccgaagaagttaaaaaagaatgtaaaaccaactgaaaatagaaggaaagagatcattaaaataatataagaaaatgattgaactgaggataataaagcaaagaaatgatcaaccaagtgaattaacaaaattgataaatctctgataacacttgttggggaagaaaagagaaaatgcaaataactaatgtcagaaataaaaagggacgacacacacatcctgcagatgtttaaaatgtaaaaaagaatatttgggaaagctttaagctactaagtgtgaacaattggatgaaatctaactggataaatgtaagtatttaaaaagtttaatctacaatttataaccttaccccagagaaaactgtgaaccagacatgatttcataggggatttctgatcaatatttagggaaatatcaacactcttagacaaactcttccagggatctgaagaagagtccatgccctgtaagctactgtatgaagccagtgtaatctgagttccgttgggactgcaaccgataaagtaattcatcacagaaatgacctcaggaaactggccttcagaacgggcttctgggaagttgtctcacatatttgaggaccacaggcataattcattgcccgcaggaaatggggcagccatacatgacatgtggtggcaccatgatgtctcagactgtcactgacaggagtgcatccaaagtacaaggagagaaaaaggcatgggcaggtcaagatgcagtagcactttgttgtcatggcaacaagagggctgctaaagattatggagtcaccaactttttctcatgaccatagagagtgtacacaggggaaaagaaacagtgaaagctatgaacatagcaaaaagaacatatacagagagccatggacgcttgaaggagtcccttacctcctggtcatgggtcagatagagctgatacccaaccaattcactacagatgaaagtcttagaaattgtggggctacaacatgcaaaggtttatcatcatcccacataacactaaacaggaggctctaactgcattcttgttggacatgtatccaatttcagaatagtgttccaagaatctgcctcctaggaccacttttgttggtgtcagggatccccagaagctgatcttgagagaatattttaagtggacagtttgtttgagaggtgatgccaggaaacactggtggaagagttggggatgaaaggaagccaataaaaagtgcactaataagcatgttaccatggaaataactgtaactgaaattcaccagggccctcaggaagccagtgtcaaacaaacaccttctcagtacgtccccccaacacacaccagcagcaagggagtttggggtatttatatgctaacttattagtcattggttgatggcagtttgtgcagagcaaaatcctgtgcaacttcaggcctgttgtgcacagaaaccctgactaccagagaaaaccctcaggcaagaagatgcagatgctagcagtttgaggttacaccagtatacactaaagtgtaaaggcccaaggcacctggagtgcaccaaaaactattgccacaggtgtacaaatgttcaaattaacaagaaaatgccatgtcatcctccaaagtcatggcaccaattcacattcccatcagcaaatctgagaccttatccaataccaatatcctgacctgaaactagatcatcatttatttgcatctgtgtttccttcttttatgtatccttttgtctcttgatcagagttagccacactctttattttgtatgcatcattccctccctttccataaaaaaaatttatcaaatatggccgggcgcagtggctcccatctgtaatcccagcacgttgggaggccgaggcaggcagatcaccagaggtcaggagttcaagaccagcctggccaacatggagaaaccccgtctctactaaaaatacaaaaattagctgggtgtcatggcacacacctgtagtcccagctactcaggaggctgatgcaggacaatctcttgaaccttggatgtggaggttgcagtaagccaagatggcaccactgcactccagcctggatgacagaggcagactgtctcaaaaaaaaaaaattatcaaatatgtatgtatatctgaacttgtctgattctgtttgcccttgagctatgtaaaattatatcatactatatgcagttgtctgcattggcattttttaccaatttttttacatcttgtttccaagattcatctatgttgttgtggggagttgtaatttattcacttttactgctgtataggtttccagaatttattttccttggataattgtttcaaaatttttctattattagctgccttactattgcattcttgttcctgtctgttgagatcctgttataggctgaatatgtcctcacctctccccaaattcatatatggaagccctaatcctcaatgtgatggatttggagatggggcctttgggaagtgattagtttttgatgaagtcaggagggtgggcgcccacggtggtggtggtcatgagggtggtcctcataggaagaggaagaaacggaagagcctcactctctctgccatgtgaatgcaccatgagaaggtggccatcttcaagccaggaagacagccctcatcagaacccagccacgctggcacccagattctggacttccaacctccagaacaaagaaaactaaatttttgttgtttaagccacccagtctatggtatttttgtcaggacagcccacactaagatggatactagtgggagagtttctctatgaaatatgcacaggagtggaagtactgaggtatagaatattatccctatttagttttctggaaagtgttttatcaagcatgttaccatgacaattaactagagtctaacacctctggggaattttgattatcgttgtagaatatatgccttagaattatcaccagggacaagtgacctcaggcatttacacacacaagctcccatcagccatgggttaagagctgctccaatgagtactaattcctggcacttctgttctgtattcatttaggctctggaagccacaggaagcaatcagacaaaaagtttcaggtgtcgtggctgggcatagtggcttatgcttgtaataccagcactttgggaggctgaagcaggaggatcacttcagcccaggagttcagaaccagcctgggcaatatagtgagaccacatttctacaaaaaatttaaaaattagctgagtgtggtgatgcatgcctatagtccctgttactcagtaggctaaggcagaaggatcgcctgagcccaggaagttgaggttgcagtgagccgtggtctcaccactgtgtgcattccagcctaggtgacagagcaagactctctctctctctctctctctctctctctctctctatatatatatatatatatatatatatatatatatatatatatatatatatggctgggtgcagtggctcatgcctaataatcccagcactttgggaggccaaggcgggcagatccctgaggtcaggagttcaagaccagcctggccaacgtggtgaaaccccacctctactaaaaatacaaaaattagccaagcatggtggcgcatgcctgtagtcccagctatttgggaggctggagtaggggaatcattgaacccagaaggcggaggttgcagtgagccaaggtcatgccaccacactccagcttgggcaacagagcgagactctgtaaaaaaaaaaaaaaaaaagaaaagaaaagaaaagaaaaaagaaaaaaaaaggaacacagaaggcacaaacagcatccactacagtcacccctcgcatgtctaaggtgcacttgcaccccacagtgatgtcaccacttcctattatttcctctgaaaatgaacccattttgagatgggcttgggccagaattacccttacccactgatccctgtaaacactcactctaacaggtgaggagtgaagagaatagggaggcttctatggtattctggtccctcaattcattatctgggttcgtggaacaactacagattctgctgttgcaactgatcccgaggccttcattggcctttgtcatctcccttttggagataggtttctaagggtttcccttgaccatggcaagaacttctgctgggctatgctctatgcctggtgggatgatccaaacctccattttctgcagaattacagaccccaacaaaaatgtccttattccaggtcttgaggtcccactccttcattattggggtgctttccttagtggaagagaactttgagctcctggattcagccttctttgtaatcccactactcttacaatcaggttctgggcccaattttcagtagtttcttctccagctgcaggagatggagttttttctaatgctgtgatgaaggttttctgaaatttgcaccatttcctgagttgaaaggggttcaactgagcctgttgttatatttcttcagtgattcaatttcactaaacaacaaccaaactattccaccattcttatgatcctgtctttctcaaaggccagagaaattacataaggagcacatcccccaacactgtaacactttctatctatgtcccattatcataatgccaggagaagttatttacaaagggttatttacaaaagtgcaagtgagatgtaagagaaccactagggatagtgcagtaagccaggttaggtaacaggagggctgttgctgcccacaaaaccaaatctcaaggtgttttagacaagacacaaactgtaaaagacttattggtaaatttaactatacaaaaattaaaaagtcatgtccatcaaaagataaagaaagtgaaagacaagtcacaacccgggaaaatacatatgcaacacctaaacttaacaaaggaatattatcaaaaatgtgtaaactcctacaaataaagaagaaaaggataaatatcccaatagaaaataaaggccaacagcttaggcaacatggcaaaaccccatctctacaaaaaatacaaaaattagctgggcatggtggcacacacctatagtcctagctacttgggaagctgaggtgggaggatcgcttgaccccaggaggtcgaggctgcagtcagccatgattgtgccactgcactccagcctgggagacagagtcagaccctgtctcaatcaatcaaccaatcaatcaagtaaaataaagaccaaaagacacgaacaggtatttcagagaataaaaaaaatacataaggccaataaacagtttagaaggtgtcagcttcactagcaatcagaaaaaaagtcaaatcaagagaagaatattcaagaaatcatgttagcaaaatgatgttggcaaaaattaagaagttgaaccataatcattaagacatagattcacagcctccaagtacgaatgatcctccgacctcagccccccaagtaactgggactacaggtgcatgccaacatgcccagctaattttttttcttttttgtttttttcatttatttgtagagactgggttttgccatgttgcccaggctagtctcgaactcctgtgctcaagcaatccgccccatcttggcctcccaaagtgctgggattacaggcgtaagccaccccaccgggcccagaatgctttcttaatctaaaaactcccctaagtggccaggcgcagtggctcacgcctgtaatcccagcactttgggaggccaaggcgggtggatcacgaggtcaagagatggagaccatcctggcaaacatggcgaaaccccgtctctactaaaaatacaaaaattagctgggcatggtggcgcgtgcctgtattcccagctactcaggagactgaggcaggagaactgcttgaacccaggaagcagaggttgcagtgagccgagatcacaccactgcactccagcctgggcgacagagcgagactccgtctcaaaacaaaaacaaaaaccaaactcccctaagtagggctattttcctgtccctgatgccaccttgacaacataagtcaaccactgttccacatttgtcttttaggaacgccccaggactgttggctgctgtccatggtgctgccttggtcagacacgtggtgtccaagctgctgtccgtggttttgctttcatttttctgtgtagcataatgatttttttgtttatttctttgtttaattaattgattttctctttttagaacagcgctaggtttgcaaacaaattgaacaaaaagtccatagactttttacatacccagcgcctctctatacatatacagtgtcacctactgtcattgtgcatctgtatggcacatttgttacaaatgatgagtcgatattgatacattatcattaactgaaatccgtagtttaccttagggttcactacttgtgttgtatagttcatgagttttgacaaatgtgcaatgtcacgtatccaccatggcagtgttatgcagaatagtatcccctatatttcactattcattcctgacccctcaccccaaaccctggcaactgctgatctttctactctctctgtagttttgcctttccaaatatatagtttggaaacgtacattatttagccttctccaactggctgctttcacttagcaatatgtatttaagattcctccatgcgttctgtggtttaatagttttttgtttttgttttttgtttttgatagggtcttcctctgtcacccaggctggagtgcagtggtgcaatcatatttcactatagcttcagcctcccaggctcaagcgatcctcttgccttagcctccaacacagctgggattacaggcaccaccatcatgcccattttttaatttttcatagagatggtatctggctatattgcccaggctgatctagaactcttgggctcaagtgatcctcctgtctcaacctcccaaagtgctgggatcacagtgtgagccaccatgcctgcccttgatagctcactttttattgctgaataatattccactgtccggatgtaccacggttaactgaaccattcacctgtgaatggtatcttagttacttccaagtttggcaattgcgaggaaagctgctataaaagctcacgtgcagatttttgtgtggacataagttttcaactcatttgaataaatacctaggagtgtgattgtatggtaagataagatttagcttttaaaactgtcaaactgtcttccaaagtggctgcaccatttgtattcccaccagcaatgaaagagagttctttatgcctcacatcctccacagcatttggcgttgagagctttttgtttcatttgttttctttgggattttctccattctagtagctggtcgtggtagctcattgttgttttcatttgccatcccaatggcacaccacgtggagcatattttcatgtgcttatttgccatccgcaagccttctttgctgaggtgtctgttcagatcttttgcccatgttttaattgggttgcttgttttcttattgtttaaatttaataatggttctttaagtgttttagatacaagtcttttatcagatatatattttctcctcccagtctgtggcctgcctttttcattctcttgacaatgtctttcacatgtagacattttttcattttaataaacctcagttaactaatttttctttttatacaaattgtgatttttgtgttatatctaaaaactcattgccaagcccaagatcatctggattttctcctgttatcttctaaaatttcatagttttaggctttacatttgggcctatgatccactttgagttgatttttgtgaaaagcataaggcctgcgtctagattcttttttttttttttttttttttttttgctttggtgccatgtagtgaaaagatgacgctttctccattgaactgcctttgctcctttgttgaagatcagttgactatgtttatgggcgtctattatcagaaaattttgttctatggatttatttgtctatcctttcaccaattccacactcctgattattgtggcttcacagtaagtcttgcataaaagttgggaagagtcagtcctctaactttgttcttcttcaatattgtgttgtctcttctgagtactttcccttcccatataaactgtagaatcagtttgccaacatccataaaataatgtggtgggaatttgattaggattgtgttaaatctatatataaagttgggaagaactgacatcttaagaatattgtttttcttttcatgaacgtggaatatctctcgactgatttagatcttctttcatttcttttatcacagttttatagttttcctagtatatatcttgtatatgttttattagatttatacccaagtatttcagtttctggtgctaatttaaatggtattcggttttccactttaaatcccaattgttcattgctggtatatagggaaaaaatggcttttgcccattaaacttaacgtccttcaaatttgcttttaggccattcttgcgttgctataaagaaatacttgaggttgggtaattttttttttttttaaaagaggtttaattggctcacggttctacaggctgtacagaaagcatggcagcctctgcttctggggaggcctcaggaagcttccaatcatggcaaacagcaaagggagagaagccatatcacatggccgaagcagaagcaagaaagagactctgtggagggggaggtggcacacacttctaacgactagatctcgtctgaactctgagcgagagctcactcatcaccaaagggctggcacaaaccattcatgaggatctgcccccatgatttaaacacctcccagcaggccccacctccagcattggggattacatttcaacatgagatttgggtaggaacaaatacccaaactatatcattgctataatcacttattagttccaggaggttttttgtcgattatttgggattttctgcagagatatcatgtcatctgatgacaaacgcagcttcatttcttctcctccaatctgtatatcttatacttgcttttcatgttttaatgcattagctaagacttccagcatggtgttaattgggactggtaaggggacctactcacctgttgcttctcaccatgaagtacaatgttagcagtaggttttttgtagatgtcctttataaatttgagagtattcccctttattcaaagtttgctgagagtttttatgataaattgagttgtattttgtcagacacttttttgttatctattgatatgaccacatgagttttcttaatcttttgaagagatggattatattaattgacttttaggtggaaagcttatattaattgattttgaatgtccaatcagccttgtttctattactgagagttctccagattaacagaaccaatagaatagggtgtgtgtgtgtgtgtgtgtgtgtgtgtgtgagagagagagagagagagagagacagagagagagagagaattttaaggaattggctcacatgggtgtggaggcctgcaggtccaaaatcatcaaatcggtagtgtggaacctgacctagggaagagatgatgttccagcttgagtccaaagatcttctggaggcaaaattccatcttcctcaggggacctcaatctgtcttttttaatagtcttcaactgattggatgaggcccacccacattttggaggatgatctgctttacttaaagtctaacaacttaaatgttaatcctgtctaaaaaaataccttcacaacatccagactgatgtttgaccaaatattgggttccaagacctagccaagttgacaagtaaaatcagccatcatatttgcatacctgggataaatctcaatgggtatattattttttatacatggttggatttcatttgctagtatttcattaacattagattttacactgtcgatattgaaggtaagcaatctttgaaaaagactactagaactcacccatagctgtttttctccttcctttgactcctgctagactgtgtttcccagtgccatcacatgtggatggagacctgttaccagttctgttcaatgagtaatgtgaataagtcagacagtactttgaagagttgtgatgctgtaacaaaaaataatattatgtggctcatgcctgtaatcccagcacttcgggaagctgaggcaagaggatgatttgaactgagtaattcaagatcagcctgggcaacatagcaatactccatctctagaaaaaaaattaaaaattagccaagcatggaggcacatgcctgtagtcccagccaccagggaggctgaggtggaaggatcacctgagcctgcagaagcagagggtgcagtgagctgagatcataccactgcaccccagcataggtgacaaagtgagactctatctcaaaaaaataaaataaaaaacttgccttagaatatgagaagcagttagcaaggaagctggtgtcaggctggaggactgcagatccttgtcatgccttaataaatcagttgttaacatttggaaggcagagtccctgcctattcagcctgcagctctagggtaagagattgcaaaatcaagtattaagagtttgttggctactattagctcccttcattaattaactagagaaaagaggttaggtcagagaattggtggctttgtaagcaaaaattttaaaagaatagagaaaatccaaaacttacaaggagggagtggaaaagctggcttcttctagaacccaaacaagacaggacaccaagaaaggttttagatgacgaggatggccaaggtgtgatttgcagtgtggccttcccatccatggcctctttcacagataatctaatttttaatttattatttttgtggatacataataattatatattaatgtatttatggggtacacatgatattttgatacatgcctagaatgtgtaatgatcaaatcggggtagttaaaatatctatcacctcaaaatttatcatttctttgtgttggaaacatttcaaatcttctcttctagctattttgaaatatacaataaattattgttaactatagtcaccacactgtgctgttaaacactagaacttattccttctaaccaactgttttgtgtgtgtgtgcgtgtgtgtttttttttgagacagagtcttgctctatcatccaggctgaagtgcaatggtgcaatctcgactcactgcagcctccgtctcccgggttcaagcgattctcctgcctcagcctcccaagtaggtgggattacaggcacatgccatatgccctgctattttttgtacttttactagaaacagggtttcaccatgttgtccagattggtctcgaactcctgacctcaggtgatccacccacttcagcctcaaagtgctgggattacaggcgtgagccacaacacccaacctacccaattgtatttttgtatccattataccaacctctcttatctcctccccacagcagtgatccttcccagcctctggtaaccaccattctcctctctacctctatgagatccacatttttagctcccacatatgaaagaggacacatgatatttgactttctgtgcctggcttatttctctttaacataatgacctccctttccatccatgttgctggaaattataggatttcattcttttttatggctgaatagtattccattatgtatatataccacattttctttatccatttatccattgatggacacttaggttgataccctatcttagctattgtgaacagtgctgcaataaatatgggagtgtagatatatctccaaaatattgatttcctttcttttggatatatatgcatcagtgaaattgctgaattatatggtagttctatttttaattttttgaagaacttctacactgttttcaataatggctgtactaatttacattccaactagcagtgaatgagcattctcctttctccacatcctcatcagcatctgttcctttttgtctttggtaataactattctaaatggggtaagataatatctcattgtgatttcgatttgcatttcctagatcattagtaatgttgagcattttttcatgtacatgttggtcacacttgcatgtcttcttttgagatatgcatattcatgtcttttgtccattttaatgggatttttcttgttgtggagttgaattccttgtatattctgaatattagtcccttgttggatgaattttatcccatcaaaaagttgactcttcactctgttgactgtttccttgctgtgcagaagctttttagtttaatatagtcccatttgtctatttctgtttctgttgccagtcattttgaggtgttagccataaaatatttgcttatgacaatgtcctgtagtgttttccctgttttcttctagtagttttataatttttagtcttatgtttaagtctttaatacattttagttgtttttttaattcagtgagagattgggacctagttttattcttctgcatatgaatatccagttttcctagcatcatttattgaagaggctgtcctttcccagcactttcattgaaaatcagtaggctataaatatgtggttgttttgtttctaggttctcaattctgttccattggtctgtgtctatttttataccaatgtcatgctgttttgtttcctatatcctcatgatatattttgaagtcaggtagtatgatgcttccagctttattctttttcctaagggttgctttggctatacaagctcttttttggtttcataataattttgggattgtttttccatttctttgaaaaaatgacattgatattttaatagcgattacattgaatctgtagattgctttggatagtatggtcattttaacaatattaattctcccaattcatgagcatggaaggtctttccatttgtttgtgtcctcttcaatttctttcatcagtgccttgtagttttccttgcagaagtctttcacctccttggtgaaatttatttatatggatttttgtagctattgtacatgggattgccttcttggtttctttttcagctagttcattatcagggtatagaaatactactgactttcatatattgatttgtatcttgcaactttactaaatttatttatcagacctaagagtttttggtggagtctttgggttttttcctttcagccagtatatatcttttaagtggaaaattctatctgtttacattcaaggttattattgatacgtggggacttatttctgccattttgttggttgttttcttgttgttttgtctatcctgtgttcctttctttctctcttattgtttatcattgtggcttggtggttcctgtagtggtaacatttgtgtcttttctcttcctctttttttgtatttgccgtgcggctgtaagttttatacatttatgtgttttcacgatggtagagatcatccttttgcttccaagtatagaactcccttaagcatttcttgtaaggccaatatagtggtgatgaatttccccaggctccagtggctcacataggtgctggctgtggtgggcaggatgggatgatcctttgccccacccagtaacagtagcagtgtgacgggagagcctgtcctcagggcatgtgaagtgcacagtggccctgctatggggtcactgcccgtggcatgtacttcagccctggaagcagcagcagcttcatcatagcttatttaattcagcggaccaagagcataaacacctgagcttcctctttttatctgctcattctgcttcccaagttctcaaggacttatgtggacagtcttcccgcacttgccaaaaactcagttcattctgttataaatctcagtgcctctacctgctacagacacggagctcaccccgtcagtggcaccccttctgacccagaagtgtccctaggtgtcttcgtggcctctgccatgggtgctggtatgccattgtgggaggtggggggcagtgggagtcaggaggttgctcctctgggtggagctgcctgccaatcaagatcctgactctacctccaccccatgtgaccaggctgcaggggcaggccttagtgggcaccggtggtgccctggtcacaagacaccctggaggtgaagggggccttccaattctaaagctgtagctgcagacttgggcagtgcaaatcctgtcaggaccaaacaccaaattctatcacccactcaagcttgaagttaagtgggagggagagagtccctgcaggacccttgctatagttggatgtttgtcccccaagacttcatgttgaaattcgacccccagtgttggaggtggagcctggtagaaggtgtttggattttgggtgcagatcccaaaatgctctcctttgagggtgagttctcactcttattcctgctagagctggctggtgaaaggagcctggcatctcccctctttcttgcttcctctctccccatgtgatctctgcacataccatggttcttgtacagcctgcagaaccatgagccaaataaacctcttttctttataaattacccagcttcaggaattcccttatagcaatttaatggacaaagacaacacctgacagccactctcccacatgcctccagcaatgctctgtgggtttgcacctccaactaagtcatttaggcaggatttaatggaaggacaccttgctgacacagatctgggctcagtgcaagagcccctgggacactgaggactccagagctggctccggcagagtgaagagtagcagaatatgccactttcaaacaagaataattttgagccgaagacaattaaaaagaagcatacccaagaaaaaaatccctgcccactccctttctaccaggaaaagcagaggattcttagtccttggagacaactctagatgcttatcagcccagagaaggcactagaggaatctacacaacaaactagcaagctatcttctgttagcttcccctatatatttacttcccagaatttgctgccctacaggttgaaagcccctttcctttgtcttgccaattctgtaaaaatgattgcccatttgctaagatgctccgtaagctcacgttccaaccgcccctttgaattcctcatctctgacggctcccacatagaggcataatgcacatgttagtaaacttctgtttgtttttctcatgttagtatcttgttaatctaattgacaagaccccagctaatgaacctaagatgggtagaagggggaaaaatgtttcttcccctacaagagcaagcacctccccacacactggaggaggagagagagccgctccgagatctgcaggaacagaggctccttgggctgtctgttgaggaaggcaataaggtccaggcaaccctgcaaggagagagccagggtcaccacttagcatcagcatccccttcctctgatctcctgcaggcagccagcccacccaaagagctgacccatccagcacccaaggagtgaggcaggccagagtccactccaagggcagaggctgtggggcaggtggggagccagcctggaggatgttagcagagccaggtgggtcatggcacccacagcctcggggatccagcttgagagagaccctgagggccaggcttgtcagagctgataacagatgagttgtgatgacagggctcattgtcagacactgtaggctgtcaggctgtcaacctgagcagactaccaagtcttcccatccgcaaaacagctcaccccagctatcaggggtgggcacccagaggagagaccattctcatctccacctgaactcttttggtgctcccagaacattctgatgctgaaaaggagtgtagaatcagatagaaacaattcctcttgtagcttccatgatggttggatggtaaagtacaactggctttgttagttcattttgcattgctgtagaggaatacctgaggctcagtaacttataaagaaaagaggtttatttggctcagggttttgcaggccataaaagaaccctggtgccagcatctgcttctggtgagggcatcaaggagcttacaaccatggcagaagttgaagggggagagagcatgtaacatggtgagagagagagcaagagagggaaagaggaggtgccaagctcttttaaacaaccagctcttgtgtgaaccagtagagcaaaactcactcatcaccaagaggatggcagcaaggccattcatagggatccatggcatgacccaaacatttccactaggccccacctccaacattggggatcacatttcaacaggagatttggaggggacaaatatccaaaccatgtcactccacactgtccccccaaatctcatgtccctctcacattgcaaaatataatcatcccttcccaatagtgcccaaaaaatctcaacttgttctaggatctactcaatcaaaactccgaagtttcatctgagactcaaggcatgccccttccacctatgaggctgtaagatccaaaacaagttgctacttccaagatacagtgatggtacaggcattgggtaaacatttcccttccttccaaaaggaataaattggccaaaagaaggagggggaagaagcaacaggccccacacaattctgagagaaagacattaaactttaaagctccaaaataatccttgactccatgtcctgcatccagggcacactggtgtgaggagcgggttcccaaggccttgggctggtctgcccccatggctttgcagagtgcagcccacatggctgctctcatgggttgtagttgagtgcctgaatcttttccaggctctgggcgcaagctgctggtggctctaccattcttgggtatggagggcagcagccccattcccagagctccactaggcagtaccccactggggactctgtgaaggggctccaaccctacattttccctccacactgccctactggaggctctgtgggagaactccacccctgtggcaggtttctgtctgggctcccaggctttcttttttgtctctctctttttttatttttatttcaatagttttaggtttttggttacatagataagttctttcatggtaatttctgagatcttggcacacttgtcacccaagcagtgtacgctgtacccaatatgtaatcttttatccctcacctccatcccccacttgccctcaagtatccaaagtccattatatcattcttatgcctttgcatccttatagtttagctcccacttataagtgagaacatatgatgtttgtttttccattcctgagttatttcacttagaataatggcctccaactccatccagtttgctgcaaatgccactattttattcctttttatggctgagtagtatcccatggtgtatatataccacattttttatccactcattggtcaatgggcatttaggctggctccatatttttgcaattacaaggagttgcaattgcactgctctaaatatgtgtgtgcaagtgtctttttcatataatgacttatttttttctggatatcgaatagtgggactgctggatcaaatggtgattctacttttagttatttaaggaatctccatactgttttccaaagtggttgtactagtttacattcccaaccaggagtgtaaaactgttcccttttcaccatatccatgacaacatctgttagtttttaatttttaattatggtcattcttacagaagtgaggtggtatctcattgcagttttaatttgcatttccccaaaaattagtgatattgagcatttctttatatgtttgttggccatttgtatatcttcttttgagaattgtctattcatgtcgttcgcccactttttgatggtattttttttattgatgatttgtttgaattccttgtagattctggatattagtcctttatcagatgcatagtttgcaaatattttctcttattctgtgggctgtctgtttactctctgattatttcttttgctgtgcagaagttttttttgtctaattaggtcacatttatttatttatttatttatttttggttttgttgcacttgcttttgggttcttgatcatgaactctttgcctaagccaatgtctagaagagttttaccaatgttatcttctagaattttcatggtttcaggtcttagatttaagcctttcatccatcttgagttgatttttatataaagtgagagatgaggatccagcttcattcttctacatgtggcttgccaattatcccagcaccatttgttgaataggacatcttttccccactttacatttttgtttgctttgtcaaagatcagttggatataagtatttgacttcatttctggattctctgttctgttccattggtctaatgcctatttttatacaagtaccgtgctattttggtaactatagccttgtagtatagtatgaatttgggtaatgtaatgcctccagatttgttcaccttgcttagtcttgctttggctatgtggggtcttttttggttccaaatgaattttagaattgttttttatatttctgtgaagaatgatggtggcactttgatgggaattgcattaaatctgtagattgtttttggcagtatggtcattttcacaatattgattctacccatccaagagcatgggatgtgtctccatttgtttgcgtcattgatgattgctttcagcagtgttttgtagtttttcttgtacagatcttttacctccttggttaggtatgttcctaagtattttattttttgcaggtgttgtaaaagggattgagttcttgatttgtttctcagcttggtcattgttggtgtatagcagtgctgctaatttatgtacattgattttgtatcctgaaattttactgaattaatttaacagatctagaagctttttggatgagctttagggttttctaggtatgtgatcatatcatcagtgaacagcaacagtctgacttcctttttactgatttggatgggcacccagactttcctatacaccctctgaaatgtaggtaggagctgccatgcctccttcactcttgtattctgcccacctgtgggcttagcaccatgtggaagctaccaaggcttccagcttgcaccttctggagtggcagcctgagctgcacctgggactctttgagccttggctgaacctggagcagcaacctcccaagataccacagggaagcaaggccccagccctgacccccataacaatttcatcctcctaggcctctgggcctgtgatgggagagactgtcccaaagacttctgaaatgcctttaagacctttttctcattgtctttgctattagcatttagttgccttttagttatgctaatctctctagcaagtggttgctccataaggcatttgggttccttgcctgaaaaggctcttttcttctcaacctcatggccagcctgcaaattttccaaatgtttatgttctgcttaccttttaattataaattctaattttaagtcattttttttgctcccatatttgatttaggccattcaaagcagccaggttacttcttggatgctctgctgctttgaaatttcttccaccagataccttaggtcatcactgtcaatctcagcctttcagaaagccctggaacatggacacaatacagccaagctccttgctgggggcataacaagcatcacctttactccagttcctaataaattcctcatttctacctgagacctcatcggcctggcctttactgtccatatttctatcagcactttgatcacaactatgtaaccagtctctaaaaagttccaaatttcccctcatcttcctgtcttcttcctgggccctccaaactcttccaacctctgcccattacccagttccaaagccacttccacattttcaggtatctttatagcaacaccgcactccttgctaccaattttctgttttcatccattttgcattgctataaaagaatacctgaggctggataatttgtaaagaaaaggaagtttatttggctcactacaagctgtacaagaagcataatgccagtatctgcttctggtgaggcctctggaagtttacaatcaaggcagaaggcaaaaaaggagccagcataggacaggcatggtggctcatgcctgtaatcccagcactttgggaggccaaggcaggtggatcacttgaggtcaggagttcgagaccagcctgaccaacatggtgaaaccccatctctactaaaaatacaaaattatccgggtatggtggtgcacacctgtagtcccagctactagggaggctgaggcaggagaattgcttgaacccaggagacagaggttgcagtgagtgagccgagatcacaccattgcactccagcctgggcaacaagagtgaaactccatctcaaaaaaaaaaaaaaaaaaggagccagcatgtcacatggtgagaatggtgagagggagaaagagagataagaaggaagtgtcaggtttttttaaacaaccagctcttgtgtgaactaatagagtgagaaatcacccatcaccaaggggatggcaccaaaccattcatgagagatctggccttatgaccccaatacctcccaccaggcctcacctccaacactggggatcatatttcaatgtgaaatttggaggggacaaacatctaaatcatatcaggaactccatggtactgctaacccccaaatctctaggggtgatattgagtgacatgcatggtactgaacgatacttggtcaggttctcccagtgaagcccaagcaccctcagggtacagggctgggaggcccaatcacaccagctcagcccaggacttggctgagtctgccctggtattagaaggtagcagacctagaactgggttgaacaagatcaggccactttgtgcatgttgccaaaggagaaactgaaggatcagaagtgggcagtaagttttcagtgagcccaggggtcataagtagcaaaatgtggaattcagtaaggggtagaggctggaagagttttgaggtgtgtgttagaaaaagcctaggtttccttgaagactatgttagaaatttggacattaaaggtgatcctggtgggggctcagaaagaaagaggagagctatagagaaaactcctgtcatcttggagaatacataaattgtcacgaacagaatgttgctagaaacgtgaatgttaaagatgcctctgctgaggctccagacagaaataaggaaggtgttattgaaaacgaaggtgacccttgtcatacagtggcaaagcacttggctgaactgtgttccgttttgtggaaagtagaaattatacatgatgaacttggatgtttagctgacgaagttcctaagaaaattgttgaaggcattcttgatttctccttgctgcttacagtaaaatatgagaagagagagatcagctgaagagggaagtgctgaggtggctgggtcagctgacccaagggcccttcaagctgatttaggctgctcaccttggtctcagaatcaccacggccatggccggtcagtcacaggtgatccagcagctgctgcaggccgagaagcaggatgccaagaaggtgtctggggcccacaagcaaaagaaccagaggctgaagcagcccaaaggagcagcttaggctgaaattgaacagcactgcctgcagaaggagaaagagttcaaggccaaggaagctgcagcactaggatctcgcagacccaggataaccatcctccagacctacttccagcagaacagggaagaagtcttagataaccttttggcctttgtctgcagcatccagccagaaatccctgaaaactatcgcataagtagatattaaaagagagaagcacctgttaaatggactggcactttagatgccctcatggaataagaagctctagttatattcttataagaagacattaacttatctctgtatattatagagtaggcccattcacttttcggagagaagcaaatccagtttctttgtacagacttagaatttatctaggctgggcatggtggttcacgcctgtaatcccagcattttcgggggccaaggcgggcagatggcttgagctcaggagtttgagacctgcctgaacaacacagtgagactgtgtctctacaaggaaatataaaaattagccagatatggtggtacatgcttatagtcctacctacttggaagagtgaggcaggaggatcacttgggcccggaaggcagaggttatagtgagccaagattgtgccactgcactccagcctgggtgctagagtgagaccctgtctcaaaaaaaaaaaacttaaagatttcatctttttacctcatgtttcttaggaatataatgggtaaatattgtctattttattatgccttttggctcaagcaatatatatacatatatatatatcactgttgatgttttctttcttgtatcaagtttaaaagaaaaagcaaaacaatcctttgaaaaaaggaaggaattaaatcattttttccttaatgcttttttgaaggtcaggggctttatctatgaaaaagtagtagtttctgtaacctgtgtgaagcatcagccagccttaaagtagtccattgctgctaataattagaacagtgaatattactagtataattgtttcagcttcttaatcaaaataactagatgatagaattcaagaacttgttacatgttattactcggtgtactactaatcatttaaaagtaaagcctatcatgcaaataaataaataaataaataaataaatacatgagaccagataaaatgaaggaagaatgactttgagatcagagccacaggtgaggaggctgttggggctgctgttgccaccttgggcccagagtgtggggccaccccagtgggcctggaagatggagcattaaccgaggaggatgaatcttgagacttaaatctaataaagggccaactagaagcccctagtgctcatcatcctcataaagaaagccagaaaagtcaatagacaactatattttaacgaaaataactgagggagagcactgagtgcatcagaggagtaacagaaaccctgataagcacagaaatgtgggctggccacatagaaaacagaaggaaacacacggcctccaccactccatcccccaaccaggattatctgggaatcaggaggaatttctgacatgaggaggtaagcaagaggatcccagtggcacccactaacacctcggacacctgcagacctcgccactggggtcccctgcagtttgcactggagggagttgcctggaggccacatagctgtgctctccaaaaaaggtgctgacaccgtaccccactcccacatggctagtgcttcaccacactggaataggaactatggctggagtgtgtcttacccaaggagtgagtagtcacagctccccttcatctctgaggctaagctgccactgaacaacccagactagtggtcccacgtccccaagtcaagctatgggcatctattaaacccttccccacagagccaagtggatcagctctacccactcctccccctgaccctttgagtccaagctaaagcagtttcttgcctcctagcaaaacaggactttggccatgcctttctagtgtctacgttgaagcagcaccctgcattccaggaactaatgccttggccacccagaaggtcacacactgcagtgcttaggctgaagcagcaacctgtatcctacagaaatggtgcctgggccactcagaacaatcacaccctctgatacataaatgcaggactttccttacagcagagaaggcctgagctgaagcaacacatcaccttctagggaatcagtgccctggcttaagctgagcagcagcacatcccaaggctgagctgatatagtaccctatgccccaggaaaacagagcagtggctaagctgagacatctcagcctacaggccaaacaactgtagtgccctgcttccctggagcttgcctaggcccctagggtctgagctgctgaggcaccctctccctgggaagtagaatcagcactgtgctgttccctgcctactccccaccaaggcccaaattacagctatgctctgccatcttgggatacttgctgacactgtacctggtctcacatagtctgggatcctgctgagccctaccatcctagggtctagagtcaataccatacagtgcctcatcccctgggaccaaagtttccattgtgccctattggctcagcttcccaaattgcagccataccatactccccaggtccacacctccagaacaccccttcttccccagagttggacaaatgctgcaccccccaggaatagactcacagctacaacctggccccttgagcaaaacctgttaaagggtacctcagagtcacagatcctagcactgtgagccacctaatccaaacctgccacagaaactgaacctacaccccaagacccagatgccacagtagattcttgaaaccaggagactaggactccagttgcacagctactctaattttctgcacctggaatccagcaccattgcagctgcacgttggccacattagacctgctaccaagagagagccccttgactaaatctcctcattgtggggaaacaagaagaggaggactacaaaagcccttgacactgagtacattaacctgtgccaccactacatccacaaacttctacagcctagtccactgaggtgcccacagttattgctgaggttgaatgcagttgaagaagacgcatggaagctatgccactgcacctattcagaaacagagtcatcacactttcccaaccaaaacactaaacccaactgcaggtgaaattgtttctctaaaaaacccactcttgaaagtttggaagaggtgactatttcgccagatgcacagacatcaatgcaggaacacaataaacatgagaaagcaaggaaatatgacaccaccaaaggaacataactctcattaatagacctcaatggaaaaagaaatcaatgtattgctggaaaaggaattcaaaataatgatcttaagataactcaataagatacaagaaaacagataaacaattcaatgaattcaggaaagtaatttacagtatgaatgaaaatttcaacagagatagaaataaaaaagaagcaaactaaaattctgcaggtgaagaattcaatgaataaaattaaaaaatacagtaatgagcttcaacagcagatatgatgaagcagaagaaaggaagagatagatcccaatacaataatagttgataacttcaacaccactctcagcactggacagataatccagacagaaagtcaacaaagaagcattcaatttaaaaagcactttagaccaaatgcatctaacagatatttacacaacatttcatccaacagctgtgaaatacacattcttttcatcagcacatggaatattctccaggataaaccatacagtaagtcacaaaacaagtctcaacaaatttgaaagaattaaaattatatcaaatatcatttatgaccacaataaaactcgaaatcaataagaggaacttttaagactgtacaaagacatgggaaattaaataatgtactcctgagtgaccaataggaattaagaagggaattttagaatgtcaacaaagaaaatgaaaatagaaatgcaacgtactagaatttataagatatagcaaaaagcagcattaagatggaagtttatggcaataaatacctacatcaaaaaagcagagagatttcaaataaatctcatccttgaaaatgcatgtcaaggaactaggaaatcaagaataaaccaaacccaaaattagtagaaagaaagaaataataaagatcagagcagaaataaatgaaattcagactaaaaaaaaaaaagatcaacaaaatgaaaaattgaatttttcaaaagataaacaaaaatgacaaataattagctagactaaacaaaaaagacccaaaagaatgaaatcagaaatgaaaacagaaacattacaactcatatcacagaaacacaaaggataattagagaccatacaccaacagattagaaaacctagcagaaacaggtatatttctggacaatacaacctaccaagactgaacccagaagaaatagaaagcctgcacaaaccagtcatgagcattgagattgaatctgtaacaaaaagtctcccatcaaaggaaagcccaaagaaattcctgttgaaataccaatgacattcctatcaaaatgccaattctacagtaatccaatggcttcagtggggaattctaccaaacactaaaaaaactaatacctattcttctgaaaatcttcccgaaaattgaagaggagggaattcttctaaattccttgtatgaggccactattatggtaattatgattatgattatgattatgtgattattattatgattccaaaaccagacaaggacacaacaaaaaaagcaaactataggctaaatactctgatgaagataatagatgaaaaccttcaaccaaatactagcaaattgaatccagcagcatattaaaaacattatttatcatgatcaagtgagatttatcccaggaatgcaaggatggttcaacatatgcaaatcacatcaacagaatgaaggacaaaaaccgtattatcatcataacagacacagaaaaagtatttgataaaatccaacatcccttcataaaaattctcagcaagttaggtatgaaaggaatatacctcaacacaataagagctatatgtgacaaacccacagccaacatcatactgaacatgcaagagttgaaagcttttctctaaaatctggaacaagccaatgatatcaggccagatgtagtggctcatgcctctaattctagcactttgggaggccaaggcaggaggatcacttgagcccaacaaaggaaacaatcaacagagtgaaaagacaatctacagaatgttagaaaatatttgcaaactctccatccaacaagggactaatatttagaatacattggaaactcaaacaactaaacagaaaagaaaacaaatttttttattaaaaataggcaaatgaaaaaatatttaaaagtttttaaaaccaaaaaaggaactgaatagacgtctctaaaaggaagatatacgaatggccaacagacatatgagaaaatgctcaacattactaatcataaggaaaatgcaaattgaaaccacaataagatataatctcaccccagttaaaatggctattattaaaaaaggcaaaaaacaattgctgtcaaagattcagagaaaggggagctttaatgcattattggttgaaatcttgtctttggaattagcacagccattgaaaaacaataaagagcttcctcaaaaaatggaaatgagtactgccccatgatcccaccatcctctaccgggtatttatccaaaggaaatctatgtcaaagagacatctacactacatgttcattgcagcactattcacaatgccagtgttggaatcaacctacgtgtccatcaacagatgaatgcataaagaaaatgtagtgtttatacacaaacacacacagagagagagagagagaggaattctattctgccatgaaaaagaatgaaatcttgtcatctgaggtaacatggatgagcttggaggacatgttaagtgaaataaagctagacacagacagccaaatatcacatgttctcactcatatatggaagccaaataagttgatctcatagaaatagggagtagaatagtggtaaccagaggctgggaatgggaggggataggatagctagaagtcgattaataaataaaaaattacagtcaggtaggaggaataggccccggtgttctctaacaccatagggtgactataactaacaacaatttattgtatattttcatacggctagaagagcaaattttgattgttcccagcacaaagaagtgataaatgtttgaggtgatggatatgctaattgttgcaggaagtcagggaccccgaatggagggaccagctggagccatggcagaggaacataaattgtgaagatttcatggacatttatcagttcccaaataatacttttataatttcttatgcctgtctttactttaatctcataatcctgttatcttcataagctgaggatgtacgtcacctcaggaccactgggataattgtgttaactgtacaaattgattgtaaaacatatgtgtttgaacaatatgaaatcagtgcaccttgaaaaagacagaataacagcgatttttagggaataagggaagacaaccataaggtctgactgcctgaggggttgggcaaaaagagccatatttttcttcttgcagaaagcctataaatgaacgtgcaagtagggaagatatcgctaaattattttcctagcaaggaatattaatactaataccctgggaaaggaatgcatccctgggggaggtctataaacggccgctctgggaatgtctgtcttatgtggttgagataaggactgagataaggactgagatacgccctggtctcctgcagtaccctcagcttattaggggggtgaaaaactccaccctggtaaatttgtggtcacactggttctctgctctcaaactctgttttctgttgtttaagatgtttatcaagataatatatgcactgctgaacatagacccttatcagtagttctgtttttgccctttgccttgtgatctttgttggacccttatcagtggttctgcttttgccctttgtcctgttccctcagaagcatgtgatctttgttagacccttattagtagttctgctttttgcctttgaagcatgtgatctttgtacccactccctgtgcttacaccccctccctttttgaaacccttaacaaaaaacctgctggtttgaggctcaggcggtcatcacagtcctactgatatgtgatgtcacccccggctgcccagctgtaaaatcctctctttatactgtctctctttatttctcagctggccaacaattatggaaaacagaaagaacctacattgaaatattgggggcaggttcccccaatactaattatcctgatttgatcatcacccattgtatatatgtatccaaatatcacaatgtaccccaaaatatatacaattattatgtgtcaattaaaaacaatcataaaacttttaaacagctaaaataaaagtatattgttttcttcaaaaaaaatctaatgcagttttccctactaggttttgggcttgcttaggacccatggctcctctctcccttccaatgtatcccttttggaataggaatgtccatcctatgcctgccccatcattgtactttggaagcagataacttcttgtcaagttacaaaggtccacagatggagaggaatttcaccccagaatgaatcaccctgcatttctcccacacttgatgcaggtgatatgtcgctgagattgtggactaagagttggtgctggaaggggttagccatcgtggagatgttgctatgggatgcagggattttgcctgtgagaaggacatgattatggggggagcggagggcaaactgtcatgggttaaaatgtgtcccctataaattcatgtgttgaagtcctaacccccaggaccacagaatgtgaccttgtttggaaacagtctttgcagctgcaatcaagttcggatgaggtcaccctggagtagggcaagcctctgatccaatatgactgctgtcctcatgaaaagggggaatctgggcacagacgcacgtgtggagaacgccctgtgaagatggtgctgcttccacaagccaagagcagcagagacggccggcaaagcccagcagcaaggagagagcctggaacagagtctccatgacacagaggagccagccccaccgagacctccatcccagatgaccggcctccagaaccaggacggaataaacgtctgttgtttaagccacgcagtctggggtgcagtgttgccagggccgcacttaacggatacgagtgttgtcctgagctgccagccccacagactgcacaaggcctccctgccccagccaagtgcagtctccccagccccctgggtgtgccatgggcagtgtggggcccatcactccgtcctcccccaggctgggaggttgagcccattatgagctccatggggtgaagctggagcgagaggctgggagccgactgggagcccgcggctggaggatggatttccccagggacccacacgtgcacctccacctgtctcctggacgttctctctgagggcagggctggtgccagctcagggatccagcagggacagaagggcgggccgggtccttgtggagagcacatttagtgggagggacatgatttcccctcacaagtgtccattcttcctgttccttgctggacgcttcctcttccattctggacacttcctgtgcgacacctcctcgggctttcccgaggccctctggcctcattccgttccctgctacctcccacttccacgtacgtccttgcccagctcttccctctatccagagcttctgcctggcaaggtccctgctgagatcagtccaggctcccccagcacaggtaggagccttgcacatgcccttggacctccccaccctgcatgatgccagcatccccaggccccagggaggccccatttctctctctgctggtagtccagtggccctggagtcccactgcaggtggggtgtgcccctgaactctgaggaagctaagtaccctgccctcagacaggctatcccccctgctcagccccagggccctgccccctaccccttcccctcacctgcaccacaggctctggccaactctgcccaggccctgaatgggcccctctggctcccctctgctgctacactgccctgcaccacctccactcagcctcagtgtgttcatccgcctgtcccacgtcccctcggcccccaggagcacagctggtggccctggctcctcgcagcccatcttgttccttctggagcaccagcctcagaggccttcctgtgcagggtccactcggccagccctgggaccctcctggtctcaagcacacacattctccctgcagccagacctgcccctgcctgtgagctcagacctgagccttggaacgccttcccttctccatcccagctcgcctttgccagctgctcagcaggatgaactcacactcccctccctgcaccatgagtgagagtcagctggagagatgcccaggcaaaagcagccaccagggcccagtgggggccagaagcttcagatgagaggcccaggtattgagaggctgagaccacgggcagaatggtcataatcgttgccagtctcagtccagccccagggactcagagacagagaaaagagcagcacacaaggtccgggctccccaccttctcccgtgagtacgggggagtatgggggcagccaccacccccatccccacacacccatgaggcagcctcagctgtgtctggactccccctcgccctctgacacagaaaccaccagaagaaaagggaacttcaggaagtaagtggtgccgccggtttcaatcctgttcttagtgtttgcagcgtggagttcacacccctggggacctgggggccgagctgtgatttcctaggaagacaagtggcagctgacagcgtgggcaaggctgcccacatgtacctcgccacaacaggaagggctgagacccccacctcggtgagtggggtcagcacagggcaggagcacaggctcaggagaaggacagagcctgggcgcagccatcggcgcttctggacctgagctgctgaacaggctgcaagaggctggggagaggctggggcgaggccagccccacatggaagcctaagcggagccagcacaggggaggtgggcagccttcaggcaccgatgcccacccagtgcgagacgacagggaccgtgggcaggggcttccaagccaacagggcaggacacaccagaggctgactgaggcctccaggacgaccgggctgggagtgtgaggaacatgacgggatggggcagagccagccatggggtgatgccaggatgggcatgaccgacctgagctcaggaggcagcagagagagggaggaggagaggccccaggtgaaccgaggggcttgtccaggccggcagcatcaccggagcccagggcagggtcagcagagctggccgtagggccctcctctcagccaggaccaaggacagcaggtgagctgggagcagagcagggagggtgagtgtggcagcaggacaggagggtggaagccaaggagcccagaggcagaggcagggacaggggaggcacaggggctgggctcagagccagctgatggggttggggcacctgctggccgggagcagggctgtggtcagcagcggagaggaggggagagctgtgctgagtgcacgggcgggaggagggaagagtccagggaggcccagaaaggcccagagtgcagcaggcctggggcgaggggaggggctgaggctccgtgcgttcagggaactgacccagcagagcagaggccactgaggagctgaggttctggagaggcttccagagcaggagcagtgcagggacgggaggatccgggagctcatccaggaggggcacatgggcaagggcaaggggctctgttggggagacctgactggacactggggctgctccacagcatagggaacacgccaagtgctgcaaaaacaaaaatgaggcaagaaaaacagcctaaacctggacagagggtgccaggacaggcaggggggcaacagtggaccgagtgacgttgctgccccaggttgagggagggcagagtgagcagggggcaggcattggagttcaggggaccaggaccaagcagccacaggtgcacagggcaggtgggaggcaggaagaacagggggcagctcctggagctcaggggaccacgggagagcatctgaaggtgaacaggagccggtggaggggcaggatgagcaggaggaagaccctggagctcaggggaccagggcagagcagccacaggtgaggaggcagccacaggtgcgcagggcaggtgggaggcaggaccagcagggggcagcccctggagctcatagagccagggcagagcagttgcaggtgagcagggctcagtggaagatgggcaagcagggggcagctcctggagctcagggcaccagggcagtgtagccacaggtgagcaggggctggtgggaggcaggacaagcaggcggcagctcccggagctcagggaaccagggcagtgtagctgcaggtgagcaggggctggtggaaggcaggacaagcaggtggcagctcctggagctcagggaaccagggcagtgtagctgcaggtgagcaggggctggtgggaggcaggacgagcagggggcagcccctggagctcaggggaccaggggagggcatcagaaggtgagcaggggctggtgggaggcaggatgagtaaggggcagcccctttagctcaggggaccagggcagagcagcctcaggtgagcaggggcaggtgaggggcaggacgagcagggggcagtcctggagctcaggggatcagggcagagcatcagaaggtgagcatggctggtgggaggtgggcgagcagggggcagcccctggagctcaggggaccagggcagagcagtcgcaggtgagcacgggttggtgggaggtagaacgagtagggggcagctcctggagctcagggaacaggggagaacatcagaagatgagaagggccggtgggaggttgcagagcagggggcagcttctgcagctctgccagccagggcagagcagctgcaggtaagcagggctggtgggaagcaggggtagcaggtgggcagcccctggagctcagagagccggggaagatcatcggtaggtgagcaggggctggtggaaagcaggaggagcaaggggcagctcatggagctcagaggaccagggaagagcagccacaggtgaacaggggcaggtgggcggcagaatgagcaggggcagctcctggagctcaggggacaagggcagagcagccataggcaaacaggagcagggtcaggggacaggaggagcagggggcagctcttggagctcaggggaccagggcagagccgctgcaggtgagcaggggcaggtggggggcaggaggagcagggggcatctcctggagctcagagcaccagggcagagcagccacaggtgagcagggacggtgggaggcagcacgcagctcctagactttggcaggagctgggtagttgccggcagcagacagctgagggctggtgaaagtgcagtgcagcctcctggtgccgggaagggagtgtgagtccatcccactgagcagttggcaagggcgagctgggatggagaagggaaggcgttccagggctcggggctgagctctcaggcaggggcaggtgtggctgcagggggaacgtgtgcttgagaccaggagggtcccagggctggccccagcggaccctgggcaggaaggcctctgaggctggtgccccagaaggagcaagatgggctgccaggagccaggaccatcagcacaatgaagctgagtggaggtggtgcagggcagtgtagcagcagagggcagccagaggggcccattcagggcctgggcagagtcagccagagcctgtggtgcaggtgaggggaaggggtggtgagcggggccctggggctgagcagaggggatggcctggctgagggcagggcgcttagcttcctcagaggtcaggggcacaccccacctgcagtgggactccagggccactgggccagcagcagagagaaatggggcctccctgtggcctgggggtcctggcaccacgcagggtggggagggccaagggcaggtgcaaggctcctacctgtgctggggggcctgggttgagcccagcagggaccttgccgggggaagctctggagagagggaggaggtgggctggtggctgagaaggccaggccagggctgggagggtgacggtgtggtgactgagcctccagaagtaatgcaggacactgggaggcagggggcatccaggcactcagggccctgacctgggctgctgcacactggggctaaggggaaaggaggggagaggctgaggaggaggctcccggggcgatattccaaggcagggggttccggggccctggggctgaagggcgccgaccctatgcagtgtctggcccctctgctgcacagaagaaaagggccttggagggcagagggcaggctatgaccagggccctgggcaagtcaggcccactcactagcggagggccacgctggggcggcagggtcaggagcttcaggggactcaggggacccacgagaagccatctgagaacagtgtccactggtcaagccaggcacccataaaaggctggagtggggccaatgggcatgagccgtccctgaggtggcaccgatggccagagctgaggccaagctagaggccctggactgtgctgactcccggcagacacagagcgctgacctggctgccgagccccgcctcctaggctgcaggggtgcctgcagaagggcaccacagggccaccggtcctgcaagctttctggggcgggccgggcctgaccttggctttggggcagggagggggctaaggtgaggcaggtggcgccagccaggcgcacacccaatgcccgtgagcccagacactggaccctgcctggaccctcgtggatagacaagaaccgaggggcctctgcgccctgggcccagctctgtcccacaccgcagtcacatggcgccatctctcttgcagcttccaccaagggcccatcggtcttccccctggcgccctgctccaggagcacctctgggggcacagcggccctgggctgcctggtcaaggactacttcccagaaccggtgacggtgtcgtggaactcaggcgccctgaccagcggcgtgcacaccttcccggctgtcctacagtcctcaggactctactccctcagcagcgtggtgaccgtgccctccagcagcttgggcacccagacctacacctgcaacgtgaatcacaagcccagcaacaccaaggtggacaagagagttggtgagaggccagcgcagggagggagggtgtctgctggaagccaggctcagccctcctgcctggacgcatcccggctgtgcagtcccagcccagggcaccaaggcaggccccgtctgactcctcacccggaggcctctgcccgccccactcatgctcagggagagggtcttctggctttttccaccaggctccgggcaggcacaggctggatgcccctaccccaggcccttcacacacaggggcaggtgctgcgctcagagctgccaagagccatatccaggaggaccctgcccctgacctaagcccaccccaaaggccaaactctctactcactcagctcagataccttctctcttcccagatctgagtaactcccaatcttctctctgcagagctcaaaaccccacttggtgacacaactcacacatgcccacggtgcccaggtaagccagcccaggcctcgccctccagctcaaggcgggacaagagccctagagtggcctgagtccagggacaggccccagcagggtgctgacgcatccacctccatcccagatccccgtaactcccaatcttctctctgcagagcccaaatcttgtgacacacctcccccgtgcccacggtgcccaggtaagccagcccaggcctcgccctccagctcaaggcaggacaagagccctagagtggcctgagtccagggacaggccccagcagggtgctgacgcgtccacctccatcccagatccccgtaactcccaatcttctctctgcagagcccaaatcttgtgacacacctcccccatgcccacggtgcccaggtaagccagcccaggcctcgccctccagctcaaggcgggacaagagccctagagtggcctgagtccagggacaggccccagcagggtgctgacgcatccacctccatcccagatccccgtaactcccaatcttctctctgcagagcccaaatcttgtgacacacctcccccgtgcccaaggtgcccaggtaagccagcccaggcctcgccctccagctcaaggcaggacaggtgccctagagtggcctgcatccagggacaggtcccagtcgggtgctgacacatctgcctccatctcttcctcagcacctgaactcctgggaggaccgtcagtcttcctcttccccccaaaacccaaggatacccttatgatttcccggacccctgaggtcacgtgcgtggtggtggacgtgagccacgaagaccccgaggtccagttcaagtggtacgtggacggcgtggaggtgcataatgccaagacaaagccgcgggaggagcagtacaacagcacgttccgtgtggtcagcgtcctcaccgtcctgcaccaggactggctgaacggcaaggagtacaagtgcaaggtctccaacaaagccctcccagcccccatcgagaaaaccatctccaaaaccaaaggtgggacccgcggggtatgagggccacatggacagaggccagcttgacccaccctctgccctgggagtgaccgctgtgccaacctctgtccctacaggacagccccgagaaccacaggtgtacaccctgcccccatcccgggaggagatgaccaagaaccaggtcagcctgacctgcctggtcaaaggcttctaccccagcgacatcgccgtggagtgggagagcagcgggcagccggagaacaactacaacaccacgcctcccatgctggactccgacggctccttcttcctctacagcaagctcaccgtggacaagagcaggtggcagcaggggaacatcttctcatgctccgtgatgcatgaggctctgcacaaccgcttcacgcagaagagcctctccctgtctccgggtaaatgagtgcgacggccggcaagcccccgctccccgggctctcggggtcgcgcgaggatgcttggcacgtaccccgtgtacatacttcccgggcacccagcatggaaataaagcacccagcgctgccctgggcccctgcgagactgtgatggttctttccacgggtcaggccgagtctgaggcctgagtggcatgagggaggcagagcgggtcccactgtccccacactggcccaggctgtgcaggtgtgcctgggccgcctagggtggggctcagccaggggctgccctcggcagggtgggggatttgccagcgtggccctccctccagcagcagctgccctgggctgggccacgggaagccctaggagcccctggggacagacacacagcccctgcctctgtaggagactgtcctgtcctgtgagcgccctgtcctccgacccgcatgcccactcgggggcatgcctagtccatgtgcgtagggacaggccctccctcacccatctacccccacggcactaacccctggcagccctgcccagcctcgcacccgcatggggacacaaccgactccggggacatgcactctcgggccctgtggagagactggtccagatgcccacacacacactcagcccagacccgttcaacaaaccccgcactgaggttggccggccacacggccaccacacacacacgtgcacgcctcacacacggagcctcacccgggcgaaccgcacagcacccagaccagagcaaggtcctcgcacacgtgaacactcctcggacacaggcccccacgagccccacgcggcacctcaaggcccacgagccgctcggcagcttctccacatgctgaccagctcagacaaacccagccctcctctcacaaggtgcccctgcagccgccacacacacacaggcccccacacacaggggaacacacgccacgtcgcgtccctggcactggcccacttcccaatacagcccttccctgcagctggggtcacatgaggtgtgggcttcaccatcctcctgccctctgggcctcagggagggacacgggagacggggagtgggtcctgctgagggccaggtcgctatctagggccgggtgtgtggctgagtcccggggccaaagctggtgcccagggcgggcagctgtggggagctgacctcaggacactgttggcccatcccggccgggccctacatcctgggtcctgccacagagggaatcacccccagaggcccgagcccagcaggacacagcactgaccaccctcttcctgtccagagctgcaactggaggagagctgtgcggaggcgcaggacggggagctggacgggctgtggacgaccatcaccatcttcatcacactcttcctgttaagcgtgtgctacagtgccaccgtcaccttcttcaaggtcggccgcacgttgtccccagctgtccttgacattgtcctccatgctgtcacacactgtccctgacactgtccccaggctgtccccacctgtccctgacactgtcccccacgctctcacaaactgtccctcacactgtcccccatgctgtcacaaactgtcactgacactgtcccccatgctatccccacctgtccctgacactgtccctgacactgtctctcatgctgtccccactcatctgcgacactgtaccccacgctgtccccacttgtcctcaacaatgtcccccatgctgtccccacctgtccctgatgctgtcccccacactgtcccaatctgtccccaccactctcccccacgctgtccccacctgtccctgacactgtcccccatgccatccccatctgtcccgacaatgtccccagggtgtccccagctgtccctgatgctgtcccccacactgtccccacctctccctgacgctgtcccccacgtggtccccacttgtccctgatgctgtcccccacactgtccccacctgtccctgacactgtcccccatgccatccccatctgtcccgacaatgtccctatggtgtccccagctgtccctgatgctgtcccccacactgtccccacctgtccctgacgctgtcccccacactgtccccacctccccctgacactgtcccccacactgtccccacctctccctaacactgtcccacacactgtcccctcctgtccccaacactttcccccatgctgtccccaccagtccccaacactgtacaccatgcttttcccacctgtccccaacactgtcccccatgctgtcccctcctgtccccaacaatgtcccccatgctgtttcctcctgtccccaacactgtccgccactctgtttcctcctttccctgacactgtcccccactctgtccccacctgtagccaacactatcccctacgctgtctccacctgtccctgatgctgtcccccacactgtccccactcctccctgacactgtcccctatgctgtccccaccggttcctaacactgtcccccacactgtccctacctgtccccgacactttctcccatgctgttcccacgtgtctccaacactgtcccccacacagtctccacctgtccctgacactgtcccccatgctgtcctcacccatctctgacactgtacacatactgtccccacctgtccctgatgctgtcctccatgatgtccccacctctccctgacactgtcacccatgctgtccccacctgcccctgacactctcctccacgctgttctcacctgtccccaacactctcccccacactgtctccacctgtccctgacactgtcctccacgctgtccccacctatccctgacactgtcccccatgctgtcctcacctgtccccaacactctcctccacactgtcctcacctgtccccaacactctccccccacactgtctcaacctgtccctgacactgtcccccatgctgtcctcacctgtccctgacactgtcccccatgctgtcctcacctgtctctgacactgtcccccgtgctgtccccacctgacactatcttctgtgctgtccacatgctgttgctgccctggctctgctctccatgtccaggcctcagagcaggcagtggtgaggccctggcacatgggtggcatgaggggccggataggcctcaggggcagggctgtggcctgggtggcctgaggggtgagcaggcctcgggggcagggctgtggcctcgctcacccctgtgctgtgccttgcctacaggtgaagtggatcttctcctcggtggtggacctgaagcagaccatcatccccgactataggaacatgattgggcagggggcctagggccaccctctgcggggtgtccagggccacccagatcccacacacgagccgtgggccatgctcagccaccacccaggccacaactgcccccgacctcaccgccctcaaccccatggctctctgtctttgcagtcgccctctgagccctgacacgccccccttccagaccctgtgcatagcaggtctaccccagacctccgctgcttggtgcatgcagggagctggggaccaggtgtcccctcagcaggatgtccctgccctccagaccgccagatgctcacacaaaaggaggcagtgaccagcatccgaggcccccacccaggcaggagctggccctggagccaaccccgtccacgccagcctcctgaacacaggcgtggtttccagatggtgagtgggagcatcagccgccaaggtagggaagccacagcaccatcaggccctgttggggaggcttccgagagctgcgaaggctcactcagacggccttcctcccagcccgcagccagccagcctccattccgggcactcccgtgaactcctgacatgaggaatgaggttgttctgatttcaagcaaagaacgctgctctctggctcctgggaacagtctcggtgccagcaccaccccttggctgcctgcctacactgctggattctcgggtggaactggacccgcagggacagccagccccagagtccgcactggggagagaaggggccaggcccaggacactgccacctcccacccactccagtccaccgagatcactcagagaagagcctgggccatgtggccactgcaggagccccacagtgcaagagtgaggatagcccaaggaagggctgggcatctgcccagacaggcctcccagagaaggctggtgaccaggtcccaggcgggcaagactcagccttggtggggcctgaggacagaggaggcccaggagcatcggggagagaggtggagggacaccgggagagccaggagcgtggacacagccagaactcatcacagaggctggcgtccagccccgggtcacgtgcagcaggaacaagcagccactctgggggcaccaggtggagaggcaagatgccaaagagggtgcccgtgttcttgcgaaagcggggctgctggccacgagtgctggacagaggcccccacgctctgctgcccccatcacgccgttccgtgactgtcacgcagaatccgcagacaggaagggaggctcgagcgggactgcggccagcgcctgcctcggccgtcagggaggactcccgggctcactcgaaggaggtgccaccatttcagctttggtagcttttcttcttcttttaaattttctaaagctcattaattgtctttgatgtttcttttgtgatgacaataaaatatcctttttaagtcttgtacttcgtgatgggagccgccttcctgtgtccacgcgcctcctgcccccggtgggaagcacattcaggaggaggctggtccagctgcacctcgggggctccctgcatacgccccccgcctcctgcagccacacgcattgcccgagcgaccctccctggcccctgtcgctacatggacccccggggcttctcctcttttctacatggatgcagtttctcctcctgctgggcacggtgctgcctgccctggtcactctgcgggggacagggcctccagggaaagctgggtcgaggctgggagctggctcaggctggccaggcagagccacagggagggccttccagaaccaaccatggtccgaagcgagaggtgggtgtcagatctgtgtgcgtcagctcaggaccacagcggggcggctcccacagcagacatggatcctcccaggcctagagaccaggaatctgagatcaggatgcaggcagggctggtttctctcaagccctctctccttggcttgtagacaccgtctcctccctggtcctcacgtggccatccctctgtgtgcccgtgtcctaagcttctcttcttataagaacacacatcagattagattagtgaccccctatgaacttaatgacctctgtaaagaccccatctccaaatagtcacattgtgaggccagggattaagacttgaatatatgaatttgtaggggccacgatttaacccatcacagtccagactctggcccccaaaattcatgttcttctcacatgcagaatacattcatcctgtctcagcatccccctgggcactaggtcatgtagcaaggacggattttcaacagaaataactattgcaacagaagaaagagtccggcatgacctggactcaccttcatctgtgcagaggccacagccttgtaaagggaggtggtagggggagcagggtgggtgctcggggctcagtcgtcggggaagggaaaagttgcccagcgctggtcagcgtccccgggatgggacccgctgtgtccgtgccggccactgttgaggtcaggattctgtcctcccagagcctggagacacaggccccatccttcccaatggggacacttcagggagcggctctcaggtcccgagaaagaccctcctgggtcacaggaaatgcacagacatcgggaacagacagaaggacgtgtggttgcggccctctcagcagataccctgagaaagggaggtcggggttggtccaaacggtgagttctggtgcacggagctttctcaggcaggtgttgacggggcaggggtcggcctaggggtacggccagaagctgttagaaactgttagtgtctgctcaagtctttacaagccaaggttgaggccgagtggagaggctccgaggagcctggctggaactcagtcaaggacagggtcttgttactgcagtggctgcggtggctgcggtggctggaaaatgccgtcggagttgcctgtggcaggagagagaccatctcacccaggaaggaggagtggttggattcgtttgtgtggcatcgagcagctggagcttcaccaaacacagagttggggactaaatccccagactccaggccctgccatgccgtgggaaggctcgccactggagggtgggctccagggggcctggcctgaactgggtgctgaagcccagccctttaactctcaggacacgctgctgcagccccgcggggggtgagggagacagcacctggggtgcagggcgggcagctgctgcatcaccggctctatcccaagcccaaggatggcgtcccagagatgcaggagagctttgtccagagaaggtgccagccctcagggaccctgctggagagatctccaccctctgcccttcaaggggccctacgggcttccgggtgccctggtggggtgggctccagtccactgtctgaggatggacggcctggccaggataaggaaaggaaacccaggacggtgccgggctccgggtcattccgtgcactgagcaggctgagttgggaagaagcagatgcttcctgcagctcctgcccctgcagggcctggcgcctggaccaggttcccctggggaaattgggcccctccctgagccacccggggcccaccgccccctttccacctgggaccgagcatcctccagagggtcagccctcctgagggaacaccatgcccagccccaggaccctccctcaactctccagcaaggctgcactgtgggcggcccctgcacataccccagcagtccatgctgtgatgtaacatgacatggtgtgacgtggtgtgatgtctctggtgtgacgtggatgtcatgtggcatgatgcgacaggacatggtgtgatgttgtatgatgtggtatgacggtgtgatatccgaggggtgatgtgatgtggtgtgacatggtgtaatgtccctggtgtgaggtggcgttggacatgctgggatgtggtgtgacacagtgtgacatccctggtgtgatgtggtgtgatgaagcgtaacaggctgtgacatagtgtgacgtggtgtgatataatgtgatgtggtgtgaggtggcgtgacatggtgggatgtggtgtgacatggtataatgtccctggtgtgaggtggtgtgatgtggtatgatggggtgtggcagggtacgacatccctagtgtgatgataagtttcatggtatgatgtggcgtgacatccctggcgtgacataatgagatgtggtgtgacatggtgtggcattcctggtgtgactcctgtgttctgacatttgtggccaccccaggatacagaggtccctgtagccaagggaagggggagaatagaaccatctgagcatgttgacctggaggaattggtggcccttgagtccacgaagcccaccctgccaggtgcccctgccccacgtgacccaagtgggcttgcagagcagcaagcaggactctggttagactgcaagaaggacctgccaccacgtggccttgtgaggagacacagagcaaggcagtgacctcagcgtccacccagcacagggtgctgctgaagctcctcctgtcctctcagcagcggtctcagagcaaggcccaaggcaggctgaagagaggggcagagggaggatgctggggaggcaggggtgaggggagtgagagcccaggtttcagctgagcccctgcacagggaaggaggctagctgaacacccatctccccacacactcccaaccctgcctctgcccgaacacctcccagaaggcacctcaaactctgctacccacactcagcaaggggtatggtgtccccaccgagtccagccagtgaggcccggcacagccatgcctgtgccgaccactcccatggccaagctccctgctaacatggtaggacagagccaggcctggaggagacagaacatcagtcccatggggaagctccctgctcacatggcagggccgggcctggaggagacagaacgccccgtctggtatggtactcaggctgcacatgcctgccacgcacgggggccatgtggcacacacgggtactcacacggtcctcacacagggacacacgcacttgcaaccccagcacccacccagtgcactcatgcacgggctccccaggtgggtcacagtctcacgccttgagctactccatgtgccaggcccttcacccacattcccgtccccggtgccagctgttgagccacaccgtcttctctgtggatccctcccagcccgctcagcacaatggacatgctctctccagtccagcaactgcactggcctcttcccctcagaatccacgtctggccatctcccaggaaacccggaccaccacgggcagggaccaccttctcactgtccatgtggaccaccccacacctgaccccaggcagagtcacactacgacctgcttcaatattgaaaaggggaaaagctggaggaggggaaagatgaaagagaaaaaagcaagaggggagggtcacattcttgtgaggctttgattagagttcactgagcccccacgttgcatgaaaaggaggggtggagggagcaattacgcattcgccttgtgctcagtaaatctgcactttataagcaaataaacagagtagaggaagaagtcaaatatgcattcgtctcaggggtaggaggaacgatttcttgtctcattttgtcccatgtcatgaagaccggcctgttaatttatattctcagggtgagggaggccacctgggtagacctggcctatctgctgctgctatcactttggaaacaaaaggaaaggcatgactttttttttttttcatgactcagcttcccacctcaactgttcattttggcatagtgagtttggagtcctgagattttattttcctttcacaatggtcaaggtcgcaccctcagtattcaggagagctggtccaacccagacccctgccgtccctggacgcttttcaaatacgtgctgcagtctctgacactctctcaccatggtagaaactgaggtcttggtgagcctgcaagcccctgctcatggggacaatgcaggctgaaacccgcatttctgaccccaaagctcctgttcctttcactcacccccacaccagctctttgagtccagagctttgtccttgcctgagtcctaccctcagggacaggggcccaacccagacaccaacacatcataccctgagagggtgccaggagcccagagatgtttggagagcacagaagccctggaggctctgtggagatgctgcacatttctctattcaacagatactcaccaggtggccagcggcagagatgccacatggcatggagctcgccttggccaacaggacaggtgtggggttgggaggccttcccagggcactccttgaagcagagctgtggggaaaagttggggccaacctcagatctcctcatcaacaccggttctcctgccctcctgggccacagaaaactaagctccctggatactgcggctgggtggggccatgagggagaagaaatcacaacgagttaaaagatcattttctaaaactgttatgatcaggactcacataaacatatgacgacacatttcagagatgctctttatctcattaattaaggtgtcgtaaccagttcaaagtggaattctaagtactacacttacataattgattcaggaatgctaaaaggagttcatagatagatgcaaaactggccttttccctggaagatgaggagcaattcattgtccttccaaaggtgagaacttgaatttctaccaactcaaagagcttttgcattgctatcaattatgtacaacttagagcagtagtccccaacatttttggcaccaggaaccagttccatggaagacaatttttccacagaccaggatcgggggatggcttggggacaaagctgttctacctcagatcattaggcattaggatttcacgaggagtgtgcaacttagatctgggaatgtgcagctcgcaatagggttcgctcctatgagaatctaatgctgccactgatctgacgggaggtggagctcaggcaggaatgctcacacacccctcacctcctgctctgtggcccagttcctaacaggccatgagcagattccagtgcatgacccaggggttggggacccctggcttatagaggtgtaaaatagttcaaaggaaataaaagatgcagagctccatagaatgaaataacttggaagagtgtacaagacgatgccttgctttccatggaaggcacctactaatcttttggtccatttcagttcttcttaatgcttcctataaacatatataactgactgacacaaacagatccataatataaagaagaccactgtaaaccaatgagaaaaaaaatcaaataatccaacaaggaataggcaagagaattgaacagatgttttacagaagatatccaaatagccactaaacatatgaaaagatgttgaaccacactagtcaacagggaaatgaaaatgaaaaaccacatgagagaaagtagttctgattccaataattctggagcagctaatatcagactagccctttggcagatggcaattataaacactagaaacgctgtaagcacacacaacacccacacacaccaattgcaggcactggaacatgaccagaagtaggcaaacactagtaaggattattccgttaaatattcgtctgaagtcacactccagggcatgtaatgggtacagctagagttcaagcaggaaactgcagccctcctggtgaggagtgggatgccgggctacattttcagagcagctggaaatgaagagaagatgtccataaaggagaaggtcaccgaagggaaaccccacaatctgcaagtaaactccactgaaacctctggctgatcccttaggtgtgcatgggtagggaaaactccaaagggcccagcagaaagcaacacgtgtaaggtcaagagaactgagattccagctactgccaactgccaggcagacagactggggagtttgagtcaactcaagctaactgcttgctaacattgaaaaaaacaattaatgttctgctaaggaagaatgcaaaccccatagcctgtacacatgttaacaacatcaggtgcacatccaaaattaccaggtatgcaaagaaatatgaaaatgtgatccatagttaaaagaaaaagggatcaatggagatcaactccaagatgacctagatgcagatacagttatcagacaaggactttaaagaagttatgttaaatatgttcaaagacttaaaggaaaatatggttatcatgagtgactagatgaggtatctctataaaaaactgaaaatagttacaagaagcaaatgaaaattctagaactaagagtatgattcggaaatgaaaaacatcatttgaccaggcccagtggctcatacctgtaatcctagcactctgggaggccaaacatggaaggatcacttgatctcaggagtttgagaccaccctgggcaacatggtgaaaccccatctctattttattaaagaagaaaagaaagagaaaaacattacccaagtttaataacagattggacaagacataagaaggaactgaaaacttaaagatgcatcaatagaatatgtcaattctttttaatccaatccaaagaagagagagaaaaatactaaaaaatgaaaagagactcatcctgctggacaaggtgaagcattctaaaacatgtgaaactggagtccagagggggatgtaatacttccatgggaaaggtcaaccctaagctatatgcaaatgtacctgcgtaggctggtgtggtgggctgatggcatctccctggccaaatgtatgcccacctggaacctcagaatgtgaccttatttggaaatggggtctttacaaattaggttaaggacttgagatgatatcatactaaattttggatggatcccaagtccaaacactggtgtcctcataagaggagaggacaaagacatacatggaggtaagccatatgatgacaaaggagaagatgagcggtgtgtcaggagccacctgtgtttgtccatttgcattactgtaaagaaatacctgaggctgagtaacttatgaaggaaagaggttcaattggctcacagttctgcaggctgtataggaagtatggcaccagcatctgcttctggcgaggacctcaggaaacttacagtcatagcagaaggtgaagggagagcaggtatgccacatggcaagaatgggagcaagaggctgagggggggccccagacttaaacaactagactgtgtgtgagctgactggggcagaattcactcatcaccaaggggatgattctaaatcattcatgagggatcttcccccttgatctaatcacctcctaccaggccccacttccaacactgggaatcatattacaacatgagatttggaggggacaaatatataaaccatatccttccacccctggtcccccaaatctcatgttgcaaaatacaatcatgccttctcaacagtcccccaaagtcttacctcattccagcatcaacccaaatttcccaagtcccaagtctcatctgaagatgagtcccttccacctatcagcctatgaaatcaaacacaaattattgactcccaaaatacaatgagagtgcagacattgcgtaaacattcccattccacaagggagaagttggcaaaaagaaaggatctacatgccccatatatgtcagaaatccagcagggcagtcattaaatcttaaagctccaaggtaatctcctttgacttcatgtcccatatccagggcacattggtgcagggggtgggctcccaaggccttggaaaactctacccttgtggctttggaggatgttgcccctgtggcttctctcacatgatagagttgagtgcctgtggcttttccagattcagggtgcaaactgccagtggatccaccattctggggtctggaggacagtggcccccttcccacagctccactaggcagtgccctggtggggacattatatgggggttcaaccccacattctctttggcactgctctagtagaggttctctgtgagggctccatgctggcaggaggcttctgtctgggcacctaggctttctcatacatttctgaaatctagagggaagatgccaagcttccttcactcgtgtattctgggggcctacaggcttaacaccagatggaagtcaccaaggcttatagtggcttgcactctccaaagaagcagcctaagctatacttggggccctttgagccaaggctggagccagaggaaccaggatgtggagagcagtgtcccaaggctgcacaggcagcagtggccatggccatggcccacaaaaccatcctttccctcttggcctctgggcctgtgatgggaaagaccacctcagagatttccaaaatgccttcaaggccttcttccctttgttctggatatgagcacttagctcccttttagttatgctaatctctctagcaactggctgctccatagcctacttatatttgtctcctgaaaataccttttcttttctaccatatggccaggccatgaattttccaaattttttatgctctgcttccctttgttgatgaaaaaagccaaactctataaaacacttgacgagattgattctgagccacatgtgagagccatgaactgtggcacagcctcaaaaggtcctgagaacatgtgtgcaaggtgcttgggttgcggcctggttttatgttttagggagacatgagacatcaatcaatacatgtaaagtatacattcgtttggtttggaatggcaggacaattcaaagtggggaattccaaatcataggtggatttgaagattttctgattggcaattggctgaaaaatttaaattatctaaaaagttgaagtcagcaaaaagcaatgcttaagataaagcaggttgtggaagccaaggttcttgttatgtagatgaagcctccacgttccagagagaagagatggtcaatgtctcttatcagaacctaaaaggtgccagactcttggataaatctctcctgaatcaggaagagacctggaaagggaaaaagattctcgacagaatatacatttcctccacaagagacggctttgcagggccattccaaaatgtgtcagagaaatatattctggcataaaatactttaatttccttccatgcctgccaactgtcatgtgatgctataccagagtcaggttggaatttgatatcttattgctacaaagagtctgctttgtcagtcttaagctccctgttttaatgttaacaccggtcagctgagcctaaactccaacagggagagggtatagtgagggagtccaaaccaccctccccttcctgtcatggcctgaactggttttccaggtttctttggaatccccttgcattagcattttattttttcatttgcaccttttaaatatcagttccaactttaagtcattcctttgctcccatatcttaccatagactgttagaagcaaccaggtcacaccttagaaatgtctgcttagaagtatcttccaccagatgtcctaagtcatcactcttaaggtcaaacttccacagatccctagggcatgaatacaatgcagccaagttgtttcttaggatttaacaagcgtgacctttactccagttcccaataagttcctcatttccatctgagatttcatcagcctggctttcacagtccatatgtctatcagcattttggtgacaaccatttaatcagtctctaagaaattccaaactttccctcatcttcctgtcttcttctgagtcctccaaattcttctaacttctctgcctgttacctgattccaaagctgcttccaaattttcaggtatctttatagcaatgttccactcctcaataccaaatttctgtgttagtttgtgttactagaaaaaaaaatacatgaggctagtaatttataaagaaaagaggtttaggccaggcactgtggctcatacctgtcatcctagcattttgggaggcagaggcaggaggatcacttgagctcagaagtttgagaccaacctgggcaacatagtgagaacttgtcttgaaaagacaagaagaagggaagggtggggaagagcagaagggcagaagggcagggcagaagggaagggcagggaaggcagaagagaaggaaggaagggaggtttaattagttcatatttctgcaggccgttctggaaacacggccctggcatctgcttctggcgaggcctcagggagattgcaatcacagcagaaggcgaagggggagcaggcatgtcacatggcaagagggagcaagagaagaaagtggcacgtcccagacttttaaacaaccagctgtcacagggactaactgagggagaactcgctcatcacctgggagatggtgctaggccattcatgaggggtccagccccatgatctaatcacctcccaccaggcccacctccaacactgggaatcacatctcaacatgaaatttggagagacgcacatccaaactattgcaccacaggaagctggaagaggtggacggtcctcccctggagcactcagagacagccaccaacaccttgatctcagatttctgactcccagaactctgaaaaaatttttgttgttttaagccacatttgtgatattttgttacggcagccacagcacggatatagctggtaacagagttctttagcctccaaaatacaagcctggggtaaataactattgaatttggccacatggaaatcaggaagaatgtaataagcatcatcgatggacgggatgacctgggagatcgtggcaagtttaaagctaattggaagttggcaaccaaaaaatcctgtcttgcaaatggccaggaaattgccaagaaaacctttagaaaacatggttaaagatggagaaacccggatgactccctggtttctgaagaggtgcttaggcattgaagtgagactgatgagacttcacactgtacccttcagaagggcagacactcacgagataatcaaccacggctccctcgctgggaggcagacacagagctggaggcggcggccacaaactaggtgggcagagaggcgtcagcatcgggacttgcgggaggccctgggaaggaacaggcagcggtggggcctggacagccctggggaaaggaagttacttggaggagaccaggggcttgcatttgggccaaaaccaaggacaagagatcagctggtcccagggaactctggagcccaacaccccaccacgggtgcaggggcctgacaacccaacagagggctgtgggcaccgggcaccagcctgtggggggtctgaaggctgctgcccagccacacatgtcctggttctgaacaaagggttcaagagacacctggaaacctacccttctgagagcagcctcttagcctcagctggtattggcccctggtcaccccacatgccccgacagtggggcctggcctcagaaaggggcccctccatttgtactttctatctgatccttgacacagtgctaacaccaaagaccaaacccgaatcttggttcacatactctgcaaagaaatgactaagacaagttcttccggaggtcagttttagaacattattctgacttaattctgccttatctctgtgcaacaagaaaactatctgcacatctgtagtaaaatgtgaaggtaccttcattttgtttgtatactaaacttttaagaaatacctcactttttaaaacttggttttgtgttttgtatgcttataatattttccataatagatcattttaatgataaactctgaatcttctgacagaatgcagatcaatggattcctggccatcagggaggcgttgattgcaaaggggcctggtggaatatttggagagattctacatcttcttgcaactgttcatctggattacggtggtggttgcatgagtgtgcatttgttgaaactcacatgtcacaggatggattatactgaatgtaaactacacttgcgtaaatatgacttttaaaactttaaaaagttgggggatggttcactgccccggctcgaagccccctggccacgctgcctggccagcccacccgcatccctgccagcgcttgcctccagcgtcccaacagcctcctgaccccctgggctgctctaaaccctcaggagcgcagccatccgggatcagctggatggagatggggagcccgagactcgtgccacaccacgtcctcccacccccaccagccacacgcagacgtcaaagcagcactgtcctcgcacgcgctgctcccacccaccctggcatggccattccaggcctggggcaggaaggcagatgctccccctgcccccagacacaagcattcctgcacatacccccagcacacacacacactcccatgcgcacactgacacacacaggtgtgtgcagctgagacacagcccattcccaggcagtccagcccccgtcactgagggaaaggggcagcaccacggggccacaggagtggcagctggacacagagccaggcgctggcgaaggcccaggccactgaggcgggctgccggcatggctgggcgtgaaggccagaagagggcaggaggggccgtaggcactgtgcctattgggcctaggtgggcacacgcctggcaggagaggaacagcccagcccctgaggaaggggtgggggcaggggccatttctggaggccagggcagggccagcaccccaaggaaaagcagagcagggtgagaacggacatggggctcagagctgagcaggcctgctgggccccaggagggagacacagacgaccggggatctcaaggctggcagaggccagagatggagccccacctgggatgccatcctccttcctgggggcccaccctgcccggcccctccagcccagcacagcttggggcattggatagaaccgggagagagccgaccaggcactgaggcccctgccccaaatgcccacagcctggggaaaatgagcaggtacatgggaggggcaagtggagccccaggcacacccacacagtgcacacggcctcacctgggccggagggggcaggaggctcgccaccccgctgtggtttctctcctaatctcaccctgggtttctgccacacttgatgcaggtgatgtttctctgacattgtggactaagagttggtgctggaaggggttagccatcttggagatgttgctatggggtgcagggattttgcgtgtgagaaggacatgattatggggggagcggagggcaaactgtcatgggttaaaatgtgtcccctataaattcatgtgttgaagtcctaacccccaggaccacagaatgtgaccttgtttggaaacagtctttgcagctgcaatcaagttcagatgaggtcaccctggagtagcgcaagcctctgatccaatatgactgctgtcctcatgaaaagggggaatctgggcacagacagcacgtggggagaacgccctgtgaagatggtgctgcttccataagccaagagcagcagagacggccggcaaagcccagcagcagggagagagcctgggacagagtctcccatgacacagaggtgccagccccaccgaggcctccatcccagatgcccggcctccagaaccaggacggaataaacgtctgttgtttaagccacgcagtctggggtgctgtgttgccagggccacagttaacggatacgagtgttgtcctgagctgccagccccacaggctgcacgaggcctccctgccccagcccagtgcagactccccagccccctgggtgtgccatgggcagtgcggggacccctcactccgtcctcccccagcctgggaggttgagcccattatgagctccatggggtgaagctggaacgagaggctgggagccgactgggagcctgcggctggaggatggatttccccagggacccacacgtgcacctccacctgtctcctggacattctctctgagggcagggctggtgccagctcagggatccagcagggtcacaagggcaggccgggtccttgtggagagcacatttagtgggagggacatgatttcccttcaaagtgcccattctggacgcttcccgttccatgctggacgcttcctcttccacgctggatgcttcctgttccacactggatgcttcctgttccacgctggatgtttcctgttacactctggatgcttcctgttccacactggatgcttcctgttccatcctggatgcttcctgttccatgctggacatttcctgttccactctggatgctccctgttccatgctggatgcttcctgttccatgctggatgcttcctgttccatgctggacatttcctgttccactctgcatgcttcctgttccactctggatgcttcctgttccatggtggacgtttcctgttccactctgcatgcttcctgttccatgctggatgcttccttttccattctggatgcttcctgttccatgttggatgtttcttgttccactctggatgcttcctattccattctggatgcttcctgttccatgctggacatttcctgttccatgctggatgctttctgttacatcctggatgcttcctgttccatgctggatgttttttgtttgactctggatgcttccagttccattctggatgcttcctgttccatgctggatgcttccttttccattccgcacaattcctattccattctggacacttcctgtgcgacacctccttgggttttctgtctgcccagtccctctatcctcatcccgttccctgctacctcccacctccacaatcgtccttgcccagctcctccctctctctagagcttcggcctggcaaggtccctcctgatctcagtccaggctcccccagcacaggtaggagcctagcacctgcccttggacctccccaccctgcatggtgccagcatcccccggtccccagggaggccccatttctctctctgcttgtagtccagtggccctggagtcccactgcaactcgggtgtgcccctgacctctgaggaagttaagtgtcctgtccctagccaggctatcccgtctgctcagccccagggccctgcccccaaccccttcccctcacctgcaccacaggctctggccaactctgcccaggccctgaatgggcccctctggctcccctctgctgctacactgccctgcaccacctccactcagcttcagtgtgttcatccacctgtcccaagtcccctcggcccccaggagcacagctggtggccctggctcctggcagcccatcttgttccttctggagcaccagcctcagaggccttcctgtgcagggtccacttggccagccctgggaccctcctggtctcaagcacacacgttctccctgcagccagacctgcccctgcctgtgagctcagccctgagccttggaatgccttcccatctccatcccagctcgcctttgccagctgctcagcaggatgaactcacactcccctccctgcaccatgagtcagagccagctggagacacgcccaggccaaagcagccaccagggcctagtgggggccagaagcttcagatgagaggcccaggtattgagaggctgagatcacgggcagaatggtcataatcgctgccagtatcagtccagccccagggactcagagacagagaaaagagcagcacacaaggtctgggctccccaccttctcccgtgagtacgggggagtatgggggcagccaccacccccatccccacacacccatgaggcagcctcggctgtgtctggactccccctcgccctctgacccagaaaccaccagaagaaaagggaacttcaggaagtaagtggtgccgccggtttcaatcctgttcttagtctttgcagcgtggagttcacacacctggggacctgggggccgagctgtgatttcctaggaagacaaatagcggctgacggcaggggcggggctgcccacatgtacctcgccagaacaggaagggctgagacccccacctcggtgagtggggtcagcacagggcaggggcacaggctcgggaggaggacagagcctgggggcagccgtgggcgctcctggacctgagatgctgaacaggctccaagaggctggggagacatggggtcgaggccggccccacatggaggcccaagcggagccagcacgggggaggtgggcagccttcaggcaccgatgcccacccagtgcgagacgacggggaccgtgggcaggggcttccaagccaacagggcaggacacaccagaggctgactgaggcctccaggacgaccgggctgggagcacgaggaacatgactggatgcggcagagccggccgtggggtgatgccaggatgggcacgaccgacctgagctcaggaggcagcagagcgagggaggaggagaggccccaggtgaacggaggggcttgtccaggccggcagcatcaccggagcccagggcagggtcagcagtgctggccgtggggccctcctctcagccaggaccaaggacagcaggtgagccgggagcagagcagggagggtgagtgtggcagcaggacaggagggtggaagccaaggagcccagaggcagaggcagggacaggggaggcacaggggctgggctcagagccagctgatggggttggggcacctgctggcggggagcagggctgtggtcagcagtggagaggaggggagagctgtgctgagtgcacgggcgggagaagggaagagtccagggaggcccagaaaggcccagagtgcagcaggcctggggcgaggggaagggctgaggctccgtgcgttcagggaactgacccagcagagcagaggccactgaggagctgaggttccagagaggcttccagagcaggagcagtgcagggacaggaggatccgggagctcattcaggaggggcacatgggcaagggcaaggggctctgttggggagacctgactggacactggggctgctccacagcatagggaacacgccaagtgctgcaaaatcaaaaatgagggcagaaaaacagcccaaacctggacagagggtgccaggacaggcaggggggcaacagtgacctgagtgacattgctgcccgggttgagggagggcagagtgagcagggagcaggcattggagctcagggaccaggaccaagcagccacaggtgagcagggcaggtgggggcagaaggagcagggggcacctcctggagctcaggggaccagggcagagcagcctcaggtgagcaggggctggtgggcggcaggatgagcagggggaagaccctggagctcaggggaccagggcagagcatcagaaggtgagcatggctagtgggagatgggcaagcagggggcagcccctggagctcaggggaccaggacagagcatcaggaggtgagcatggctagtgggaggtgggcgagcagggggcagcccctggaactcaggggaccagggcagagcagccgcaggtgagcacgggctggtgggaggcgggaggaacagggggcagctcctggacttcaggggaccagggagggcatctgaaggtgaacaggggccagtggggggcaggatgagcagggggaagctcctggagctcagggagccaaggcagagcagccgcaggtcagcaggggcaggtgggaagcatggggagcaggtgggcagcccctggagctcagagagccagggcagatcatccacaggagagcaggggctggtaggaagcaggaggagcaagtgggcagcttttggagctcagagcaccagggcagaagagcctcaggtgagaaggggcaggtgggaggcagaataagcaggggacagcccctggacctcaggagaccagggcagagcatcacaacgtcagcatggctggtgggaggtgggcgagcagggggcagcccctggacctcagagagccagggcagatctgcaggtgagcaggggcaggtgggaggcaggaagagcaggaggcagctcctggagctcaggggatcagggcagagcagccacaggtgagcaggggcaggtaggaagcagaaagatcaggggtcagcccctggagctcaggggacaaggggagagcatcagaaggtgagcaggactgaggctcagcctcagggagccagggcagagcagctgcaggtgagcagggccggtgggaagcaggaggagcaggtgggcagcccctggagctcagagagccagggaagatcatccgcaggtgagcaggggctggtgggaagcaggaggagcaaggggcagctcctggagctcaggggaccagggcagagcagtcgcaggtgaacaggggcaggtggggggcaggaggagcaaggagcagctcctggagctcaggggaccagggcagagcagtcgcaggtgaacaggggcaggaggagcaaggggcagctcctggagctcaggggaccagggcagagcagccgcaggtgagcaggtgcaggtggggggcaggaggagcagggggcagctcctggagctcaggggaccagggcagagcagccgcaggtgagcaggggcaggtggggtgcaggaggagcagggggcaggcactggagctcaggggaccagggcagagcagtcgcaggtgaacaggggcaggtggggggcaggagtagcaaggggcagctcctggagctcaggggaccagggcagagcagtcgcaggtgaacaggggcaggtggggggcaggaggagcagggggcagctcctggagctcaggggaccagggcagagcagccgcaggtgagcaggtgcaggtggggggcaggaggagcaggggtcaggcactggagctcaggggaccagggcagagcagccgcaggtgagcaggggcaggtggggggcaggaggagcagggggcaggcactggagctcaggggaccagggcagagcagccgcaggtgagcaggggcaggtggggggcaggaggagcagggggcaggcactggagctcaggggaccagggcagagcagccgcaggtgagcaggggcaggtggggggcaggaggagcagggggcaggcactggagctcaggggaccagggcagagcagccgcaggtcagcagggccggtgggaggcaggacgagcaggggacaggcactagagctcagggcaaggcagccacaggtgagcagggctggtgggaggcatcactcagctcctagactttggcaggagctgggtagttgctggcaacagacagctgagggctggtgaaagtgcagtgcagcctcctggtgccgggaagggagtgtgagtccatcccactgagcagttggcaagggcgagctgggatggagaagggaaggcgttccagggctcagggctgagctctcaggcaggggcaggtgtggctgcagggggaacgtgtgcttgagaccaggagggtcccacggctggtcccagcggaccctgggcaggaaggcctctgaggctggcgccccagaaggagcaagatgggctgccaggagccagggccaccagcacaatgaagctgagtggaggtggtgcagggcagtgtagcagcagagggcagccagaggggcccattcagggcctgggcagagtcagccagagcctgtggtgcaggtgaggggaaggggtggtgagcggggccctggggctgagcagaggggatggcctggctgagggcagggcgcttagcctcctcagaggtcaggggcacaccccacctgcagtgggactccagggccactgggccagcggcagagagaaatggggcctccctgtggcctgggggtcctggcaccatgcagggtggggagggccaagggcaggtgcaaggctcctacctgtgctggggggcctgggttgagcccagcagggaccttgccgggggaagctctggagagagggaggaggtgggctggtggccgagaaggccaggccagggctgggagggtgacggtgtggtgactgagcctccagaagtaatgcaggacactgggaggcagggggcatccaggcactcagggccctgacctgggctgctgcacactggggctaaggggaaaggaggggagaggctgaggaggaggctccaggaggctattccaaggcagggggttccggggccctggggctgaagggcgccgaccctatgcagtgtctggcccctctgctgcacagaagaaaagggccttggagggcagagggcaggctatgaccagggccctgggcaagtcaggccaactcactaggggagggccacgctggggcggcagggtcaggggcttcagggggctcgggggacccacgagaagccatctgagaacagtgtccactggtcaagccaggcacccataaaaggctggagtggggccaatgggcatgagccgtccctgaggtggcaccgatggccagagctgaggccaagctagaggccctggactgtgctgactcccggcagacacagagcgctgacctggctgccgagccccgcctcctaggctgcaggggtgcctgcagaagggcaccacagggccaccggtcctgcaagctttctggggcaggccgggcctgaccttggctttggggcagggggtgggctaaggtgacgcaggtggcgccagccaggcgcacacccaatgcccgtgagcccagacactggacgctgaacctcgcggacagttaagaacccaggggcctctgcgccctgggcccagctctgtcccacaccgcggtcacatggcaccacctctcttgcagcctccaccaagggcccatcggtcttccccctggcaccctcctccaagagcacctctgggggcacagcagccctgggctgcctggtcaaggactacttccccgaaccggtgacggtgtcgtggaactcaggcgccctgaccagcggcgtgcacaccttcccggctgtcctacagtcctcaggactctactccctcagcagcgtggtgaccgtgccctccagcagcttgggcacccagacctacatctgcaacgtgaatcacaagcccagcaacaccaaggtggacaagaaagttggtgagaggccagcacagggagggagggtgtctgctggaagccaggctcagcgctcctgcctggacgcatcccggctatgcagccccagtccagggcagcaaggcaggccccgtctgcctcttcacccggaggcctctgcccgccccactcatgctcagggagagggtcttctggctttttccccaggctctgggcaggcacaggctaggtgcccctaacccaggccctgcacacaaaggggcaggtgctgggctcagacctgccaagagccatatccgggaggaccctgcccctgacctaagcccaccccaaaggccaaactctccactccctcagctcggacaccttctctcctcccagattccagtaactcccaatcttctctctgcagagcccaaatcttgtgacaaaactcacacatgcccaccgtgcccaggtaagccagcccaggcctcgccctccagctcaaggcgggacaggtgccctagagtagcctgcatccagggacaggccccagccgggtgctgacacgtccacctccatctcttcctcagcacctgaactcctggggggaccgtcagtcttcctcttccccccaaaacccaaggacaccctcatgatctcccggacccctgaggtcacatgcgtggtggtggacgtgagccacgaagaccctgaggtcaagttcaactggtacgtggacggcgtggaggtgcataatgccaagacaaagccgcgggaggagcagtacaacagcacgtaccgtgtggtcagcgtcctcaccgtcctgcaccaggactggctgaatggcaaggagtacaagtgcaaggtctccaacaaagccctcccagcccccatcgagaaaaccatctccaaagccaaaggtgggacccgtggggtgcgagggccacatggacagaggccggctcggcccaccctctgccctgagagtgaccgctgtaccaacctctgtccctacagggcagccccgagaaccacaggtgtacaccctgcccccatcccgggatgagctgaccaagaaccaggtcagcctgacctgcctggtcaaaggcttctatcccagcgacatcgccgtggagtgggagagcaatgggcagccggagaacaactacaagaccacgcctcccgtgctggactccgacggctccttcttcctctacagcaagctcaccgtggacaagagcaggtggcagcaggggaacgtcttctcatgctccgtgatgcatgaggctctgcacaaccactacacacagaagagcctctccctgtctccgggtaaatgagtgccacggccggcaagcccccgctccccaggctctcggggtcgcgcgaggatgcttggcacgtaccccgtgtacatacttcccaggcacccagcatggaaataaagcacccagcgcttccctgggcccctgcgagactgtgatggttctttccacgggtcaggccgagtctgaggcctgagtggcatgagggaggcagagtgggtcccactgtccccacactggcccaggctgtgcaggtgtgcctgggccgcctagggtggggctcagccaggggctgccctcggcagggtgggggatttgccagcgtggccctccctccagcagcagctgccctgggctgggccacgagaagccctaggagcccctggggacagacacacagcccctgcctctgtaggagactgtcctgttctgtgagcgccctgtcctccgacccgcatgcccactcgggggcatgcctagtccatgtgcgtagggacaggccctccctcacccatctacccccacggcactaacccctggcagccctgcccagcctcgcacccgcatggggacacaaccgactccggggacatgcactctcgggccctgtggagagactggtccagatgcccacacacacactcagcccagacccgttcaacaaaccccgcactgaggttggccggccacacggccaccacacacacacgtgcacgcctcacacacggagcctcacccgggcgaaccgcacagcacccagaccagagcaaggtcctcgcacacgtgaacactcctcggacacaggcccccacgagccccacgcggcacctcaaggcccacgagccgctcggcagcttctccacatgctgacctgctcagacaaacccagccctcctctcacaaggtgcccctgcagccgccacacacacacaggggatcacacaccacgtcacgtccctggccctggcccacttcccagtgccgcccttccctgcagctggggtcacatgaggtgtgggcttcaccatcctcctgccctctgggcctcagggagggacacgggagacggggagcgggtcctgctgagggccaggtcgctatctagggccgggtgtctggctgagccccggggccaaagctggtgcccagggcgggcagctgtggggagctgacctcaggacattgttggcccatcccggccgggccctacatcctgggtcctgccacagagggaatcacccccagaggcccaagcccagggggacacagcactgaccacccccttcctgtccagagctgcaactggaggagagctgtgcggaggcgcaggacggggagctggacgggctgtggacgaccatcaccatcttcatcacactcttcctgttaagcgtgtgctacagtgccaccgtcaccttcttcaaggtcggccgcacgttgtccccagctgtccttgacattgtcccccatgctgtcacaaactgtctctgacactgtcccacaggctgtccccacctgtccctgacgctgtcccccatgctctcacaaactgtccctgacattgtccccaatgctgcccccacctgtccaacagtgtcccccaggctctccccacatgtccccgacactgtcccccatgctgtccccatctgtccccaacactgtcccccaccctgtccccctttgtccccaacactgtcccccacagtttccacctgtccctgacactgtcccccatgctttccccacctgtccctgacaccatcccccactctgtcccctatagttcctggccctgtcccccacgctgtcccctacagtacctggcactgtcccccatgctgtcccctcctgtatgaaaccctgtcccacatgctgtccccacctgtccgtgacaatatcccccacactgtccccacctgtccccgacactctcctccacgttgttcttacctaaacccgacactttcctccatgctgtccccacccatctccgacactgtaccccacgttgtccccacctgtcctcaacactgtcccccatgctgtccccacctgtccccaacactctcctccatgctgtccccacctgtccctgatattgtcccccatgcagtctccacctgtccccaatgctgtcccccaggctgtacctaccagtacaacactgtcccccatgctgtccccacctgtccctgacactgtcccccacgctgtcccctcctgtccccgacactgtcccccacactgtccccacctgtccccaacactatcctccatgctgtcccctcctgtccccacctgtcccctacactgtcccccatgctgtccccaccagtccccaaaactttcctccacactgtccccacctgtccccaacactgtcccccacgctatcccccctgtccccgacaatgtccccactgtttcctcctgttccctcctatccctgacactgtccgccatgctgtccccacctgtccctgacactgtctcccactctgtcccctataatccctgacactgtcccccacgccgtcccctcccgtatgcaccactgtcccccaagctgtccccacctgtcctcaacacagtcccccatgctgtccccacctgtccccaacactctcctccatgtccccacctgtccctgatattgtcccccatgcagtccccacctgtccccgatgctgtcccccgggctgtacctaccagtccaacactgtcccccacactctccccacctgtccctgatactgtcccccatgctgtccccacctgtcccggacactgttctccacgctctcccctcctgtccctgacactgtcccccacactgtccccacctgtccccaacactatcctccatcctgtcccaacctgtctcctacactgtcccccatgctgtccccaccagtccccaacactgtcctccatgctgtcccccatgtccccaacactgtcccccatgctatctcccctgtccctgacaatgtccccactgtttcctgtcccctcctatccctgacactgtcccccatgctgtccccacctgtcccccacatggtctccaccggtccctgacactgtctcccactctgtcccctataatccctgacactgtcccccacaccgtcccctcctgtatgcaccactgtcccccatgctgtccccacctgtccctgatgctgtcctccacacagtccccacctctccctgacactgtccccatctctccccaacactctcctccatgctgtccttaactgtccccaacactcttccacactctgtctccacctgtccctgacactgtcccccacactgtcctcacctgtgtctgacactgtcccccacgctgtccccacctgtccctgacgctgtcttctgtgctgtccacatgctgttggtgccctggctctgctctctatcaccaagcctcagagcaggcagtggtgaggccatggcacctgggtggcatgaggggccggatgggcctcaggggcagggctgtggcctgcgtggactgacgggtgggtgggccttgggggcagagaggtggcctcagtgccctgaggggtgggtggggctcgggggcagggctgtggcctcgctcacccctgtgctgtgccttgcctacaggtgaagtggatcttctcctcggtggtggacctgaagcagaccatcatccccgactacaggaacatgatcggacagggggcctagggccaccctctgcggggtgtccagggccgcccagaccccacacaccagccatgggccatgctcagccaccacccaggccacacctgcccccgacctcaccgccctcaaccccatgactctctggcctcgcagttgccctctgaccctgacacacctgacacgccccccttccagaccctgtgcatagcaggtctaccccagacctccgctgcttggtgcatgcagggcactgggggccaggtgtcccctcagcaggacgtccttgccctccggaccacaaggtgctcacacaaaaggaggcagtgaccggtatcccaggcccccacccaggcaggacctcgccctggagccaaccccgtccacgccagcctcctgaacacaggcgtggtttccagatggtgagtgggagcgtcagccgccaaggtagggaagccacagcaccatcaggccctgttggggaggcttccgagagctgcgaaggctcactcagacggccttcctcccagcccgcagccagccagcctccattccgggcactcccgtgaactcctgacatgaggaatgaggttgttctgatttcaagcaaagaacgctgctctctggctcctgggaacagtctcagtgccagcaccaccccttggctgcctgcccacactgctggattctcgggtggaactggacccgcagggacagccagccccagagtccgcactggggagagaaggggccaggcccaggacactgccacctcccacccactccagtccaccgagatcactcagagaagagcctgggccatgtggccgctgcaggagccccacagtgcaagggtgaggatagcccaaggaagggctgggcatctgcccagacaggcctcccagagaaggctggtgaccaggtcccaggcgggcaagactcagccttggtggggcctgaggacagaggaggcccaggagcatcggggagagaggtggagggacaccgggagagccaggagcgtggacacagccagaactcatcacagaggctggcgtccagccccgggtcacgtgcagcaggaacaagcagccactctgggggcaccaggtggagaggcaagacgacaaagagggtgcccgtgttcttgcgaaagcagggctgctggccacgagtgctggacagaggcccccacgctctgctgcccccatcacgccgttccgtgactgtcacgcagaatctgcagacaggaagggagactcgagcgggagtgcggccagcgcctgcctcggccgtcagggaggactcctgggctcactcgaaggaggtgccaccatttcagctttggtagcttttcttcttcttttaaattttctaaagctcattaattgtctttgatgtttcttttgtgatgacaataaaatatcctttttaagtcttgtacttcgtgatgggagccgccttcctgtgtccacgcgcctcctgcccccggtggaaaacacggtcaggaggaggctggtccagctgcacctcgggggctccctgcatacgccccccgcctcctgcagccacacgcattgcccgagcgaccctccctggcccctgtcactacatggacccccggggcttctcctcttttctacatggatgcagtttctcctcctgctgggcacggtgctgcctgccctggtcactctgcgggggacagggcctccagggaaagctgggtcgaggctgggagctggctcaggctggccaggcagagccacagggagggccttccagaaccaaccatggtccgaagcgagaggtgggtgtcagatctgtgtgcgtcagctcaggaccacagcggggcagctcccacggcagacatggatcctcccaggcctagagaccaggaatctgagatcaggatgcaggcagggctggtttctctcaagccctctctccttggcttgtagacaccgtctcctccctggtcctcacatggccatacctctgtgtgcccgtgtcctaagcttctcttcttagaacacacatcggattagattagtgaccccctatgaacttaatgacctctgtaaagaccccatctccaaatagtcacattgtgaggccagggattaagacttgaatatatgaatttgtaggggccacgatttaacccatcacagtccagactctggcccccaaaattcatgttcttctcacatgcaaaacacattcatcctgtctcagcatccccctgggcactaggtcatgtagcaaggacggattctcaacagaaataactattgcaacggaagaaagagtccggcatgacctggactcaccttcatctgtgcagaggccacagccttgtaaagggaggtggtagggggagcagggtgggtgctcggggctcagtcgttggggaagggaaaagtttcccagcgctggtcagcgtccccgggatgggacccgctgtgtccgtgccggccactgttgaggtcaggattctgtcctcccagagcctggagacacaggccccatccttcacaaaggggacacttcagggagtggctctcaggtcccgagaaagaccctcctgggtcacaggaaatgcacagacatcaggaacggatagaaggtcgtgtggttgcggccctctcagcagataccctgagaaagggaggtcggggttggtccaaacggtgagttctggtgcacggagctttctcaggcaggtgttgacggggcaggggtcggcctaggggtacggccagaagctgttagaaactgttagtgtctgctcaagtctttacaagccaaggttgaggccgagtggagaggctccgaggagcctggctggaactcagtcaaggacagggtcttgttactgcagtggctgcggtggctgcggtggctgcgaaatgccgtcggagttgcctgtggcaggagagagaccatctcacccaggaaggaggagtggttggattcgtttgtgtggcatcgagcagctggagcttcaccaaacacagagttggggatgaaatccccagagcccggaccctgccatgccgtgggaaggctcgctgctggagggtgggctccagggggcctggcctgaactgggtgctgaagcccagccctttaactctcaggacacgctgctgcagccccgcggggggtgagggagacagcacctggggtgcagggcgggcagctgctgcatcaccggctctatcccaagcccaaggatggcgtcccagagatgcaggagagctttgtccagagaaggtgccagccctcagggaccctgctggacagctctccaccctctgcccttcaaggggccctacgggcctccgggtgccctggtggggtgggctccagtccactgtctgaggatggacggcctggccaggataaggaaaggagacccaggacggtgccgggctccgggtcattccgtgcactgagcaggctgagttgggaagaagcagatgcttcctgcagctcctgcccctgcagggcctggcgcctggaccaggttcccctggggaaattgggcccctccctgagccacccggggcccacctcccactttctacctgggaccgagcatcctccagagggtcagccctcctgcgggaacaccatgcccagccccaggaccctccctcaactctccagcaaggctgcccctgcacgcccccagcagcccatgctgtgatgtagcatgacatcatgtgatgtggtgtgatgtcctatgacagggtgacatccctggtgtgatgtggtgtgatgtggcgtgatgtcctttgtgtgatgtggtgttggactacatggttggacatagtgtgatgtggtgtgaccgagtgtgacatccctggtgagatgtggtgtgacatggtgtgaggtgttgtgacatggtgtaatgtccctggtgtgaggtggtatgacatggtgtgaggtgttgtgacatggtataatgtccctggtgtgaggtggtgttggacatgatgtgatgtggtgtgacagagtgtgatgggtatgacatccctggtatgatgcggtatgagattatgtggtatggtgtgacatgatgtgatgtggcgtaacatccttggggtaatggggtatgatgtcgtttgacgggtgtggtggtgtggggtgtgatgaggtgtggtgtgacatgatgtgacctgtgacgtgctgtgtcagggtgccacatccttgctgtgatgtgatgcggtgtgacacggtgtgatgtggcatgatggggtgtgacccggtacgacatccccagtgtgatgagttaatggtgtgatgtgtgacatccctagtgtgacatagtgtgatgtggtgtgatgaagagggcctcgccctccacagctgtgggtatttctcatcaggtggaaacacgagactgagaaaagaaataagacacagagacaaagtgcagagaaagaacagtgagcccaggggaccggcacactcagcacgcgaggacctgcaccggcaccggtctctgggttccctcagtatttattgatgactattttcactatctccatacggggagtgcggcaggagaacagcgtgaacagggtgatgatggggagaaggtcagcaggaaaacatgtgagtaaaggaatctgcatcataaataactcccagggaaggtaccgtgctgggatgtacacatagactagatttatgtttctctttacccaaacatctcagtgtagtgaagagtaacagagccgtatcaccgctagcatatcttgtctccagccttagggcggttttctcctacctcagaatagaatgaatggtgggtgtaaagcccagacattccattcccagggacgtgcaggaaacagaggccttcttcttatctcaaccgtaaagaggccttcctcttttaccaatcctcctcagcacagaccctttacaggtgtcaggctgggggacagtcaggtctttcccttgccatgaggccatatctcaggctgtctcagtgaggagaaactgggacaatacctaggctttctccggcagaggtcccttcagctttccgcagcgtattctgtgcctagttaacagagaatggagaatggcgatgacttctaccaagcacactgcctgcaaacgtatcgtgaaccaggcacgtcctgcgcagccctaaaccccttaaaccttgattccatgcagcacaggtttctgtgagcacagtgttggggctaaagttacaggttaacagcgtctcaaagcagaacaatttttctttgtacagatcaaaatggagtttcttatgtgttccttttctacataggcacagtaacagtctgatctttcttttccccagtgtgacatggtgtgacgttcctggtgtgattcttgtgttgtgacatttgtggtcaccccaggatacagaggtctctgtggccaagggaagggggagaatggaaccatctgagcatgttgacctggaggaattggtggcccttgagtccacgaagcccacccttccaggtgcccctgccccacgtgacccaagtgggcttgcagagcagcaagcaggactctggttagacaggaggaaggacctgccaccacgtggccttgtgaggagacagagcgaggctgtgacctcggcgtccgaggcaggctgaagagacgggcagagggaggatgctggggaggcaggggtgaggggagtgagagcccaggtttcagctgagcccctccacagggaaggagcctagctgaacacccatctccccacacactcccaaccctgcctctgcccgaccacctcccagaaggcacctcgacccctctgctacccacactcagcaaggggtatggtgtccccaccgagtccagccagtgaggcccggcacagccacgcctgtgcccaccactcccatggccaagctcgctgctaacatggcaggacagggccaggcctggaggagacagaacatcagtcccatggggaagctccctgctcacacggcagggccgggcctggagaagacagaacaccccatccggcatggtactcaggctgcacatgcctgccacgaacgggggccacgcgacaatgctgccacgcacgggggacacacgacaatgcctgccatgcatagtggccacacaacaatgcctgccacgcgtgggggacacgcgacgatgcctgccatgcatggggacacgtgacacacacatacacacacgggcctcacaggcacacgaatgtttgcaaccccagcacccacccagcacactcaggcacaggctccctgggcgggtcacaacctcacaccttgagctactccatgtgccaggctcttcacccacgttcccgtccccggtgctagctattgagccacactgtcttctctgtggatccctcccagcccactcagcacaatggacatgctctctaccatccagtgactgcaccggcctcttcccctcagcacccacgtctggccatctcccaggaaacccggaccaccacgggcagggaccaccttcctcactgtccacatggaccaccccacacctgacctcagatgcagtcacactacgtcctgcttcaatattgaaagggggaaaagctggaggagggtaaagatgaaagagaaaaaagcaagaggggagggtcacattcttctgaggctttgattacatctcactgagccccccacgttgcatgaaaaggaggggtggagggagcaattacgcattcgccttgtgctcactaaatctacactttataagcaaataaacagagtagaggaagaagtcaaatatgcattcgtctcaggggtaggagggacgatttcttgtctcattttgtcccatgtcatgaagaccagctgttaatttatattctcagggtgagggaggccacctgggtagacctggcctatctgctgctgctatcagtttggaaacaaaaggaaacgcatgactttttttttttttcatgactcagcttcccacctcaacggttcattttggcatagtgagtttggagtcctgagattttattttcctttcacaatggtcaagatcgcaccctcagtattcaggagagctggtccaacccagacccctgctgtccctggacacttgaaatacgtgctgcagtctctgacactctctcaccatggtagaaactgaggtcttggcgagtctgcagcccctgctcatggggacaatgcaggctgaaacccgcatttctgacctcaaagctcctgttcttttcactcacccccacaccacctctttgagtccagagctttgtccttgcctgagtcctaccctcagggacaggggcccaacccagacaccaacacatcataccctgagagggtgccaggagcccagagatgtttggagagcacagaagccctggaggctctgtggagatgctgcacatttctctattcaacagatactcaccaggtggccagcggcagagatgccacatggcatggagctcgccttggccaacaggacaggtgtggggttgggaggccttcccacggcactccttgaagcagagctgtggggaaaagttggggccaacctcagatctccccatcaacaccggttctcctgccctcccgggccacagaaaactaagctccctggatactgcggctgggtggggccatgagggagaagaaatcacgagttaagagatcattttttaaaagtattatgatcaggactcacataaacatatgacgacacatttcagagatgctctttatctcattaattaaggtgttgcaaccagttcaaagtggaattctaagtactacacttacataattgattcaggaatactaaaaggagttcatagatagatgcaaaactggccttttccctggcagaggaggagcaattcattgtcctttcaaagatgagaacttggatttctaccaactcaaagagtttttgcattgctatcaattatgtacaacttagagccgtggtccccaacatttttggcaccaggaaccagttccatggaagacaatgtttccacagaccaggatcgggggatggtttggggacaaagctgttccacctcagatcattaggcattagggtgtcataaggagcatgcaacttagatcccgggaatgtgcagctcgcaatagggttcgctcctatgagaatctaatgctgccactgacctgacgggaggtggagctccggcaggaatgctcacacacccctcacctcctgctctgtgtcccagttcctaacaggccatgaactggttccagtgcatgacccaggggttggggacccctggcttatagaggtgtaaaatagttcaaaggaaataaaagatgcagagctccatagaataaaataacttggaagagtctacaagacgatgccttgctttccatggaaggcaccaagtaatcatttggtccatttcagtttttctcaatgtttcctataaacatatataactgactgacacaaacagatccataatataaagaagacccctgtaaaccaatgagaaaaaaaaatcaaataatctaatgaggaataggcaagagaattgaacagatgttttacagaagatatccaaatagccactaaacatatgaaaacatgttgaaccacactagtcaacagggaaatgaaaatgaaaaaccacgtgagagaaagtagttctgattccaataatgctggagcagctaatatcagaccagccctttggcagaaggcaattataaacactggaaatgctgtaagcacacacaacacccacacacaccaattgcaggcactgggacatgaccagaagtaggcaaacactagtaaggattattccgtgaaatattcgtctgaagtcacaccccagtgcaggtaatgggtgcagctagagtttaagcaggaaactgcagccctcctggtgaggagtgggatgcagggctgcattttcagagcagctggaaatgaagagaagatatccgtaaaggagaaggtcaccgaagggaaaccccacaatctgcaagtaaactccagtgaaacctctggccgattccttaggtgtgcatgggtagggaaaactccaaagggtccagcagaaagcaacacctgtaaggtcaagagaactgagattccagctactgccaactgccaggcaggcagacttgggagtttgagtcaactcaagctaactgcttgctaacattgaaaaaaacaattaatgctctgctaagaaagaatgcaaaccccatagcctgtaccacatgttatcaacaacatcaggcacacatccaaaattactatgtatgcaaagaaacatgaaaatgtgatccaaagtcaaaagaaaaagggatcaatggagatcaactccaagatgacctagatgcagatacagttatcagacaaggactttaaagaagttatgttaaatatgttcaaagacttaaaggaaaatatggttatcatgagtgactagatgaggtatctctataaaaaactgaaaatagttacaagaagcgaatgaaaattctagaactaaaagtatgattcggaaatgaaaaacatcatttgaccaggcccagtggctcatacctgtaatcctagcactttggaaggccaacaaggaaggatcacttgacctcaggagttggagaccagcctgggcaacatggtgaaaccccatctctattttattaaaaaagaaaagaaagagaaaaacattacccaagtttaataacagattggacaagacataagaaggaacagaaaacttaaagatgcatcaatagagtatatcaattctttttaatccaatccaaagaagaaagagaaaaatactaaaaaatgaaaagagattcatcctgctggagaaggcgaagcattctaaaacatgcaaaactggagtccagagggggatgtaatacttccatgagaaacgtcaaccctaagctatatgcaaatgtacctgcgtaggctggtgtggtgggctgatggcatctccctggccaaatgtatgcccacctggaacctcagaatgtgaccttatttggaaatggggtctttacaaattaggttaaggacttgagatgatatcatactaaattttggatggatcccaagtccaaacactggtgtcctcataagaggagaggacacagacacacatggaggtaagccatatgatgacaaaggagaagatgaggggtgtgtcaggagccacctgtgtttgtccatttgcattactgtaaagaaatacctgaggctgagtaacttatgaaggaaagaggttcaattggctcacagttctgcaggctgtataggaagtatggcaccagcatctgcttctggcgaggacctcaggaaacttacagtcatagcagaaggtgaagggagagcaggtatgccacatggcaagaatgggagcaagaggctgagggggggccccagacttaaacaactagactgtgtgtgagctgactgggggagaattcactcatcaccaaggggatgattctaaatcattcatgagggatcttcccccttgatctaatcacctcctaccaggccccacttccaacactgggaatcatattacaacatgagatttggaggggagaaatatataaaccatatccttccacccctggtcccccaaatctcatgttgcaaaatacaatcatgccttctcaacagtcccccaaagtcttacctcattccagaatcaacccaaatttcccaagtcccaagtctcatctgaagatgactcccttccacctatcagcctatgaaatcaaagacaaattattgactcccaaaatacaatgagagtgcagacattgggtaaacattcccattccacaagggagaagttggcaaaaagaaaggatctacatgccccatatatgtcagaaatccagcagggcagtcattaaatcttaaagctccaaggtaatctcctttgacttcatgtcccatatccagggcacattggtgcagggggtgggctcccaaggccttggaaaactctacccttgtggctttggaggatgttgcccctgtggcttctctcacatgatagagttgagtgcctgtggcttttccagattcagggtgcaaactgccagtggatccaccattctggggtctggaggacagtggcccccttcccacagctccactaggcagtgccctggtggggacattatatgggggttcaaccccacattctctttggcactgctctagtagaggttctctgtgagggctccatgctggcaggaggcttctgtctgggcacctaggctttctcatacatttctgaaatctagagggaagatgccaagcttccttcactcctgtattctgggggcctacaggcttaacaccagatggaagtcaccaaggcttatagtggcttgcactctccaaagaagcagcctaagctatacttggggccctttgagccaaggctggagccagaggaaccaggatgtggagagcagtgtcccaaggctgcacaggcagcagtggccatggccatggcccacaaaaccatcctttccctcttggcctctgggcctgtgatgggaaagaccacctcagagatttccaaaatgccttcaaggccttcttccctttgttctggatatgagcacttagctctcttttagttatgctaatctctctagcaactggctgctccatagcctacttatatttgtctcctgaaaataccttttcttttctaccatatggccaggctgtgaattttccacatttttaatgctctgcttccctttgttgatgaaaaaagccaaactccataaaacacttgaaaaattgattctgagccaaatatgagagccatgaactgtggcacagcctcaaaaggtcctgagaacatgtgtgcaaggtgcttgggttgcggcctggttttatgttttagggagacatgagacatcaatcaatacatgtaaagtatacattggtttggtttggtttggaaaagcaggacaattcaaagtggggaattccaaatcataggtggatttgaagattttctgattggcgattggctgaaaaagttaaattatctaaaaagttgaagtcagcgaaaagcaatgcttaagataagggggttgtggaagccaaggttcttgttatgtagacgaagcctccacgttccagagagaagagatggtcaatgtctcttatcagaacctaaaaggtgccagactcttggataaatctctcctgaatcaggaagagacctggaaagggaaaaagattctcaacagaatatacatttcctccacaagagacggctttgcagggcccttccaaaatgtgtcagagaaacatattctgggataaaatactttaatttccttccatgcctgccacctgtcatgtgatgctataccagagtcaggttgggatttgataccttattgctacaaagagtctgctttgtcagtcttaagctccctgttttaatgttaacactggtcagctgagcctaagctccaacagggagagggtatagtgagggagtccaaaccaccctccccttcctgtcatggcctgaactggttttccaggtttctttggaatccccttggattagcattttattttttcatttgcaacttttaaatataagttccaactttaagtcatttctttgctcccatatcttaccctagactgttagaagcaaccaggtcacaccttagaaacgtctgcttagaaatgtcttccccagatgccctaagtcatcactcttaaggtcaaacttccacagatccctagggcatgaacacaatgcagccaagttgtatcttaggatttaacaagcgtgacctttactccagttcccaataagttcctcatttccatctgagatttcatcagcctggctttcacagtgcatatgtctatcagcattttggtgacaaccatttaatagtctctaagaaattccaaactttccctcatcttcctgtcttcttctgagtcctccaaattcttctaacctctctgcctgttacctaattccaaagctgcttccacattttcaggtatctttatagcaatgttccactcctcaataccaatgttctgtgttagtttgtgttactagaaaaaaaaatacatgaggctagtaatttataaagaaaaggtgtttaggccaggcactgtggctcatacctgtcatcctagcattttgggaggcagaagcaggaggatcacttgagctcagaagtttgagaccagcctgggcaacatagtgagaacttgtcttgaaaagacaagaagaagggaagggcgggggagagcagaagagcagaagggaaacacggccctggcatctgcttctggtgaggcctcagggagattgcaatcatggcagaaggcgaagggggagcaggcatgtcacatggcaagagggagcaagagaaaagaagtggcacgtcccagaattgtaaacaacgagctgtcacagggactaactgagggagaactcactcatcacctgggagatggtgctaggccattcatgaggggtccagccccatgatctaatcacctcccaccaggcccacctccaacactggggcctgagagagaagagaacctcccccagcactcggtgtgcatcggtagtgaaggagcctcacctgagcccccgctgttgctcaatcgaattcccaagaacagagagaaaagggaacttccagggtggcccgggcctccaggggttcccactccatttttagctgaaagcactgaggcagagctccccccacccaggctccactgcccgacacagaaataacaaccacggttactgatcatctgggagctgtccaggaacccgacagggagccggacgggccacaccagccacaggcaccaaatggacgacccggcgcttcaggtatcccagcccaccgggagccccaatcaaggggccggcccaggcagcagtgagggagaggctgcctgggtccctgacagcgaggggactcctgggccaccctcacagcatcaaccaagcttcttagttactgcatggactccagacgtcccttccctgcatggggacacaggaaagctagaaacagcctaacgccgacctggagaaggcagggggctgggaatcttggctgggcccaagactaagaaggtcagaggccccatgctgggcagggctaggctgggtgcagactgcctgtcacccccaggacagggacagccaacccagagccgggagggagggtggggaggcggcagcagggagctgtcctgagctccactgcgcaactggctgatcttggcaagtccgagctgggtggactgaggggggcttggctgagtggactagactgagacgggcctaacagactgagctgaggcgagctgggtgggctgagagggctaccctgtcccttagaggacaggtggccaagctgggctgtcctgagccagggcgatcggggctggcccgggccaggcgggtttagctgagttgagtgagtggactgggtagagggaaatgagctaggctcagctgagctaggcttgagctgggttatcctaagccctaaggtggactgagctgggctgagctggacttatctggggagcagggcaaagtcaggctgagctgaggtggcctgccctgggtggtccaggattgagttaagctgaattaggctgacctggacttgactggacttggttgaaataagctgggccgacacaggagtagggacaagctacagttctctacttaggataaaatgggtgctcgtggactatccgggctgaaggagaccaagctggggtattacctgctgagcttacctgacctggcctgagttcagcagggctgcgctgagctggacagacctgagccaagcttagctggttgggctgagtaagctgggctgagctaaatgggattgagctgaggagggctaggctgggggagagacctgacgacggacagggttaaaagctggagtgagcaggccttaaattattgaactaaattgggctggggtgatctgaatttagctgggatgagctgggctgggctgaactgtgcccacgtgaactgggctaaactaggctcgcctgagtggactcagctgggttggtctcaactgggttcagctgagctgggctcggctagactacactgggttcagctgacactacactgggttcaacccgagaggggtgagcgcctacctaagccggcccagcccgttcgacctgttcatccgcaagtcgcccacgatcacctgtctggtggtggacctggcacccagcaagtggaccgtgaacctgacctggtcccgggccagtgggaagcctgtgaaccactccaccagaaaggaggagaagcagcgcaatggcacgttaaccgtcacgtccaccctgccggtgggcacccgagactggatcgaaggggagacctaccagtgcagggtgacccacccccacctgcccagggccctcgtgcggtccacgaccaagaccagcggtgagccacgggcaggccggggtcgtggggggagggagggagcgagtgagcggggcctgggctgaccccacgtctggccacaggcccgcgtgctgccccggaagtctatgcgtttgcgacgccggagtggctggggagccgggacaagcgcaccctcacctgcctgatccagaacttcatgcctgaggacatctcggtgcagtggctgcacaacgaggtgcagctcccggacgcccggcacagcacgacgcagccccgcaagaccaagggctccggcttcttcatcttcagccgcctggaggtgaccagggccgagtgggagcagaaagatgagttcatctgccgtgcagtccatgaggcagcgagcccctcacagaccgtccagcgagcggtgtctgtaaatcccggtaaatgacgtactcctgcctccctccctcccagggctccgtccagctgtgcagtggggagggctggccagaccttctgtccactgttgcaacgaccccaggaagctacccccaataaacagtgcctgctcagagcccagggtacacccgttcttgggagcgggcagggctgtgggcaggtgcatcttggcacagaggaatgggccccccaggaggggcagtgggaggaggtgggcagggctgagtccccccaggagaggtggtgggaggaggtgggcagggctgaggtgccactcatccatctgccttcgtgtcagggttatttgtcaaacagcgtatctgcagggactcatcacagctaccccgggccctctctgcccccactctcggtctaccccctccaaggagtccaaagacccaggggaggtcctcagggaaggggcaagggagccccgacagccctctctcttgggggcttggcttctacccccctggacaggagcccctgcacccccaggtatagatgggcacacaggcccctccaggtagaaaaacagccctaagtgaaacccccacacagacacacacgacccgacagccctcgcccaagtctgtgccactggcgttcgcctctctgccctgtcccaccttgccgagtcctggccccagcaccggggccagtggagccgagcccactcacaccccgcagcctccgccaccccgccctgtgggcacaccaggcccaggtcagcagccaggccccctctcctactgccccccaccgccccttggtccatcctgaatcggcctccaggggatcgccagcctcacacacccagtctcgcccactcacgcctcactcaaggcacagctgtgcacacactaggccccatagcaactccacagcaccctgtaccaccaccagggcgccatagacaccccacacgtggtcacacgtggcccacactccgcctcccaccctgcctccagcgaggctactgccaagcccttcctctgagccatacctgggccgctggatcccagagagaaatggagaggccctcacgtggtgtcctccagtccaaccctccctgtcaccctgtcagcagcaccccacagccaaacacaggatggatgcgtgggctccatcccccactcacccacaccggaaccccagagcaggctacgtgcccctcacagacctcaaacccacatgtgcatctgacaccccagatccaaacgctccccccggtcatgcacaccaagggcacagcacccaccaaatccacacggaaacacgggcaccgggcaccccatgagcacaaagcccctccatgtctgaagacagtccctgcacaccgtcacagccatacattcagcttcactctcacgtcccagcccacctgcacccagctctgggcctggagcagcagaaagaggtgtgagggcccgaggccggacctgcacctgctgatgacccgggaccagcaggcagctcacggtgttggggaagggagtggaggggactcagggcaggagccagagggaccaggctggtgggcggggccgggccggggtagggccaggaggcagctctggacacccacaggcctgggctcatagtccacaccaggacagcccctcagagcacccatgcagtgagtcccaggtcttgggagccaggccgcagagctcacgcatccttccgagggccctgagtgaggcggccactcctgtgccgaggggttgggtccttctctggggagggcgtggggtctagagaggcggagtggaggtaaccagaggtcaggagagaagccgtaaggaacagagggaaaatggggccagagtgggggcccagggacgagaggtcaggagtggtcggcctggctctgggccgttgactgactcgggacctgggtgcccaccctcagggctggctggcggctccgcgcagtcccagagggccccggatagggtgctctgccactccggacagcagcagggactgccgagagcagcagggggctctgtcccccacccccgctgccactgtggagccgggagggctgactggccaggtcccccagagctggacgtgtgcgtggaggaggccgagggcgaggcgccgtggacgtggaccggcctctgcatcttcgccgcactcttcctgctcagcgtgagctacagcgccgccatcacgctcctcatggtgggcacccacctccaggggcccggccagggcagggggttgggcagagccagcagagcgccctgacccacgccctcccctcaggtgcagcggttcctctcagccacgcggcaggggaggccccagacctccctcgactacaccaacgtcctccagccccacgcctaggccgcgggccactcacgctccaccaggcccagctttttctctgccagcgcctgagcctccctcgggctgcgccctgccctgggtgggaaaagggaagcagacaagaaaagggggcacaaggtcactactgtgggctgatggccagtgaacctgagcccagagggggccggctcagccgcaaggttaaaggcgccgagagaaccaccagtcgcagcccccacccgaaaaccgtgtctgtcccttcaacagagtcatcgaggaggggtggctgctagccgttctgagctcatcccaggcccctgggtctccgggtcactcccattctgactgtacaatcaccaaaagccaaggagggcccagcacccagcccaggacacagctgagtctgcgtccagcccaacaccagcccacggcctcactccccagcctcggtctgacccttctagccctgagatccaagtgcctggcatccccgtcccccaagcctcacccagaccttctttcccttcacccacccctcctgccacccatccacagcccccatcccttcacccacccctcctgccatctatcctcagcccccatcccttcacccacccctcctgccatccatccacagcccccatcccttcacccacccctcctgccatctatcctcagcccccatcccttcacccacccctcctgccatccatccacagcccccatcccttcacccacccctcctgccatctatcctcagcccccatcccttcacccacccctcctgccatccatccacagcccccatcccttcacccacccctcctgccatctatcctcagcccccatcccttcacccacccctcctgccatccatccacagcccccatcccttcacccacccctcctgccatctatcctcagcccccatcccttcacccacccctcctgccatccatccacagcccccatcccttcacccacccctcctgccatctatcctcagcccccatcccttcacccacccctcctgccatccatccacagcccccatcccttcacccacccctcctgccatctatcctcagcccccatcccttcacccacccctcctgccatccatccacagcccccatcccttcacccacccctcctgccatctatcctcagcccccatcccttcacccacccctcctgccacccatccaaagcccccatcccttcacccacccctcctgccatccacctcagcccccatcccttcacccacccctcctgccatctatcctcagcccccatcccttcacccacccctcctgccatctatcctcagcccccatcccttcacccacccctcctgccatctatcctcagcccccatcccttcacccacccctcctgccatctatccacagcccccatcccttcacccacccctcctgccatccacctcagcccccatcccttcacccacccctcctgccatctatcctcagcccccatcccttcacccacccctcctgccatctatcctcagcccccatcccttcacccacccctcctgccatctatcctcagcccccatttctgcagcctgaaggcacagggaagccctctgaggccaggccacaggacggttgagggcttcgggcccctggagtgggtagaggggctcccacagccagagaaggggtttcctgcagggacagcagctgccgacctcgtccctatgacctcgtccagtgtctggcttcagcagtcatacttctttctctctgagtttcttagtaaagatccttttcacaaaccccacgtctccggagggctctgtaggaggtgtgtgtggccctggagtggctggtgggaggcaggacccctgaggacgtgcaggaggagccagaggggaaggaagggcaggggccattctggggtcctgagagccaaagtgcccaagcagtggttcccatcaatcacccctcagcaccccagagactccccagctcagcgctgtcatacctggtctgctggtctccagcccagactcatgcctccttctcaggtaaagtcaaagcaacaatcaacatcgacccctttgtgggcaaaaccagaagaggcccatgctgtggtcagcacaggaggccccaagaatgcagctgcacagtcaccaaggtggaggctggtgggggcccccaggaccactggccacacaccctgatccagcacccactgagcacagacaaagctgactccccagcccacagccgcccaccagcctggacctcctgaagagctgagaggtgacccaggagcaggctggggccccagagccatcggggccacaggtgggcttgacccacaccagtcctcagggcaaatgtgcagcctccctggctggagaggcctgcttacaagggtctccacaacatcctaaaaatgggagagaacgcatgataggcatgacaaagggcagggttccctcatatacaaagagcactcagagatcactaagaagaaaggtgagcaataggttcttcatggaaaggaaaaacccagtggccgataatataaagaaaccattttaacaatgagaaaagtgaaaggaaggaggaggggatgaagggggtggaggtgcttcttggccctgactgagggcacgtaaatcattaagaccactttttagggccagttggcaaaatgccccaatgcaggagagtcctctcacagtgatggccccacagggagagcctcgctctgtgccaggagagccacgtcacatggagtctggcacaaagcggaatgaagcaagcctgcctcagtctgacagcggcacctgggccctccgccctgtcctctgctgcgacctcggagcagccgggcacgggggagaaggtgaggagcgacggctccctacggggtagaaaaccccaaagcgggcagcgctgaggctgactgggtccaaacaacatcagaggagggggcgtcgcaggacagggccaaggccacagccgctgcccagctcccctcacacactccctcattcacagacacacacgcgggcacacactcgcacatgcaaaaacacacaggttcacacacacagactcaacctctcatacacatttgcactcacacacaccaatcatgcactcacacaggctgacacgctcgggcacgctcataccaacacacacacagtctcaggaagccaggccctccatccaccccatcaccagcccagggtgtcgcaaacccacatctcctacaacagaccggccctccgcagccaaggtgccccggaccgggagcccccccgggggacagagctcagtgactttctctgccccgcaccctagatcatgagacctccatggccccagagcaagggcaaggagtcagctcactgccccactgtgtggcaggcgtcctcacgcacagaaaattccatcgcctcaaaggcctgagaggaagaccagatgagcacccacgtagaggagacagacggggcccgtggggaggggcagaggcccggattcacacccaggctcggaacagcgcccctgccttccacatggcctggcctcccgggagcaagaggatgccgtctcagggcctctccatccccctcttcattcccctattaacccacccgtgggtacaaccatggcccccaaaagatagagccacatcctagcccctggggccattgagtgcggcgttatttgtcaaaagggcctttgcagatcccatcaagataaggatttcgaggtgagggcaccctggattgtcaaggatttcgaggtgaaggaaccctggattgtcaaggatttcgaggtgaaggaaccctggattgtcaaggatttcgaggtgagggcgccctggattgtcaaggatttcgaggtgaaggaaccctggattgtcaaggatttcgaggtgagggcaccctggattgtcaaggatttcgaggtgaaggaaccctggattgtcaaggatttcgaggtgaaggaaccctggattgtcaaggatttcaaggtgagggcaccctggattgtcaaggatttcgaggtgagggaaacctggattgtcaaggatttcgaggtgagggaaccctggattgtcaaggatttcgagatgagggaaccctggattgtcaaggatttcgaggtgagggcaccctggattgtcaaggatttcgaggtgaaggaaccctggattgtcaaggatttcgaggtgagggcgccctggattgtcaaggatttcgaggtgaaggaaccctggattgtcaaggatttcgaggtgagggcaccctggattgtcaaggatttcgaggtgaaggaaccctggattgtcaaggatttcgaggtgaaggaaccctggattgtcaaggatttcgaggtgagggcaccctggattgtcaaggatttcgaggtgagggaaacctggattgtcaaggatttcgaggtgagggaaacctggattgtcaaggatttcgagatgagggaaccctggattgtcaaggatttcgaggtgagggcaccctggattgtcaaggatttcgaggtgagggcaccctggattgtcaaggatttcgaggtgagggaaccctggattgtcaaggatttcgaggtgaaggaaccctggattgtcaaggatttcgaggtgagggcaccctggattgtcaaggatttcgaggtgagggaaacctggattgtcaaggatttcgaggtgagggaaacctggattgtcaaggatttcgagatgagggaaccctggattgtcaaggatttcgaggtgagggcaccctggattgtcaaggatttcgaggtgagggcaccctggattgtcaaggatttcgaggtgagggaaccctggattgtcaaggatttcgaggtgagggaaccctggattgtcaaggatttcgaggtgagggcaccctggattgtcaaggatttcgaggtgagggcaccctggattgtcaaggatttcgaggtgagggaaccctggattgtcaaggatttcgaggtgagggcaccctggattgtcaaggatttcaaggtgagggcgccctggattgtcaaggatttcaaggtgaaggacaccctggattatcgagggggctaggtccaaggacaagtgtcctagctggagacagacgaggagacacagggatggggagaggcagaggcagacaggggtggtgctatggtctgagggtctgtgtctgcccgaaactcctgtgtgacagccgtcatcccagagtgagagcatgcagagctggggcctcagggaggtggttagggcctgagggggaaccctcaaaaatgtgattcggtccctaatctcactagagaccctaaagaaaagggaccccagagagcagccctgccctctttccaccacgtgaggacgcagtgaaaagatgggggtctgtgaaccaggaatcgacccttcctggaacttgaccctgctgccatcctgaccttgaacttccagcttcgagaaccgtgagaaatgaatgttgctgctgaacccaccagtctatggtatttttgttattgcagccagaaatgactaagatgcagcagccacgtccccctggcgagggccgggggcatcccaaggttcataacaaaagctccagagcttccctgaaccgccaggtgtgtcttcccaggaccctggggcagccccaggctacctccctcctcctctgaccccacctgccctgatccggcctcactgtcactccctggatttcacccgacagcctccgccggggtggcccggccccatggccagggcatcttccattcacgcccacgctttccaggactccgctgcagcagctcctctgtgaagcgcctctggcctcccattgccggtgccacccgagcccccagacatagctggcctcccccgactccagggccagcatcgctggcgggatctctccaacgcaacggccagctctctggtgacccacagtaggagtgccacctgggcagcgctggacagggtagagcaggcaccttggccaccctgacccgcagggctgcaggctaggagacggggtgcccccatgcccccaccctgggctgcagtctggggcccccagcggcccatggggcagaccgagggaggccaggccggagtggctccaacccagcagcgcaagactcactctccccagcctgatgcccgccctgtggccccaaggccccctcaacgggagtccactcacaggcacccttcccctgcgggtggtcggggaccctctctggccctgtgtctcccctttgccatctctgtctcggggtctctgagcctctaactgtgtctgttcctgtttccctgcatcgtggcccccaccccgccctgtggagccatgtggagccatgaggctccacggccggtggggtcacagagccctggccacacacacctggccccaccacagccagaccacaggccagacatgacgtggagccgcgcggccgtgtctgctggggcaggaagtgggcgagtgaccctgtctgtaggccagacgtacgggcatgcaggccctcccctccagcccctcagcatccagccacatctgtggacacagccagcgaggcagagcagggctctgctaaggacagacggccatcaaggcagggcctgggccgggccagggctccctccccacagcagccctcttggcaggcagccagacgcccgtgagggtggacctgccatgagggcctgcacgccggaggccgcccactcagcactgcgggccctccagcagcctgaccaggtgggtcttggaggtctccaggcctccgtctcctcctctgcacattgaggagtccagccaggctggtcctggccccttctggaagcaaaaggtggagaacaggcaccaagacaagagggaaggacaaaagaggtcaccacagggactccggaaccacagggcagggcttcctaaccaggcaggaaggatctgggcactgggggctgagccaggctggccaggcctaaccagggatgacccggcccttcctgggatacaaggtgaacaggtttcatggctgagctgaggcctaggctgagccgagccagagggcaaagaagatgacgtggagccagctgatacacgtccatgtgggctgccctgagctgccctgggctgggctgggctgagcaaggctaggctgaactgggctgagctgaactggtctgggctgagctgggctgagctaggctgggctgagctgggctgggctgagctagtctgggctgagctggactgggctgggctgagctggactgggctgggctgagctggactgggctgggctgagctgggctgagctaggctgggctgagctagtctgggctgagctggactgggctgggctgagctgggctgggctgggcttggacgagctgggctgggctgggttgagctgagctgagctgagctgggctgagctgggctgggctgggctgggctgggctgagctgggctgagctgggctgggctaagctggactgggctgggctgagctggactgggctgggctgagctagacttggctgagctgggctgggctgggctgggctgagctgggctaagctggactgggctgagctgtgctgggctgagctgggctaagctggactgggctgtgctgtgctgagctgggctgggctgagctgagctgggctgggctgagctgagctgggctggactgggctgggatgagctggactgggctgggatgagctgggctgggctgggctgagctgggctgagctgggctgggctgagctgagctgagctgggctgggctgggatgagctgggctgggctgggctgggctgggctgggctgggctgggttgggctgagctagactgggctgagctgagctgggctgagctggactgggccgggctgagctgggccgggccggattgggccgggccgggccggactgggccgggccgagccgggccgggccgggctgagcgggtctgagctgggctgagctgagctgggctgagctagaccaggctcgggtgagctaggccaggctgggctgggctgggctgggctgggctgagctgtgctgggctgggctgggctgggctgagctgtgctgggctgggctgggacaagctgggctgggctgggctgggacgagctgggctgggctgggctgggatgagctgggctgggctgagctgagctagggtgggctgagctgagctgggttgagctagaccaggctggggtgagctaggctgggctgggctgggccgggttgggctgggccgggctgggccgggatgggatgggctgggctgggctgggctgggctgggctgggacgggctgggctgggctgggctgggacgagctgggctggcctgggttgagctgagctgagctgagctgagctgggctggcctgagctgggctgggctaggctgggctgggctgggctgggcttggacgagctgggctgccctgggttgagctgagctgagctgagctgggctggggtgagctgggctgggctgggttgggctgagctagactgggctgggctgggctgggctgagctgggctaagctggactgggctgggctgggttgggctgaactgggctgggctgagttgggctgagctgggctgagctgagttgggctgagctgggctgagctgagttgggctgggctgagctgggctaagctggacctggctggggtgagctaggctgggctgcgctgagctgggctgggctgggctgggctgagctgggctgggctgagctgagctgggctgacctgggctgggctgacctgggctgggctaagctggactgatctgggctaggctgggctgggctgacctaagctgagccagactgggctgagctgggtgagcttaggtggattgagctggactgggctgagctgagctgggctgagctggactgggctaggctgagctgagcttggttgggttgacctgggctgagctgagctgaattgggttgacctgggctgagctgggttcggctgggctaggctgacctgggctgggctgagctgagctaggcttggatgagctgagctgggctgggttggactgcgctgggctgggttggactggtctgggctgacctgagctgtactgagctggtctgacctgtgctgagctgggctgggctaggctgagctgggctgacctgtgttgggctgggctgggctaagctgggctaggctgggctgagctggacggagctgacctgggtgagcttaagtggactgagctgagctggactgacctgggctaagctaagctgggctgacctgtgctgggctgggctggactaggctgggctgagctggactgagctgagctagactgagctgagctgggtgagcttaggtggactgagctgggctgggctgagctgagctggactgggctgggccgaactgagctagactgggctgagctgggctgagctggggtgggctgagctaggctgagctggggtgggctgagctgggctgagctaggctgagctgagctgggtttggttgacatggactgagctgtgttgagctgggctaggctaagctaggctgggcggagctgagctgggttgggctgagctgaactgggctggactgggctggactgggctgggctgggctgggctgggctgagctgagctgagctgtactgagctggcctgggccaggctgagctgggctgggctgagctgtactaagctggcctgggctgggctgagctgtactgagctggcctgggctgggttgacctgggctgagctggactaagctgggctgacctgggctgggatgggatgggctaggatgacttgggctggactgggcgggactgagctggactggcctgggctgagctgggctgggctggactgagctggactggcctgggctgggctgggcgggatgggctgaggtggctgctaatgtgggaaagaggccgtgggttgagtgtgattccacctgcagagccctgagcccagctgtgttcttaggggttctgagggccacgcagctctgttgcaccatgattctgtcttctctcttgcccactgcctgaaggaaatttggagtgggctgggcccagagctcccctgtatagcaggccctgtcctggagggcctggcagggacatggcttagcctgttggcctctagtcccgagacctcataggccacaggggtccactgtggcttgtttgggcctggggtggggctcatggagtggtgggtgttggactgagactctgaccagggacagggggatggggtcacagccaagccactccacccctaccccatgcacacagcactcagagcccagaccctctcctaagagcccccaccaaaatcctctctaggggcaggggatagagcaagacatgtcccccacccagagcaggggctgcggtcagggagctcaggggactcagccactccatggcagagccctgtttaatacaacttgtgtctgggatggcctgaatcagagaccctatctaaggagcatgttcagaaaccatgttgctgggatcagacagcagggtccaactgcaggcctgtggtgcaggagctgtgtgaccatggggctgtcaccaggcctctctgtgctgggttcctccagtatagaggagaggcagtatagaggagagggccgcgtcctcacagtgcattctgtgttccagcatccccgaccagccccaaggtcttcccgctgagcctctgcagcacccagccagatgggaacgtggtcatcgcctgcctggtccagggcttcttcccccaggagccactcagtgtgacctggagcgaaagcggacagggcgtgaccgccagaaacttcccacccagccaggatgcctccggggacctgtacaccacgagcagccagctgaccctgccggccacacagtgcctagccggcaagtccgtgacatgccacgtgaagcactacacgaatcccagccaggatgtgactgtgccctgcccaggtcagagggcaggctggggagtggggcggggccaccccgtcgtgccctgacactgcgcctgcacccgtgttccccacagggagccgccccttcactcacaccagagtggaccgcgggccgagccccaggaggtggtggtggacaggccaggaggggcgaggcgggggcatggggaagtatgtgctgaccagctcaggccatctctccactccagttccctcaactccacctaccccatctccctcaactccacctaccccatctccctcatgctgccacccccgactgtcactgcaccgaccggccctcgaggacctgctcttaggttcagaagcgaacctcacgtgcacactgaccggcctgagagatgcctcaggtgtcaccttcacctggacgccctcaagtgggaagagcgctgttcaaggaccacctgagcgtgacctctgtggctgctacagcgtgtccagtgtcctgccgggctgtgccgagccatggaaccatgggaagaccttcacttgcactgctgcctaccccgagtccaagaccccgctaaccgccaccctctcaaaatccggtgggtccagaccctgctcggggccctgctcagtgctctggtttgcaaagcatattcctggcctgcctcctccctcccaatcctgggctccagtgctcatgccaagtacagagggaaactgaggcaggctgaggggccaggacacagcccagggtgcccaccagagcagaggggctctctcatcccctgcccagccccctgacctggctctctaccctccaggaaacacattccggcccgaggtccacctgctgccgccgccgtcggaggagctggccctgaacgagctggtgacgctgacgtgcctggcacgcggcttcagccccaaggatgtgctggttcgctggctgcaggggtcacaggagctgccccgcgagaagtacctgacttgggcatcccggcaggagcccagccagggcaccaccaccttcgctgtgaccagcatactgcgcgtggcagccgaggactggaagaagggggacaccttctcctgcatggtgggccacgaggccctgccgctggccttcacacagaagaccatcgaccgcttggcgggtaaacccacccatgtcaatgtgtctgttgtcatggcggaggtggacggcacctgctactgagccgcccgcctgtccccacccctgaataaactccatgctccccc

SEQ ID NO: 13 - DNA, 32341 bp, Homo sapiens
ccaccctcctaaaggatcactgtggtgccaggcaggaatgagctgcttgggtatccagagagctcccagtacctttctgctacttcctctacccctatattttgcttggcttggttctctaatttgactcagcttcacataaagtcaggaacttctcctgcaaacagaacttcagcttctccagtggggatgtgtattctggagagggggatcaccctttcccacttccattgttggggcactcacagtgtttgggatgtctcccaggtcctgcaggagcagtacgcttcctgcagagggtgtgtggatcctctcagaattgctggtctgtccttgcagttgacctgcagctaaaattcacaatgcaagcctctgcatgctgctctgtctggagctgcaatctagtcctgcatcccatctgccatgatcactggaaaaccctcatttattttttaaagggtccagaaaatgctaatctatagagatagaaattagattagtggttgcctagggtaggatggatgcaaaatttcagagtggggggttagaggctattgtatagaatcttttggagataatactgattattgtagtgaaagtaaaattctgtgaatatactaggaaacattgaactgtacacactaattggtgagtcatatggtatatgaattatgtgtcaacaaagttttagaagacattacttgcaccacgatattaaaaaatggcgtttgagttgtataattacttcttctctctatgtcaagggcaccgaacaggcaggagcctctcacctgccactgttcttaacagtattataaaataattacataagacaggttacttacgtattctaggtcataaaaattattgcttgactagagtaattgtaaatataaaagaacaccaaacacactaaaataaatatgaggtcaactcaaattttagcagttatattttaacttgattgatttttcctcagatataagtatgagaaatgacagaaagaaacaacaactggaaaagaagcactgcataagaccaggatgtctctgaaatggatgtcagtctttctgctgatgcagctcagttgttactttagctctgggagttgtggaaaggtgctggtgtggcccacagaatacagccattggataaatatgaagacaatcctggaagagcttgttcagaggggtcatgaggtgattgtgttgacatcttcggcttctattcttgtcaatgccagtaaatcatctgctattaaattagaagtttatcctacatctttaactaaaaatgatttggaagatttttttatgaaaatgttcgatagatggacatatagtatttcaaaaaatacattttggtcatatttttcacaactacaagaattgtgttgggaatattctgactataatataaagctctgtgaagatgcagttttgaacaagaaacttatgagaaaactacaagagtcaaaatttgatgtccttctggcagatgccgttaatccctgtggtgagctgctggctgagctacttaacataccctttctgtacagtctccgcttctctgttggctacacagttgagaagaatggtggaggatttctgttccctccttcctatgtacctgttgttatgtcagaattaagtgatcaaatgattttcatggagaggataaaaaatatgatatatatgctttattttgacttttggtttcaagcatatgatctgaagaagtgggaccagttttatagtgaagttctaggtaagtcgtgtgtccaattggtgtttattaagttctaattttcctgtgcctttgaaggtgggcttatataaatataatgtcagaagatagtgtttttatgggaaattatgaattgcaaatgtaagatgatctatgagtctcaaaaatatagaatgttgaccttatagaatcagttagaaccctggtgccatcactgctataggacaccaagagagtcataaaccttcaatgtaaaacacttatgatttctttaagccatcacatatcattttgctatacattttttcatctttaaaaaagtcaatagatacttcaagaaacatcttcatgaaggcagacatacaaattttatatttacacatatttctaaaaatattatcaatgcaggattgaggaacttgtacctgagtacctcagtttcctcatttagaaattaaattttgtttttcatataagaaggattccttcacagttgagaaatatagtggctctactccagaaacagaagcctaaaacttgagatttctaatatttatacattccttcaataacaacttcacaattatttccttcaaaaactgaaatcttgttgaaagtgaacatctaagttttaatctatattttattaaactgcatctctccatcaaagaaaataggggccaaaataaggaagagcacatatctctatgtcaataaattctgaaaaatttttaattctcatttgtaaatatatttattttaaaaatctaattatattaagatcttaagatgaaccaagacagtagtaggtgtaaagatttcagtgttgagctcaaaaaactcatggtttactttgagaaccaaggatcaagggactagcttaataaactgtagacactagagtacttcctggaaagctgttttcatgggtaaggtaagatgaattaattgtggaactgaaagagttgtttaaaggtatatttgttactattgcagcttcagagggaagacaaatgtgtatttaagttcatagtggctacattagtccattctcacactgctgtaaagaaatacctgagactgggcaatttataaagaaaagaagtttaatagactcagttctacatgactgggatgcctcaagaaacttagaatcatggtgaaaggctaaggggaagcaagcttggatcttctcacttagtggcaggagagagaagtgcaagcaggggaaataccagacacttataaaactatcagatctcatgagagctcactcaatatcatgagaacagcatggaggaatccacaccatgatccaatcacctgccactgggtccctccctcgacacatggggattatggggattataattcaagatgagaggagatttgggtggggacagtcaaaccatattagtgacttattttaataattatttatgattgtgaatatactgatgttacattaaagatgtgatttcttcttacagctctctgaacactttgccttccttatatatacatatgagcaacatatgcaatacataaaaattaaatgatgactatataaatgtatttaatataatgtatttacattatattaaattattttattaaataatttaaatattaaattaaaactattaaatattaaatattaaattaaatattaaatattgtttaattttattaactttattaatgttttattaataaaataaaattaataaaattttattaatattaaatattaaactttattaaatattaaaaattaaaaattaaatactattaaattaaaatatattaacatatattaaatacattaatttaatataatgtatttaatattatttaatatacattaatttaatataatgtatttaatataatgtattatattatataaatgtatttatatatattatcaatgtgcagacattttatatatttttaggtatgttattccaagtcctttcaggaaaatacctgcatattcaatattaaaataacaattctcgtgttagctaccttttgttttgttttgtttttttccatcaggaagacccactacattatttgagacaatggggaaagctgaaatgtggctcattcgaacctattgggattttgaatttcctcgcccattcttaccaaatgttgattttgttggaggacttcactgtaaaccagccaaacccttgcctaaggtgaacatattcttgtttcatttgtttgcttgacattttcagaaggaatggctggatatgtttctttcagagtgtttaactcagagtgaggggaatatgggaggtcaaaaaaaaggacttgccattagaaaatcatatatttctatactatcacaagtatgtgaatgttattatcattaaagaccaaagaggtttactagggagattttgaaaacagggttggttaaagtaaggccttcattgtgcaacccacaagatagtatggttcatttcttcaaaaaatatttgtagagtgattaatgcaaaccacaggtaagtgctggattttcagagaataaaggtagcacagtttctgcgccctcatgcctaacattgtactttgaaagatagaataaaaacaagtgaaaaagaaaagtctaaaaagtgttataaggaaagaccacaatgataaagaaatatgcagaagagatcccaaactcattgacaattaaagtgagtactcaataatgtgcagagataggtgaaacgatgaggggatgagaaagacccaaaaagaaaaccagaggccaggcaaggtggctcacacctataatccctgaattttgggaggcagagaagggacgattgcttgggctcaggagtttgagaccagcctgggcaacatggtaaaacctcatctctaacaaaaataaaaataatagccaggcatgctggtgtgtgcctgtagtctcatagtcccagctacttaagaggctgaggcaggaggcttgcttgagtctgggggcagaggctgcagtgagctgagaccacaccactgaactctagcctgtgcgacggagtgagactctgtctcaaaaacaaacaaataaacaaacaaaaaagtaaagtcttgcattaaggcagaaaagtagaaaagcagtaagggcagttcccaggactccaaatttagtttacaggaaaaggttgagtaaaagtcaatgatgggccgggcgtggtggcttacacctgtaatcccagcactttgggaggccgaggcaggcggatcgcctgaggtcaggagtttgagaccagactggccagcatggtgaaaccccgtctctactaaaaatacaaaaattagtcaggcatgttggcaggcacctctaatagcagctactcgggaagctgaggcaggagaatcgcttgaacgcgggaggcagaggttgcagagagccgagatcatgctattgcacaacagcctgggcaacagagtgagactctgtctcaaaaaaaaaaaatatatatatatatatatatatgaaatttgatatacccattaaggacaatggagagctactgaaaagagttaagaaatgaagagatatgatcagatttcctttcaaaaaaaatcccaatgttctcaatgtgtaatattacagaaaggcaactttgtacaatgtaaagaatatttaggaacttttacatgagtttaggcaatcatgactacttttacaataataatcacaacttcatattgtgttgtgtggaaaaaagtagttaccacagataaaacacttaagttgtctctgacacatagccagtgatccaaaaatattgttgatattatgattattattttagtcattatttctaatattttaaattagctaacatgtgccagccatttaagatatcagtcttcatttaataatgattgattttcctagcaaaatcctagagaacagatactctgtgtgcttgtttaaatataaatgtttaagtttgggcagtcagttgaacacgctggaaagctaaagttgtattgcaaaggtggaggcacttcattaatattttagcttaaaaggtaattctgtgtactcttatcttattctcaaaaaaaaatcctcactcacatcaaaagaaagtgatagtgccattagcagggggaagagaataggagaataaggaggacaaggaataaatgactagtagtacaatagtgattattactaatactaccatgatctcagctcactgcaacctccaccctctaggttcaagtgattctgattctcctgcctcagactcccaagtagctgggattacaggcacccaccaacacatccggataatttttgtatttttagtagagacagagtttcgccatgttggccaggctggtctcgaactcctgacctcaggtgatccacttgcctcaaccttccaaagtgctgggattacaagtgtgagcctccgtgcccggcactggctgttgttgttaacctgcaaaaggtagacttgaatctaagtaaataattgtgaaaccgattctctaattcttttgtacacaaaataattgttgccacaaatttgcttgcttttccattatgtattagattctcagataatgtttgtatatttcaaaagaataagactcttgccaaaaagtatcaagtgtttgaaaactgcatatagttattgcctttgtaatatattcacatgaaactgtacagagaataaatcatgatggtaagattcaatattagtagcaaatattcgttaaaaaactctggaaataattcaaatatcttacattaagaaatggttaaaaacttatacaatgcgcataccaagccattacaatccattttttcaaaacaatgtttaattacactgtcagctgtagtacaggtatagttggaaactaaggaacagaatgatgagtagaacaagatcacaatttttttgtaggataaaaaggcatatacaatgagaaaaaattttctaaataaacatcacatatgtacattgagttatataaatagaattaaaaccataatgaaatggtacacattttaaattgagatagagatatgggaaaaatgatttttttcctaaattttcatacttttacaagactacttacattgatcttctattaccattgctttcataaagacgtcacagaatgagatcagtgctgatctgtctataaacagacgattttttacttcaatacttggtggatgaagaagacttttgtcagtgaatgagacaaaacattaaaccgaagttacattaaatgtggctacaggcaactgcaattacactgagttcctggatgcctcatgaattaactctaatagccatacactgaatctccaattaaaactgatatcagaccgggcacagtggctcaagcctgtaatcccaccactttgggaggccgaggcaggtggatcatgaggtcaggaggtcaagaccagtctggccaagatggtgaaacctgtctctactaaaaacagaaaaattagccaggcgtggtggcaggtgcctgtaatcccagctactcaggaggctgaggcaggagaattgcttgaacctgggaggcagaggtcgcaatgagccaagattgcatcattgcactccagcctaggtgacagagcaagactccatctcaaaaataaataaataaataaaataaaataaaaataaaagatgtcataaagttcaattatatttttgaaaaataccaatatatggtctgaattgacatattttagaatttccttttttattcgtaaacagttttataaagaaatttcccccaatgattaggaccagaaagtatatttgttatgatagaaggggttggtcattattttactgagaaaaaaagaatttagaacaaaagggacaatagcaacaaaaagatgagtatacaattttgatatgatatccgggaaacttatgagtctacatttcttttcctctttctctctttctttttctttttttttttttttggtgtgagaatacattgactgatgtggcattagagaatggatttaagtttaaaaacaggaacacatcaggaaacacaagtcagaataattctcattcatttcgaagcaaacacatatttaccaggagcttcatatagtgtgagggagctactctagggggtgagcagatctccactggagaaaggcttggtgacctctcccactgtggttcaagtgccccctgtgagacacagcaaagtgaggatgagggtccctcatggtaagttataaatagcacatcaatttcacagtgtgatttcaggacaaaaggtatcatagtcatacctaaacaatgatctgagaaataagatcacttaattatgtaactaaatagtatataatactgtattataaatggaattctcagaactatttcccggaaattccaagccccaacaccagactgatgaacgtcaatgattcttatacttcagcttttaaggtgttttttgggggtgggggtgtcgggggaagtgaggggtagtggggtaagactaggaaactctaagtgaaatataaagggttagagagctaaagaagctaaataaatgtagatataaaatcattctaattgtaactaacttttcctcattgctcatagtcatgtaatggctccaatgactcctaactaaaagaactgaacagaaaaaaataaaataaaatgaccccaaataaacacaagagatttagtagaactacaaaaaaaaatagaattaaagccaagtaaagctaccttccaataacctatgttagtaattataatattataaataaagtgtctgggtgtaatattttctagcattatctcctcctactgcagtgtcatagctttgtttcatttcttccttacacacacatacatacatgcatatgcacacatatttacacaaatttgcatgaaagatcccacatatattatattacacatctcctttcaaagaaactgaatgattaggtcagtttaaaaaaattactccaatagctcctgactttctcatcttagatgtttgtaacaatcctgtcaacagtgttttctgtgctgttgctcttttctgatagaacaaattctttcttcacaggaaatggaagagtttgtgcagagctctggagaaaatggtattgtggtgttttctctggggtcgatgatcagtaacatgtcagaagaaagtgccaacatgattgcatcagcccttgcccagatcccacaaaaggttagataaagtgccttaactgtggatggctactaaatgaatctgttaaactcttcaagagtccattacagaaatgttctgcctgaaaatttaactgctatgatagttctaattatctcagacatctgttcaaagcaaaaacatatatggaagatcttaaaatcataaagagaggagttttggttgataataacgttggcattaatattgtgatcagaaggaaatatatttaagaggtgctagtgaagtttggtattatcatggtatcgtagcatgtacatagaaatcactaaattctgccctgtcatttgctccttttggtttacaggattttagaaggtactgtatacactgtagatattatcaaaaagcggtaaaattttaataagttactgtactatcacaataacaataagcaggtattgaaaaaactttgaaatgcatcatgcagcttcgtcttaccaagcaatctggctgtttttacttcccatgcattggaataggtctatttagcgttctgttcagggtgccattcagagaaagaatgtcctagtctgactagccactgctctggaggtacccacctagccaagtagatttagagaaaaagaaaaacttgtctgctctgctggcttgggtgccgctaatgtcttaagcagaaaaatgtaatggaaaggatggagatagaatcctgcttttagggtagactatgtgcattattaaatgtggcccaacaaagactatgctctaagaatcagattagtgccttctccacattgaggaaggagcaggaactataaataaacatggtaggaacttattttctaatctatagaatatacctacaatctttgtgtattttcaatttacgttttactttcttatctgcatagccctctctgaatgatctatgcaagtttttgctgaaaacacagagttactttaacactcccatatcaaatacaaggacaacacttgtaaattctactccagtttataaagattgcttgggaaatctaaaatcagtaccttagtttggtactagacatggtaatgactggctatagctgaccatatatcaaggctgtcaatgctaggtagtgcatcatctaagtgtgaaagatcagttaagcaaaaagtagcaaaatacaattttctacattctcagcatctgtattgttaatcatgaattgtcaatgggctcctttttcctacattgttagcatttacaaaagtagcaatactgataatagtctgaatttactacatatgtagcattatttctcaccatatgtgcagtttaagtatttagtcttttgtaatcaatgatgtcaaattcataaaataacttatgactagtagacaagtggatataagtaaactcttcccatatcactcaaaaattaataaatttatattaaatttggaaggttacagctagtataaagtatataaaataaatatataggttattactaatttgctacttttttattactagaattaagactgcctaacaattcttatatatttgaatatttcattgataatcttgtgaaccccaaatatctgatacaggtctcagtacatttagaaagtttattttgccaacttgaagcagggaagaggcattcctttgagcttctgattaggctctccaaaggaggcaatcagatatgcatttatctcagtgagcagaggggtgtctttgaatagaatgggaggcagtgatttgcttagtgactttggggcccccaggtttattttcattttacattttaaaaaaatcttttggagaaagcattttagaagaaaatgagtctctggtctcaggttttcatctgatctctaatggcaaggaaggtttattcctaagcaggtcctgagttattaggaaagttcatttttagcaggttctgaagtctcatgtactgtgaagacaaaataaagggaggaagtgagaaaaacaaaaacaaaagaacaatcctttaaaattaatataggccacattactctgaagtccataaatcagtaggcaggtatgaaagtggattatgtatgtaaattggttgctgttattttcttctggagtttaagttgtctagcttaatttgtagggctttatgaaagcatagcttagtttacagtgactccaaattaggaaaaattgtggaaggggaggaaaaaaaacctgaagacactattttgaagacgtgtagccatgaaaaattagaattcagtccaaactgtagacagtaataaaaattgaaaaacattaggcaagactagaatctaacaacaggtatactgttatttttgaaacataatttttctgtcttcagtttcccaattttactaaagacaaaccatggtacaactgatttgctttattatacttggcctgattattgtatacagaggaggaagaataattttttatttacataggcttttaaagtggctttgatggaactttgtcttatagaaagaatctcagataggacttttttaaagctgaggcaagccatagatttgtaccatcaaatacctatgagttgggtgaattcctctcctcttggggttccaaaataaacttggggctcctgggcctgtcagaaagttacattctttgcttaacacagttcaggaaccctgtacagggaccttatagatgaaggtatgaggccagttttcccaaggggttttattggctccataagttaagtttgattccctaaaggaaagcccaccattccagtggaagccttgataaaataaccagtttctccaattgtgttttgttaaaaatgaaaatagattcttattgcacttatgcaaataactgtattgacaaaagtaaaaaatactcacaaatagtttccaaattctgaaaaatcaggtagagggaaacaaatatgttctaaatttttttcataggagtatactaaattgttaaaagctgttaatagctcaaaaaaagaaagattccttcactctaaaaaaaaaaacaaaacaaaacaaaggatcagcaatgttttaagcaaagtcaaaaagattactttagttttctattatttcagtccatgtagttaattcctgttctgcttgatattcatgaacattttagttctccatgagtcctgaaagtttttcttccattctaatgtcacaatctccaaaattatcaaaaactttttttcaagagcacctgttagaatttcatggctgagtataaaatcgccttctaaagaggaccaaagtcagacaacaattgtctgtggatgacaaaaagttttagggcagcctcagtcaaagacacaatggacaaggaaatttgttacctctgtggcacacaataacttaacataacaaatataattattactgataatgtacacactaagtcatatcagaattataggagtttcccataattttggaacacatgccaataacatatttatataaatacagctcaaaaagaccaaacaccatttcatgtttgacaatgttccctgtataatttttataccaaataagccaaattatgtcatttttggactttagggaaactaataaattaaaggattacttaggtcagaaaaaaacataattttggaaaatttgtcaaatatcaaaggattaaaaagcttgatatcacaggtaaaataaagcattcatttgactaaagtagtaactcaaggatttcaaaaaaaggcaaaaatcttcattctttgagagaggagactcaatttgccaaacaataagccctaataaaacagcatgaagccaaataagtttgtttttcaaaattgtatgaacaatctataaaattctaatcttgaccataagatataactttcctcagcctttcataacgtttataatctttattaagaagtcagtttatgcttcaagaaaaccttgttaatctgacacaggggcccatatgttggtcttgcattagtgtgtctttgacattaatgattaatttatgcataaacggaacttattttatctcttagtatcagttctttcaatctcacacacccacctcttctgtgatagtccctggaccttgaggagttgaatagcttttagaaaacactgttagcattatgccacaacaaacagaacttgaggaaaaaacttacatgagttgaaaatgagttgaaggagagtgttactatttcacaccctttaaaaggggagagaaaaccaaaaacagtgagatgcaagaaaagttaaactttgggttaaaaaaaaaaaactcataatattttaagagtaaatcaatcccttaagaaaatgttattgttctaaccaattatttagtgcataagtgctttttttacatcaagcccaatctgtagaaacaccattataatttccctttaattatagacaacttgatcatataaaagtttttttaatcttcttattgtgacttacacagatcattcatgatatgtttggactttctggtttgtcctgaacatccttctttcttacacaactgatcattttattctaggactaaatttaccacacaagattctttctcatataaaattatttctcttcaagctttttacaaaaaaaaaaaaaaaaaactttttatttttataactttctttacatctcccttacttcctggttccttttaccttgttttatacataacctttaaataagctttgaattagacaacacttcttcacctttttaaaaaagatgcacttttttttggaaagaatgttttcctacaaatttttttttaaaaatacccaaacaatgaaatatctattatttaatttaatataaccttagattctaaattatgagtttgtctataagtatttatcccattacatttacctaattatttagtcatttacctagaatatttgtgaaaagtgtggtagtcatcatttaaagttatggaattgccattgcaaaattataactgagacagtgaaaaagatctgacctaactccatcttgcttttaacctccaagctctccgtgtttatttctgggtgtaggccaaactaacttaaggaggaacttagtttatagtttagctttgaaataaaaatgataacagtcttttcccaaaacaaagcttaatgcctgtggactagattgcttaaggccacaagatgagaagttatgataatcttacttaattcaaggtgtagctatttgcattaaaccaatattaatgtcttatttattaaaaattacacaagtgaagatcattctgttttgggcttggtttacagttttgtaacccctatgtcaaattttgacaccttaaagtatttggcaagaataagtatgaaatttcttgattaataaatgcaaacaaaaatgtatgctggcaagtcttaatgcatttctaatattatcatactttatcaataattgttgttatcttatttataaaagattttatttaagttacataaacttgaaaaagcatttaattagtctttttttctggcaaagtatttaattcaagcacttttattttcttaagccaattaattagagctcttttatatattttcagtaataaaacattgtgtacaaaacacataaatacatagatgtagtaagcatgccaacagaagtacatcttacaggtttataaaaactcctctttgccatattagactttcaaattcttgataacctgtttcaataggtaatctgtatgaatacttgatcaccataggcagttgtgagctaaataatcttacatttgcatattaaaagaaaccattcaggtgaaaatcaaatagcaaaatttacatcataatgtacacagagaaaaaaattggtgtgctagaaggaaaataaaatggatttaattgccaattaaacataaaattatagaaattataatggccttttaaatatatgcaaacacttacacacacacaaaagattatgtggtttttacttcagaaatttagctatgagataaaaaaaaatcaccagcttgcagacaaaaacctgttgaatcaaaacagtggtttttaacttaatagaaaaataaaagcaaatttaaagcaagaataaaagaaaatttttaaaaaagagagaacttaggaactctacagtttgtaggacaaccttagggctcttaatgtatatgtgcacaaagaccgtattaccttcattttacataaactctgccaagtagaggtgtcataaatccaaacaggcgatatcaggggatcattcttcttcttttctcatcattcttagattatttgtttcccactttttttcctaaaaggaggaactgagctgtggcctagggtttatgtgtggtgaatcaatgtgtgctgcttgtgggcagtactccacagtgtgtcaccactgagttgtttccaccctcttacgtgtctcagtttctccctccagaggtgtatgacctctgagagggctcaaaatgctgggtgatctgccctcatatgtgtttcctggactagcctttttttaaaagttaatttttcttggggatttccctgcaggaccactgcatgtcatagggggtcaaacccaagacactcccacaaggcccccagttgcttaggggtgccttttgcctgggaggagcagatgccctttcactttggagctgagaaaactcagtctttcattttcctatgtaaaccacagttcagtttctcacacaaatccacacagacaagccaaatgagattaatttggggaataaaaacaatagaggagaccctttacaacacatctccaaactagaattaggattcttaaacaacaacttcctaggaggaaaaaaataacaacagtcaatactacttccagtaaactgtactcagccaccctctactttgtaactcgtctgccattacacacgccaaggtaaaatcctctcacagtacaaggtaatctgtggtaatctcgaagccaaagagatcaggtcattcaacataggaaaacagagctttggacctaagaaaaaatctgcccacaactcttgaaactccacaaagaaaacagagcacccccaaaggggtgagtggtgcctttgttctgaattctttaaaagagttcaaatcattagaagccttctctagatttttggtactacaaatggcaaaagacaaaaggaggtatagggtggaggaaaagtaaacaaaagaacatttgtttttttaaagacaggaagcaaacacagaaaccaagagcatggtttttaggttttgttttgttttctcttttgcatctgtgaagaattttcaccaaattagacaggctttgttacccacaatttggaattctcactcagatatgatcaagtcaggtaaagtttgtcaaatctgatgggagaaatactggaatgtacaaaaaaaatactcccaaaaatgtgatcattaagcactgtaatggtaaggagaaattaagtccagctagttgttaaacattaaccaagacaaaaccccaattcagctatttacctacggatgggtttcaggctaaaactgccctctgtcgtcctagaagtaggaaagaaacctcaaatttatcctccctcctgggagtgagctcaaactccatagagttacctgccttccattgtcatggaaacaggaaatattgcctttcttgtaggaagcaagtaaaactccaaaaaaaaataaaaaacaaaaaaaaaggagttgtacagcaaaataaacttttggtcttgactgaattttggggtatcagggattctctggaggggttgctcccagacctcagccaattgtcttatttgtttgagccataaagttagctcatgctggtaccaagcactgacaggacatttatcaaaggtcagggaacctccactcagagtctcttcatggttaccaaaatgtgaaccctgaatatctgaggcaggtctcagttaatttagaaagtttattttgccaaggttgaaaatgtgcacccatgacacagcctcagggggtcctggtgacatgtgtcccaaggtggtggggggacagtttggttttatacattttagggatacatgagacatcaatcaacttatataagatggacatttgttcagtccagaaatgggggacaactagaaacaaaggcagagcaacttgaagcatggaaggggcttccaggtcataggtagataggagacaaatggctgaattcctttgagtttctgattagcctctccaaatgaggcaattagatatgcatttatctcagtgagccaagggctgactttgaatagaatgggaagtaggtttgccctgagcagcttaacttttccctttagcatagattttggggcaccaagatttattttcctctcacactctcatgtgtctagctattaagttagaaatgtcatttttttatataccaaattgattataaaagtaaagatattaaatgtgggtattcagcttacctcagacttttagtagttctcattacttgacatcacttcttcttatttcttcatcttttatatggattaactgattattaatctcttcagaattctaacaagttatatttttagagttctattcattgaacaagatattttccttgccctaacaggttctatggagatttgatggcaagaagccaaatactttaggttccaatactcgactgtataagtggttaccccagaatgaccttcttggtaagactctggagaacaaatactgaatatattagtaacagccaattagaagtgataatatttcaacataaaacaaacatatttaacatttattattggaaaactaaaaaaaaatcaaatttaactactttatatttattttctagtcttagtataagaagaatacactatggtagttggcattttgttacatacagtcacattctttatggtcagaataaaaatctctttattcaggtgtaattacctctcacaggttttaaataacatcctggattttctgtctcttatttctgcaactttacatctgttccttcccctactgcagggttatttcaacaggtactgaaaaataacagacattcttctattaccagtgactctattttctgtgggaataaatcaccaatctttatcataaagtgataacacatttcatgatgatgtgtaacctgtccttcctcagcaccacctccaccctactccttgctgcctttaaaaaaaaatttaagtattttaaatattttaactatttaaatattttttaaatatataaatgtgactgcataatttatactacttaagagactatgttcttgtataccaaatcttattcttttcttttttgcacattttaattttttaattaagaatatgttttttcattttgttcacctggcaaacttttaaatttatgtttccactgtgaagacacacagaccaccaccttttcatgtagccttcacttacctttccagcagaagtaggtgcttcttcctctgaaatttgaaaacaatttcaatgcagttttgtgggtataatgttacctagggaacagttttgctttaagttccttatattgtgcatttcttattcaattcctgtgccttataattaataactttgttaaaatgcatccacttttaggtcatcccaaaaccaaagcttttataactcatggtggaaccaatggcatctatgaggcaatctaccatgggatccctatggtgggcattcccttgtttgcggatcaacatgataacattgctcacatgaaagccaagggagcagccctcagtgtggacatcaggaccatgtcaagtagagatttgctcaatgcattgaagtcagtcattaatgaccctatgtgagtattacaattttgtgaccaggtggtacttacaaattattttgtcaacagtgaatatgagtttgaaccctttgttaagagactaattttgaagggattgaagtgatttaaccaatgtaaaatctgctcttattttccaccagacaattatttcaaagttacatttcaaccccacagatttaatgggtcaccaatgactgcaatgaattataaaatcaaaaaaattaaagatatgtacataattattttaaatatttttaatgatagaatacacaatagaaattatgtaactagagaaatatgataaaatatttcaattcaatacctaaaatttctgaaagtatgaatctattctttctcaaaaatttatttttattattatcattattttaatcaatttgaaaatgagttacaatttgcatagcataacattcactaaaatttaaaatctaaatatatttagtatgtttacatagttacgaagccacaaccctaaataacatttttgtgagctcaaattaaactcaaaatgcatgaagtcactcccaatacacctccagtcctagaaaaataccgacttactttgtttctcaatagattattctcttcacatattttatataaatgaaatcatacaatttatagtgttttgtaaacgacttctttcacttagcataattatttttagttttatttatgttgttggatgtatcagaactcattcatttttatttctatataatattctttgatatgtttataccaaaattacccatttatcagggcatggacattttaggtctttccaattttggcacttacgaatattgttatacatattttctgtgtaaaaatatgtttttacttcttttgaggagaggctaggagtggacttgctgaggcatatgggaaattgttgtttatgaagaatggctaaactgtttttcaaagtatttgcatcatttttcattaccaccagctggataggagggctctaatttcttcacactcttcccaacacttgttatcacctgtctttctattacagcctttctagtgtgtgtaaagtggtctctcattatggttttcatttgcatttccttatggctgaagatgttaaccctcttttcatgtgcttactgatcattcatgcatcttccttagataaaatttctattttaatcttgtgaacattttgtcatttttctatttaccttattatggattcataagaattattaatatgttatagatactatcccttatcaaatatacgattttcatatattttcttccactatgggcagatagatttttttttttttttactttttggaggatgccttttgaaacatgaaggttttaatattgataaaataaatatgtaatagttttccataatccaagggaaataatatggaaaatgctgtgactacaccagctaccatcaattcagagtctattaatcctaccaatattattatgatgtaaggtggtaccagctaagagaatacattaaaaacactttaccaaaaaattagtaagacaagaaatgatttaaaatacttcaaataaagtaaaaaagcaaagaaacagaaaacaggttagaaaacaaaaatatatagaataaaatggtggatttaaatgtgaactagggcaatcaggcaagaaaaagaaataaagggtattctataaatagaaagagaagaagttaaattgtctctatttgcagatgacataattctatatttagaaaaccccttcatctcagttctaaaattccttaagctgataagcaacttcagcaaagcctccggatagaaaaatcaatatgcaaaaattacaagtattcctatacaccaacaatacacaagcagagccaaatcacgaataaattcccatttgcaattgcaacaaagagaataaaatacctaggaatatgcctaacaaggtacgtgaaggacctcttcaaggagaaatagaaaaccctgctgaaggaattaagagaggacacaaacaaatggaaaaacattccatcctcatggataaaaaaatcagaattgtaaaaatggccatgctgcccaaagtaattttttttattatactttaagttttagggtatctgtgcacaaggtgcagctttgctacatatgtatacatgtgccatgttggtgtgctgcacccattaactcgtcatttaacattaagtgtatctcctaatgctatccctccccactcccgctacccccaagcaggccccggtgtgtgatattccccttcctgtgtcctcgtgttctcattgttcaattcccacctatgagtgagaacatgcggtgtttggttttttgtccttgcgatagtttgctgggaatgatggtttccagcttcatccatgtccctgcaaaggacatgaactcatcattttttatggctgcatagtattctatagtgtatgtgtgccacattttcttaatccagtctatcattgttggacatttgggttggttccaagtctttgctattgtgaatagtgcctccataaacatacttgtgcacatgtctttatagaagcatgatttataaccctttgggtatatacccagtaatgggaatgctagataaatgatatttctagttctagatccctgaggaatcgccacactgacttccacaatggttgaactagtttacagtcccaccaacagtgtaaaagtgttcctatttctccatatcctctccagcacctgtggtttcctgactttttaatgattgccattctaactggggtgagatggtatctcattgtggttttgatttgcatttctctgatggccagcgatgatgagcattttttcatatgtcttttggctgcctaaatgtcttcttttgagaagtgtctgttcatttccttcacccacaagctgatgaggttgtttgtttttttcttgtaaatttgtttgagttcattgtagattctggatattagccctttgtcagatgagtagattgcaaaaatgttctcccattctgtaggttgcctgttcaatctgatggtagtttcctttgctgtgcagaagctctttagtttaatgagatcccatttgtcaattttggcttttgttgccattgcttttggtgttttagtcatgaagtccttgcccatgcctatgtcctgaatggtattgcctaggttttcttctagagtttttatggttttaggtctaacatgtaagtctttaatccatcttcaattaatttttgtataaggtgtaaggaaggtatccagtttcagctttctacatatggctagccagttttcctagcaccatttattaaatagggaatcctttccccatttcttgtttttgtaaggtttgtcaaagatcagatagttgtagatgtgtggcattatttctgagggctctgttctgttccattggtctatatctctgttttggtaccagtaccatgctgttttggttactgtagccttgtagtatagtttgaagtcaggtagtgtgatgcctccagctttgttcttttggcttaggattgacttggtgatgcgggctcttttttggttccatatgaattcaagtagttttttccaattctgtgaagaaagtcattggtagcttgatggggatggcattggatctataaattaccttgggcagtatggccgttttcacgatattgattcttcctacccatgagcatggaacgttcttccattggtttgtttcctcttttatttccttgagcagtggtttgtagttctccttgaagaggtccttcacatcccttgtaagttggattcctaggtattttattctctttgaagcaattgtgaatgggagttcactcatgatttggctctctgtttgtctgttatgggtgtataagaatgcttgtgatttttgcacattgattttttatcctgagactttgctgaagttgcttatcagcttaaggagatttggggctcagacgatcaggttttctagatatacaatcatgtcttctgcaaacagggacaatttgacttcctcttttcctaattgaataccctgtatttccttatcctgccttattctcctggccagaacatccaacactgtgttgaataggagtggtgagagagggcatccctgtcttgtaccagtcttcaaagggaatgcttccaccttttgcccattcaacatgatatttgctgtgggtttgtcatagataactcttattatttggagatactccccatcaatacctaatttattgagagtttttagcatgaagtgttgttgaattttgtcaaaggtcttttctgcatctattgagataatcatgtggtttttgtcattggttctgtttatgtgctggattacattcattgatttgtgtacgttgaactagccttgcatcccagggatgaagcccacttggtcaaggtggataagctttttgatgtgctgctggattcagtttgccagtattttattgaggatttttgcatcgatgttcatcagggatattggtctacaattctcttttttttcttgtgtccctgccaggctttggtatcaggatgatgttggcctcataaaatgagttagggaggattccctctttttctgttgattggaatagtttcagaaggaagggtaccagctcctccttgtacctctggtagaattcagctgtgaatccatctggtcctggactttttttggttggtaagctattaattattgcctcaatttcagagcctgttattagtctattcagagattcaacttcttcctggtttagtcttgggagggtgtgtgtgtcgaggaatttatccatttcttcttgattttctagtttatttgcgtagaggtgtttatagtattctctgatggtagtttgtatttctctggaatcggtggtgatacccccttaatcatttttattccatctatttgattcgtctctcttttcttctttattagtcttgctagcagtctatcaattttgttggccttttcaaaaaaccagctcttggattcattgattttttgaagagttttttgtgtctctatttccttcagttctgctctgattttagttatttcttgccttctgctagcttttgaatgtgtttgctcttgcttctctagttcttttaattgtgacgttagggtgtcaattttagatgtttcctgctttctcttgtgggcatttagtgctataaatttccatctacacactgctttgaatgcgtcccagagattctggtatgttgtgtctttgttctcgttggtttcaaagaacatctttaattctgccttcatttcattatgtacccagtagtcattcagaagcaggttgttcagtttccatgtagttgaacagttttgagtgagtttcttaatcctgagttctagtttgattgcactgtggtctgagagatagtttgttataatttctgttcttttacatttgctgaggagtgctttacttccaactatgtggtcagttttggagttggtgtggtgtggtgctgaaaagaatgtacattctgttgatttggggtgcagagttctgtagatgtctattaggtcctcttcgtgcagagctgagttcaattcttggatatccttgttaactttttctcgttgatctgtctaatgttgacggtggtttgttaaagtgtcccattattattgtgtgggagtctaagtctctttgtaggtatctaaggacttgctttatgaatctgggtgcatgtatatttaggatagttagctcttcttgttgaattgatccctttaccattatgtaatggccttgtctcttttgatctttgctggtttaaagtctgttttatcagagactaggattgtaatccctgcctttttttgctttccatttgcttggtagatcttcctccatccctttattttgagcctatgtgtgtctctgcacatgagatgggtttcctgaatacagcacagtgatgggtcttgactcttgatccagtttgccagtctgtgtcttttaattctagcatttaacccatttacatttaaggttaatattgttatgtgtaaatttgatcctgtcattatgatgttagctgattgttttgctcgatagttgatgccgttttttcctagcctcagtggtctttatcatttggcatgtttttgcagtggctggtaccagttgttcctttccatgtttagtgcttccttcaggagctcttttagggcaggcctggtggtgacaaaatctctcagcatttgcttgtctgtaaatgcttagagattttattttatttctccttcacttatgaagcttagtttggctggatatgaaattctgggttgaagattcttttctttaagaatgttgaatattggcccccactctcttctggcttgtagagtttctgccaagagatcagctgttagtctgatgggcttccctttgtgggtaacctgacctttctctcttgctgcacttaacattttttccttcatttcaactttggtgaatctaacaattatgtgtcttggagttgctcttcttgaggagtatctttatggcattctctgtatgtcttgaatttgaatgtcagcctgccttgctagattggggaagctctcctggatgataacctgcagagtgttttccaacttgtttccattctccccgtcactttcaggtacaccaatcagatgtagatttggtcttttcacatagtcccatatttcttggaggctttgttcatttctttttattcttttttgtctaaacttctcttcttgcttcatttcattcatttcatcttccatcactgataccgtttcttccagttgatcaaatcagctactgaggcttgtgcattcatcacatagttctcgtgccatggttttcagctccatcaggtcctttaaggacttctctgcattggttatctagttagccattcatctaatcttttttcaaggtttttaccttctttgccttcggttcgaacttcctcctttagtccggagtagtttgatcgtctgaagccttcttctctgaactcgtcaaagtcattctccatccagctttgttccattgctggtgaggagctgcatttctttggaggaggagaggcattctgattttataatttccagtttttctgctcttttttcccccatctttgtggttttatctacctttggtttttgatgatggcgatgtagaaatgggttttggtgtggatgtcctttccgtttgttagttttccttctaacagtcaggaccctcagctgcaggtctgttcgagtttgctggaggtccactgcagatcctgtttgcctgggtatcagcagcggacactgcagaacagtggatattagtgaacagcaaatgttgctgtctgattgttcctctggaagttttctcagaggagtacccggctgtgtgaggtgtcagtctgcccctactggggggtgcctcccagtcaggctactcggggatcaggacccacttgagtagcagtctgtccattctcagatctcaagctgcgtgctgggagaaccactactcttttcaaagctgtcagacagggacatttaagactgcagaggtttctgctgccttttgtttggttatgccctgcccccagaggtggatctacagaggcaggcaggcgtccttgagctgcggtgggctccacccagttcaagcttctgggccgctttgtttacctattcaatccatgggaatggcaggcgcccctcccccagtctcactgctgccttgcagttcgatctcagactgctgtgctagcaatgagcgaggctccgtgggcgtaggaccctctgagccaggtgcgcgatataatctcctggtgtgccgtttgctaaaaccttttggaaaagcgcagtattagggtgggagtaacccaattttccaggtgccatctgttacccctatccttggctagggaagggaattcacagaccccttgtgcttccctgatgaggcaatgcctcgccatgctttggctcacacgtggtgcgctgcacccactgtcctgcacccactgtctgacagtcccctgggagatgaacccagtacctcagttggaaatgcagaaatcattcctcatctgtgtcattcacactgggagctgtagactggagctgttcttattcggccatcttggcttcttcccacagtaatttatatattcaaagctattcccatcaaactaccattgacattcctcacagagctagaaaaaaactactttaaatttaatatggaaccaaaaaagagcccatatagccaagacaaccctaagcaaaaagaacaaagctggaggcatcacgctacctgatgtcaaactatactattaggctacataaccaaaacagaatggtactggtaccaaaaagatgtattgaccaatggaacagaacatacgcctcagaaataacattacacatctacaaccatctgatctttgacaaacctgacaaaaacaagcaattaggggaaggattccctatttaataaatggtgttttggaaaaactggttagccatatggagaaaactgcaactggatcccttccttacaccttacagtaaccaaaccagcatagtactggaacaaaagcagacatatagaccaatggaacagaacagaggcctcagaaataacaccacacatctacagccatctgatcttcgacaaaactgacaaaaacaagcaatgggaaaggattccctatttaataaatggtgctggggaaactggctggccatatgcaaaaaacagaaactatacccctgccttacaccttatacaaaaattaactcaagatggattaaagacttaaatgtaaaacccaaaaccataaaaaccctggaagaaaacctaagcaacatcattcaggacataggcgtgggcaaaaatttcatgacacaaacaccaaaagcaattacaataaaagccaaagttgacaaatgggatcaaattaaactaaagagcttctgcacagcaaaataaaccatcatcagagggcacaggcaacctacagaatgagggaacatttttgcaatctatccctctgacaaaggtccaatatccagaatctacaagtaacttaaacaaatttacaagaaaaaaaacaccaccaccaaaaagtgggcaaaggatataaacagacacttctcaaaaaaatacatttatgcagccaacacacttatgagaaaagctcaatatcactgatcattagagaaatgcaaatcaaaaccacaatgagatacaatctcatgccagtcagaatggagatgattaaaaagtcaaaaaacaacagatgctggtgaaactggggagatataggaaaacttttacatttttggtgggaatgtaagttagttcaaccatcatggaaaacaatgtggtgattcctcaaagatctagaaccagaaacaccatttgacctagcaatctcattacttgatatatacccaaaggcatataaatcattctactgtaaagacacatgcacatgtatgtctattgcagcactatctacaatatcaaagatatggaaccaacacaaatactcatcaatgatagactggataaagaaaatatgatgcatgtacagtatggcggcatactatgtgccataaaaaggaatgagattatgtctgttgcagggacatggatgaaactcaaagccattatcctcagcaaactaacacaggaacagaaaaccaaacaccacatgttctcactcataagagggagtcgaaaaatgagaatacatggactcagggaggggagcaaaacacaccggggccattcggggcatggaatgggagtgagagtatcaggacaaatagctaatacatgagggacttaaaatctagatgacagattgataggtgctgcaaaccaccatggcacacatatacctatgtaacaaacccacacattctgcgtatgtatcctggaacttaaaataaaactgtttttaaaaaatgtgaaccgaccagatgtggtggctcaagcctgtaatcccagcactttgggtggctgaggagggcagatcacgaggtcaagagatcgagaccatactcctggccaacatagtgaaaccctgtctctactaaaaatacaaaaattagctaggcatggtggtgtgcacctgtagtcccagctcctcaggagtttgaggcaggagaatcacttgaacctgggagacggaggtttcagtgagctgagatagtgccactgcactccagcctggtgacagagcgagactccatctcaaagatcacaacaaaaaagtgaacctaccagtactcgcattaaatttaaacagaccaaagtagacaaaataatgatctttgaaaacttttatttaaggagataaaacatttgaagtacacaattaaatgtaacctatgtgttatatgtgtgtgtgtgtatatatattgcacatatatctgtatatatgtatccatacatatatctctggttgtgtgtgtgtagacagaaaataaacatttttaaaagagtttatggagactgggtgtggtggctcacacctgtaattccaacactttgggaggccaaggtgggaggatcacatttggtcaggagttcgagaccagcctggccaacatggtgaaatcctgtgtccactagtaatacaaaacttagccagatgtgggggatgagcacctgtagtcccagacacttgggaggttgaggcatgagaatcacttgaacccaggagacgtaagttgcagtcagccaagatcgctccgtcatactcaagcctgggtgacagagagagactctgtctcaaaaaaaaaaaaaaaaaaagattatatgtatgaaatagttactggaattgaccatatgctgggccataaaaaaatgctaagtaaattgtataagattcaaattcataaaaatagtatgttctagtcatactagaatcaaattataaatcatccagaaaatgataactaaaaacaatctctgattctttaaaataaaaaatattttttaaaaaattcagtcaaaaaattctaattataaatatgcctttctctcatcaactattcttccaagtatacatccaacaaaaatgaataagtatgtaaatctaataaaatatataaatatcttaataccataattattagtaagatcaaaaaatgttaacaacacaaatatccattaatcataaatgaagagatctgtggtctttgtcaatcaactgaatactctacaccagtgcaattaaacaactgctaaacaaaaacagaaatgaataagtattatttaattcaattatataaacataatctatgatattagaattcaggttaatacttactttgaggataaaagtagtgactaaaatggcccaggaggaaagagttcttctatgcagtttgtgataaattggtgttttcacttttggataatgtttaagataatcttaaaattttgagatagtcacatagcgtatatacatttatcctatgtatttcatacttaaacttttattgtggaagatatataacatattttaaagttccagaaatcaaatagcaaaataagaacgaagcagtagagaaatcctatgggtgcctatagtgtggccaggaaaacactctctaagaggtatcatttaaggggaagcctcaaaaagaaatagaagcaaacctcaagtagttgcaagaaagaatgctcaatgagagagacacggggaacaaaaggtgtaaacgggctaaggtgagaacaccttcaggagtttaaagaacaacagaaggccattgtctctagaagaaagtgtacagggggaaagggttaggacaagtaggtgtctgtgtagcgttctctagaccacagacagatttggattttattcttaatgtaacaagaaaccagatggaaatcttgacaggcaactgtcataatttgacattaatttagaaaatgttctggctactagtaggaaaatacggtagaagacagaagattagagtagaagctgagaaactagttaggagacatttcaccagttgtgacacaattcttctttaaatatgtcaaaatgggctgggcacagtggttcatgtctgtagggccaacactttgggagacagaggcagaatgattagaccacaggagttccagatgagtatgggcactacagcaagacctcatatctaaaaatgtaaaaaataaaaaatatagccaggcatggtggtgcgcagctgtagccccagcttctcatgaggctgaggtggaggattacctgagaccgaaacggaaaggctgcactgagccatgatcatgtgactgcactcagcctgtgtaatggagcaaaagcctgtctcaaaaaaaaaaaaaactaaaaatatcaaaatgatcattcccagattctatttccactatcttacttatagcacttagaatggctcacaatattttctgctctagaaaaacattaactttcccaccgaaaattccatttttcatttttaaaggtatttgtcagtgataaaactccaatttaaaaaccaaactttctgtaatgacatacattaaaacattaatattttatgtcaattcaatgacacttactttgaatcacttgtgtggcgcttttcaaagaccatccatagacttgatatgcttaagcaataaatttacttttaatgttgatatctttatatttatccttcagctataaagagaatatcatgaaattatcaagaattcatcatgatcaaccggtgaagcccctggatcgagcagtcttctggattgagtttgtcatgcgccataaaggagccaagcaccttcgggtcgcagcccacaacctcacctggatccagtaccactctttggatgtgatagcattcctgctggcctgcgtggcaactatgatatttatgatcacaaaatgttgcctgttttgtttccgaaagcttgccaaaacaggaaagaagaagaaaagggattagttatatcaaaagcctgaagtggaatgaccaaaagatgggactcctcctttattccagcatggagggttttaaatggaggatttcctttttcctgcgacaaaacgtcttttcacaacttaccctgttaagtcaaaatttattttccaggaatttaatatgtactttagttggaattattctatgtcaatgatttttaagctatgaaaaataataatataaaaccttatgggcttatattgaaatttattattctaatccaaaagttaccccacacaaaagttactgagcttccttatgtttcacacattgtatttgaacacaaaacattaacaactccactcatagtatcaacattgttttgcaaatactcagaatattttggcttcattttgagcagaatttttgtttttaattttgccaatgaaatcttcaataatt

SEQ ID NO: 14 - DNA, 15862 bp, Homo sapiens
atctgtgtgttcgaaggtcagctgtaattcccctggacatgaacttggccttcctaaggtggtgaaggtggagcctggtttccattccttgctccaacagacccttcttgtctttcacgcgttcctgctgtgtcccacctcttccttcctggggcctttgaagaccccgctctgccaggggtttctgtgcagctccccattccctcctggcaccacccatggggaaggcggggtgaccacaggactgtcagccagacagagtcttccaggtcaggtagaacatggaaaggacctgagccacagcacatccaaaagacagggagagggagggtttccttgaagccttccccaaggacagcagagctcagagccacacacctccctccaccacagctctcttcccaggacacaccagacacctccctccacacccaggagctgtagctcctcctgagacccctgggccttggtttctgtgcctgggtcactggagacagagggctggtccctccccagtcatcccccagtgagcccctttctatcccccagagccacctctgtcaccttcctgctgggcatcatcccagcagaaacccaaggcccagctgggtttctctgtcacaagggaaataatccccctggtgtgacagacccaaggccagaacacagcataggtcagcactgggaaaggttggttgtcctcccaggggacaggggtccatcagccttgctactcaaagctttgtatcgggaactgaatatagacaaaagggaaagaggaagagggacaaaagaggcaggaatgagaggggaggggacagaggactcctgagcagagaccccacccctggaccatgtgatcttggaaagtgctcctgccctgggaggaggctcagcacagaggtaggaaggacagcagagctgacagtcacagcagccctgacaagagagttcctggagcccaagctcttctccacagaggacaagcaggcagcagagaccatggggtccccttcagcctgtccatacagagtgtgcattccctggcaggggctcctgctcacaggtgaggggaggacttcctgggagtgggtgggaggagggccagagagactggctggggtctccttgggaggacggggctctgagaggggacaaagggcttctgttgaagtcctttgggagaggacaccagacagggacaggaaaccagaacaggaaaatcacattggactggaattggaaagggtcaagaaaatctcacatgttctcttttcctggttaatcatcactagctgctacattttgaaatatgataataataactatatcatgtgacgcttcaaataaaaacataaccagggcataaaacattgtccctagccaccaacctcaggcattggaaaataaaccccaggatgtggagggagggccctgggaactctcatgaactcatctactggagcctgcagcctgttccaggcactggggtgcaatccagttcacacaagtccctgccctcacagagctcacgctctcatgcggcagaagacagacaggcaaagagatctagaatgtgaagccaggtgttgacaagagctctaaagggaacagagcagggaaatgtcagaaacggaacacccagggcttctagagaaggtgtcagggaaggggtctcccaaggatgccctgatgtaagcaggtccagcagtatggagggagccctgcagatccctggggaagaggattccgaacagggaaatgtaaggtcagaggtgctgataggggacatgctgctgtcattgatccagtaggacacacacacacacacacacttacttcaagatgggggtgggtgaagagacctgctcaggatccagggccccatctttccaccccaatacataggtcccaatattgactgatgttctctccccctcctagcctcgcttttaaccttctggaacctgccaaacagtgcccagaccaatattgatgtcgtgccgttcaatgtcgcagaagggaaggaggtccttctagtagtccataatgagtcccagaatctttatggctacaactggtacaaaggggaaagggtgcatgccaactatcgaattataggatatgtaaaaaatataagtcaagaaaatgccccagggcccgcacacaacggtcgagagacaatataccccaatggaaccctgctgatccagaacgtcacccacaatgacgcaggattctataccctacacgttataaaagaaaatcttgtgaatgaagaagtaaccagacaattctacgtattctgtgagtgatacctccatgacttctgggtgctgggggccagttctacttcatacacacggggttgtcaggcctgggttgtgcctgtgtccccatctacattttatccagtgttggagtttgggcatttagtgaaggacacacatgggggagacaaacttctacagaccagaatccctttcctgcatccagaccctgcagatacttgctgcagaggaaggacagtctgatggggggcactcagcagggggagatcagtctcagccaagattctgtgccctccccctgaaaaagaccctggagaactgggtcagagcctggcctgaggagtcccctggaatcctcacagagaagctcagccctggaagcacaagtcccagatccctgtcccagggctcttgactccaggtgaccctaaggaacctgtgtcagggctgggttgtggcctcctgggctgaactgactgagagcaaggatttgagctgtttgaggatcatggctcatggagctggtcaccagcctggtcacccccagggcctcatctgggcaaggacagagcctcatccttcacctgagactcagcctggagaggacagatgaacaggattactaggacctcagtccccctggatgaggaacttaagagaggtcctaggggagtcagtgtcctcagggggagaaaaagaagaagaaagtttctgctgtaagttctttgtacaccaggaatcaggtccaaataacccactcctggaggcaaacaatcagagatcctgcttgtttgggcagctcttctacagagggctctcatccaggtaattgtgattattttaagatgaattaacagacagcaaggcaagccagagaccatttacgctttatctcattttgttaaaggaaactgaggcagaaggaaatacagccactgaggcagggtctcacggaccggacagtcacatcagagtccccaggtctttgtagccacagagcttgcttcctaggcatccaagccagaagtgggagattctggtctagggagtgaggaacaaatagagaattagtttttacctagaactgaatctcttgcctcaactatcagagtcagtgctgggaatgtccaggcctctcccttagattcacactcctaccctcactggacctgaaatcctgtgtttcctgatgtgttggtgtcactcccacaggaggataaaggagaagactttgctttctctccccactcacaccctgcacatgccagggcccaaagtgagaaacacactcgctcagtagttctctcatgaaggagggagggaatgaatgaaggaatgaatgatccataatctcttcagagactggaacctgatgcaggatcctaggaggctctggcacctgttccctgtccctccaaggggctgagacccatgttccccctctctcatcccctgcccctaaagccaccccagtgggagactgagacaggagggtgtcttgagccaggagttcaagaccagcctgggcaacatagcaagatccctggatcttaaaaaaaaaagaagccacccaggtgttgagtctcatgactgtgtaaatgcttggccatgggacagggatgagcaactcctctatctgctctctacactgactcaccagggggccagaggcaggacaagtgtgcagtccccaaagcccatgggttcattccacccattttactaccaactccatcctcatcttgctgtggggctaaggtcctccagtcattcccgggacctcctccaggtgcagcggcctaggcaggtgctgtctgatgggtttgctgtccattccacatacacctgtgtcctcatgatgacaccattgtcataaggtggggtcccttggaatgggaactgcaccagccactggcatctcacttagactctgcctagtttagatgaatttgatcaaactcttgttgtgtttccgtaggtcgagagaaaaggaagaaagcatttctcatgcctgtgttgggatttcctccgttttgctgactgcacaggagctggggacagggagctctttgtaaatttcctaacataacacacatctcttctcctaatttgtcttcattgttcttgttatgtcattgagaatcctcagattttcagccagcccctgcttgtctcactcaccctttctctatcttcttctggactctgctgcactttcctggcggtcactagctcttgtcagtcaccatcaaacacccgggtagagctgccccacctggaggccctgcagtctgagtactaaactcacctctagactttttcctggtctcctctgctatgtctgctcaaacacccattgttatcatcacccatctctgggatatccttggaaaaaaaaggctcagagaaacacctcttggctgggtggtgtaggagtgttcagctggaaggaactcagctcctgcccattcgaggtgaggaccccaaagggccaggtaggcagccatcaggaaaggaccaggagaggcaccagtggctgtgattgatggtcctgggtctgtccatgggccaacgctgctgcacaatttacacttgagaaagtctgtgcttctctaagacaaatcaggcagcctcacagtgtctgagctctcagatcattgtgcatctgtcttgtgatacacacaccttctgtgggcttttaaggacttgagtgggcttagaggtgggagatgccaactctgattgaaagatgtccgtgggggaaccaagggggccacacagggcaatcttttctctctcttatctgcacagcggagccacccaagccctccatcaccagcaacaacttcaatccggtggagaacaaagatattgtggttttaacctgtcaacctgagactcagaacacaacctacctgtggtgggtaaacaatcagagcctcctggtcagtcccaggctgctgctctccactgacaacaggaccctcgttctactcagcgccacaaagaatgacataggaccctatgaatgtgaaatacagaacccagtgggtgccagccgcagtgacccagtcaccctgaatgtccgctgtgagtatcttctgttcctctgtggcccaggctgacagcccaaatccatgcagccagagaccaggcctcttagtccctctcaggtccaagtacacagaccctcacctctaggcacccaggctggccatgactttctgccacaagcaaacctgggcagacccagccttgaccaagaatatgagaggaggggctgctcctgtcctgggaggctcagggtccacagcttgtgatgggagaaacaggtgaatgtctcaggctcagtgaacacatcggggtttggttgggacttcaggattgtgatttgggtaagagggacagtgcagcccttccacagaccaggagcttccgcttccctctgaggacatcacttacggctttattctctttgctccgggtggcttggacaccccttctaccccagatatatcttacgagttaggagcaaaccttagactcttcatccatgtggcctctaacccaccctctccgtatttttggctgagtaatggaaaccttctgcaacacatgcaagagctctttatccccaaagcactgcaaagaatagtgtatcctatacctgctatgcccacaaattggccactgaccgcaatagtaccacagtcaagatgatcacagtccgtggtacatggatccctggaccgttggcatcatattttgagatggggtctctctggtgttaaggaagagctgaaaaaacttttcttttccagcctgtgtcccatgggcacaagcagatcccaaattctccccgctgaaccctctcactctgtctctgcagaccctcctccctgtacttcagtaatttctcatggctgattatggatccagcctggaatgtggggagggggctccctcagccccaaagccccaggtagtggaaagagcttcacagagggaaaagcaggaagggtccttaagggttctctcggtcatcaatacgtccctttttgtcacctctttgtgttcttttgcctaattcatgagctacaaggaagaaggaagctttgaaacatctcacactttttccccagatgagaggaggaaaccccttggacgagggaggagcagctcagagtctgctccctgctctgctcccggctcacctggtgactggccctgccctgactccacctggggtgggacctgggtgtgtggagaaggtgcttgggcgacctgtcctgaatctggctaaattgagctgtcaatcaatggcagagcctctcctgggtcaggcttcagggaactgggaagagagggagccctggggcagactcttgaactgtggcctggctctgaagtcaccggctgtatgacgctgtggacacagcacagagcacagctagggatgaacatttggacaaatagggagattcagccaccgggactctgcaagggagggaaggggcagggccacaaagtgtgtatttatagcgaggataagagtaccagccactatatattcataaaggttaagcactcataacctgaaatttaccatattagccattttacatatacggtttagggctgggcgcggtggctgattcctgtaattccagcacttcgagaggttgagatgggtggctcgcttgagctcaggagttcaataccagcctgcacaacatggtgaaacactgtcttcccaaaaaattagcgaaacatggtggcacatggcctgtagttccaactacttggtgggctgaggcgggaggaccacttcagcccagaatgtcgaggctccagtgagccttgattgcgccattgaattccagcctcggtgacagagtgagaccctgtctccaaaaaaagtatggtttagtgatatcaattatatttatactgttgtgcaaccatcaccgctatccatttccagaactttttcaactcaccatgctaaacctctgcactcaataaacagtaactctccactccttctaaccctagtccctggtagccatcattctactttctgtctgtctgtaattgactattttattaataagtacctcacatcaatagactcatacaaaatttgtccttttgtgtctggccacatttcacttagcataacgtctttaaggttcattcacgttgtagtatgtatcagaatttgagtctcatgagtgtgtaaatgctcggcattttattttattttattacctgttaagactgaatgagtttccattgtgtggatatatttcattttgcctcttgacttatcgttcggtggacttttgagctgtttccacattttggctattgtgagtaatgctactatcaacatgggtgtataaatatcttttcaaagccctactctccattattttgggcatatgaccagaagtggaattgctgcatcaaatggtaatgctttgcttaatttttttgagaaacggctctaccattttccactgtggctgcaccatttcacactcccaccggcaatgcacgagagtttcaattttcccacctcctcaaaatacatgttttgtgttttcttttttttctttaaatcaaagccatcctaacatgtgtgtggtggtgtatcactgtggttctgatttgcatatctctaagtattagtgatgtttagcatctttgcatgtgcttattggccatttgcatatcttccttggagaaatctctgttttagtcctttgcccatttttaaattgggtttctgggtttttgctgttgagttatattagttctttatatattctgagaattaatcccttatcagatatatgatttgcaaatattttctcccattccatgggttgccttttcactttctggataatgtcctttgatgtagagaagatcttattttttatgaagtcaaatttgtctgttttttttttgttgcctgtgctttgggtgtcatagccaagaaatcattgtgaaatccaatgtcatgaagctctccccctatgttttcttctaagagttttataggtttatctcttagatttaggtctttgatccattttgggttaatttttatatggtgttaatttttatatggtgttaagtaaagattcaactcatccttcttcatggatatccagctgtcccaatatcatctgttgaaaagaccatcctttccctattgaatggtcttggtacccttgtcaaaaataatttgactataaacgcaagcatttgtttctgggctctccattctattccattggtttctatgtattcctttatgccagtaccacactgtgttgattactgtggctttgtagtaaattctgaaatcaggaagtgtgagtcctccatcttcattctttcatattgtttggctatttagagtcctgagactccatatgaattttaggatttttctatttctgcaaaatatgccactgggattctggtagggattgcattaatattatcatcttaatgatattaggtcttccaatctatgaaaatggaatttctttccatttattaatatattctttaatttctttcagctgcattttataattttcagcttacaattttttcacctccttggttaagtatattcctaagaactttattctttttgatgataatgtgaatcaatttttttcttaatttcttttcagattgttcattgtaagtgcataggaatacaactgttttttggctggatgcaacggcttacacatgtaatcccagcactttgggaggctgaggtggtcagatcatttggggtcacaagttcgagaccagcctgaccaatatggtgaaaccctgtctctactaaaaaaaaaaaaaaaaaaaaaaaaaaattagccaggtgtggtggcacacgcctgtaatttcaactacttgggaggctgaggcaggagaatcatttgaactggggaggcagaggttgcagtgagccgacatcatgctactgcacttcagcttgggcaataaaatgagactctgtctcaaaaaaaaaaaaaaaaaaagagagagagagagagaaagagacagagaaaaaagaaaaaagaaatacagctgatttcaactgatttttgcatgttgatttagtatcttgcagttatactgaatctgtttattagttctaaaattttgttttaatctctagggttttctacatgtaagttcctgtcatctgcaaacaaagttaattttacttctttctgatttggatgttattttctttcttcttgcctactttctcttactagaactttcaatactacatagaatagaagtggtaaaactaggcattcttgtcttgtttttatcttagagggaaagctttcagtctttctccctggagtatgatgttagcgttgggcttttcagataatgcctttattatatttgaggtagtttccttctatttataatctgagtgtgtttactatgatagaatgttgaattttgacaaatgttttattggttcagtctccctagtagttattagtctattcagattttctgtttcttcatggttccatttggaaggttttatgtttctgggaatttatttcatccaggttctctaacttgttggcatataattattcataatactcataacacttactatttctgtaaaattggtagtaatcactttcatttctgatttgagtaatttctatcttctcattttttttcttagtcgatctaattaaaggttttgaattttgttgaacttttttgaagaaccaccttttggtttcattgcttttctctattgtttttctagtccactctaatctttattatttccttcattggctaactttgggtttcatttgtttttctcctatatccttaagttgtaaagccaggttgttgatttcagatctttcttctttttaaatgtatgtatttatagttatacatttcttgcacaagattgttaacttctctgagccttagtttccacaactgaaaattgcaataagagtgcctgtttcacagtattgttttgaagatttaatgtaataatcaatgaaacattcagcaaaatgccacatgcagaggaactgtttcataaatgttagctgctgttaaagctaccattattattagccttgaagtcaggtagtcttagaggcaaatcctagatccgcctgtcactagctgtatgacattgggtaagttttttcaccactctaagccacctctattttctacctgacagtattattttacagctcaaatgagatacatgtaaataatttaacacagggcctgacacataggaagcacccctcaacagtagctaatattagtgattattaatcatcagtctgagttgactgatgactgatgagaaattaagcccaaattattgcaacagaaataaagaagaaacagatgcagaaggtattatatatacatgtgcatatatatattcacatatatacacacatatacatatacatatacatatacatatacatatacatatacatatacatatacatgggagaaacaggcattacacaaaaagtccactgggacatggttactgattaatatgggagagggaaaagaacagagttaaatatgaagtctcaagcctagtatgttagttttcattcagagagatgcagccaagatgggattagacatgcaatataattttgagggaaaaacacctgtgagggaaagtgggctgggagggggaggagcctgggagagccctcagatcatgatgcagatgtgatgcctgtggaggagaaagagaaaaaaaagaaagttttagattgcagtgcagttcgaagagagtttctgcaagactgttgggaattcctcaagcccatcacctttcagagcaaaatagtcttgcagaacttgacttgctttcacacacctgctgggagcccatgggaagtgaggtctctgtgcaaaggaggtggtgaattcaaaatgcactaactgccacaactgagacactaagaaaaaaaatgcaaccatgaaaaagtgggaagttttaatgacatacaagattagcaatcagtctttctcaaatttcaaagccttcaaaaatatctgagtgtaaaaaggtcaggatggaattgacagaagactgaccatcaacctggaaacctggtgagataaaaaacctgcaagaatttagttggataatcatctcccagcaaccttcccacaaaaataatgtattccttgaaggaacaaatagaaacgacttcatgctgagagttggttcctgggggacttccctgtaaaataagatcaacttcattccttctcttttctttccatggcagatgagtcagtacaagcaagttcacctgacctctcagctgggaccgctgtcagcatcatgattggagtactggctgggatggctctgatatagcagccttggtgtagtttctgcatttcgggaagagtggtaggtattatgacctttcctcttatcctatttcctgcagggctgactgccatgcttgggagagggaaaggacttcttcacctgtatctgggactagatctcctcctcctcccactaaactcctgcttctaagcactaattcctgcaggtctcttcttccctggtcttcatgcttcctgtactccactgtctcttagacatgactactcccagcctctgctcatttgtttccccaattcaatacattgtgaaagcttcttggtcctttttaaaacatctttcacttgtgctgttctctccattcccataaacctcaacaactgcttgaagtcctgcttgacttcttttctctagtctgaatgcttcctagcatatgactacttcattaccttcctaaaatcacctactgaagaacctgcagcggcctactctagcccattagataagttcacatttcttctcttcatgaatcctttttacttcctttaccactactcctgagtataatttctccatcctaattagatctgtcttcctatacatcctgcccttccaccccatgtacacatagaattcttagttccaatgttatatctaaaaacaaggtaaccttcctccaccacctgcattgtggagttacccacacccttcatcacaagcaacctctgtccttgtggaggacaaagacggtagcattagtatgtgaacctgagactcaggacacaacctaaacgtggctgagaatcttttcctgataaccaattcatgtgttcatgaaagatacagaaatgaagaaggcaaggtccctactccagggaacataaagcctaagacagacgataagacaaagggccaggtgcattggctcacaactgtcatcccagtgctttgggaagccgaggtgggaggatcctctgagcccaagagttcaaggttggagtgagctatgattgtgcctctgcactccaacttgggccacagagcaagaccctgtctccaaaaaataagacatgaaaaataattgtaataccaaaatagaaaaagataaattccacaagaagaaagagaaatctaatgggaaatatggctacacactggaatcactggaaaatttttaaaagaacaactgatttccaggctctgctcatacattttgatttaatggtctagagtgggaccaaggcgttattatttaagccttcccacatgctactaatgtgcaagcaggatgcagaacccctgctctgataagcaggacttgggcttaaatcaatggtttgtagctaggggtatgtatcaaaattacctggggaactttttcaacatacataagcttatacattgttggccatatttgttaatgtactatgccctgaactcagtaatccagttgagaaacagaagcgagatggaaattcaccttaattgatatgttaaattatatggaaaacactgtcaaatgacaagtgatgccaaaccttctctaagttatatttgcgggtatgttattgatgtgaatgtttcaaaaattatatgagatttctagaaatctaatattttgtcagtcatagtgttacatgccacagaaataaccaaatttgtttgtgagtggtgtcattatcatcaaatctatcaaatctgaagtcttatcagatttttaaccattgccatcttaagtctttgtcattcacagacagttgttttgattcttctctaaaagcacttggaaatggttacagtccaaaactgcttcttttccaaggagatttatggctaagactctgacaagttgtcttgaatacaagtttctgataactttagaatcataccattgggctaagaatttccaaaactttaatgaagagatatcttcatgaaactgccaatcaagatcaggcagaacaaaaaattaatttcatgggactagatgaactaatgaggataatgtttttatgaatttttagttgaagttttgatgattctttaaatgttttgttttccaaatttgaaggaatatttttcttttaagctatctatagcttacagaaacttggtaaaatacaacttgtgaacaaaaattgaaacattaatttttctccctacattttccatccagaatcaggcaactattcatgggtgttcacattgttatgaaaatagttatttgcataagttcaataagaatctgttctgtttataacaggatacatttaaaaatactggttatattaccaaggctttggctgggatgtcatatttggaaatatacatagaatgaacccgtaggtactgaggtactgcaggcaaagtctgaagtcagccttggtttggcttcctagtgctgagaggtttctaaaactttaatctgagattccttatcaaaccttccagcaaagcaatcttaaaaagatgctatgtggtcaatcgctattcttgctatacttcttatataaagaatcagaccaagtttgatgagactctacctattttgtaaacagattagtcttactctgattaactttggtagaaacagggagagatagagaaaaattatgttcagaggaaagactataatacaactgttatcaaattgtagccctgtattttgttttcaagtttttattatccacctgcagactggactggattcttctagctccttcaatcccattttctcctgtggcatcactaagtataagacctgctctcttcctgaagacctataagctggaggtggacaactcaatgtaaatttcaaggaaaaaccctcatgcctgagatgtgggccactcagagctaaccaaaatgttcaacaccataactagagacactcaaattgccaaccaggacaagaagttgatgacttcatgctgtggacagtttttcccaagatgtcccaagcctcatcgtgacgaggctcttatcccactccatttttccctgctcatgcctgcctctttaatttggtaagataatgctgtaactagaatttcacaatcagcgccttgtgcaggtaatttgacagagtgttggatgtgtcatgtcatcatgtcaaacccaaatatttgacctaagggatcctttattctgcccagtggctaactttaacaacatccctaatacaactgtttattcaaatgcacggtggtccctgttagagttagacctctagactcacctgttctcacgccctgttttaatttaacccagctatgggatgccagataacagaattgctgcctactagctgaacagggaggagtttgtgcagttgctgacacttcttgttgcacataaataaatacagtgggtactatagagactcagttgcaaaaattaacaaatatgctgcttgattaaaatgggtaggcttctcatgtggctcattctttaatctattctcttttatttggtttggttcatggggtctctgcctatggatcatacttcaaactcttggtgtgatcctcctgattgtcacaatattagttaccctggtgtgctgtattctctaaaacctttaaatgtttgcatgcagccattcgtcaaatgtcaaatattctctctttggctggaatgacaaaaactcaaataaatgtatgattaggaggacatcataacctatgaatgatggaagtccaaaatgatggtaactgacagtagtgttaatgccttatgtttagtcaaactctcatttaggtgacagcctggtgactccagaatggagccagtcatgctaaatgccatatactcacactgaaacatgaggaagcaggtagatcccagaacagacaaaattttcctaaaaacatgagagtccaggctgtctgagtcagcacagtaagaaagtcctttctgctttaactcttagaaaaaagtaatatgaagtattctgaaattaaccaatcagtttatttaaatcaatttatttatattcttctgttcctggattcccattttacaaaacccactgttctactgttgtattgcccagtaggagctatcactatattttgcagaatggaaactgccctgactcatgaatcacaaataaaagccaattgtatct

SEQ ID NO: 15 - DNA, 14645 bp, Homo sapiens
ggtagaccccagcttcctcactggggaactaggatgacactaaacgatagaaaacacttccagcttttcaagtgaaagctgattctgaaattaggagaatgcctccattatctataagcatccaggctggccttaaggatctacatacattttttacttttcttgggtttttttgtttgtttgttttttgggtttttttgagacagtcttgctctgtcacccaggctggagtgcagtggcccaatcttggctcactgcaaactctgcctcccaagttcaagcaattctcctgcctcagcctcccaggtagctgggattacaggtgtgtgccaccacccctggctaatttttgtatttttagtagagacagggttttaccatgttggccaggctgttctcaaacttctgacctcaaatgatctgcctacctcagcctcccaaagtgctgggattacaggcatgagctaccatgcctggcctacttttatattttacattcacatgttcattcattgagccactacttatggaacacatattctgccaggcaaaatgcaccatgctgggctctggcctcagatcacgtagagtccaggtctctcttggagaaaagtcctatatgctgagctttgactatgtgcttcactaatgtcatctcatccatgtcatctcccaaccaccctggtatgctccacatttgacaaacacagaaaccaagacacagagacactgagtggctgctgaaggggctggtgctggagccagggccaacacatgagcctgctgagacccagacacggtgcatcccctctcccacgctcttccgttggctcctctgtgaagttccaatgacattcaaggtatcaggaaaacgctgtgtacggagtttctgacccattcgtggataattaagaactgacccaatgctgagcagtttcccctccctttacaccccacccttttccccccagagccattttctcctgaagaatccacaccactgcctcaggaagcttggcttcccctcccatggggaagtgctggaatccactcttgcctgaccctcccataagaaacaagggaaattcctttacgtgagccgccttgctcagaacaaagcttggcgtgtttcttattcctcatcaatctgacaaaatgggtatttatttgtgcctctcaagcgtgtggcttggacatgatgttccgcatcgtggaagtggccgtgcaccaagtggaatatctgttactatagtaacagttcctttttattgataccagaataaacaggaatgcaaaggctgtctcacttgttggcacatttcagcagcctccgttcccaggggtttaagaaccgccctctagaggcagccctccttgctagtctgggacttcccggtggagtgaggaacccagcaacacgctcctgacttcccttcccaaggactcgacctgagaagtaagaccatctctgttctgtttcatctgctgttgagagcggtgccgttcgggaggaggtggaagggaaggagggcagacccggtacactgaagtgggctgtcagtggacctgagtgctttgagtttaggtacccgggctatgtcccagcatccataaaatgatacgggagatgcctccaggcaccctgggtttcggaaaagggtaggagacaaagaagcgagccccctggcatagccctgcattcttgttgatctttttctgctgcatcctcaggtgaatctgaattaatgcatgatatagcctcacctaagtcaattatcacacagtatgggggtttaattctcagcacaacagacagaacacagatttcagcttcagagtttggctcagattcaagctctttccttcaccggctgtgtgatttggggaaatcagatgacttccctgaacttcagtttccttgactgtaaaaagaggataataacagtacccacctcttcagtctgtcgtaagaatttcatatttcatgagatatggctgctaggtgcttagcacagtgcatggcacatagtgcacgcaggttaacgtgtgaagggcctgcctttctggtgaatttggctttaggactttgcaatacaaggcaagtctgagattgggccagaaatcaagagctgtaggattgggtgtgtcactttttgaaactgctaccaaacccaagtagctttgagcttcaaggcagcccccacgcctgcatctctgggtggcttagatcctgagtggccctcttagttctgttggtggtgagtacctgctggaattttccctgcagaggcatctgccaggtaaagtggctgacatcatgccactaatgagccagcagggattccaggtctgctgatgcttgttccagatcaactgcacaatgctgtccactaaccttgctaagtatcctccatgtctagccctggactctgctatttaattggttcaaaatcctaaatgtccacccaacattctccttccgaggtaggaagttgcaacggacctgaggcaaaatgttcaggaagtcagccttgagtcattgcatccaaatggacaagcagctctgctgggggcttccgagcatcgaccagaagctgctgggagatctggaggtggctccgagatacactgttctttggctgctggccagtgaaatacaaataggcactttccccatggagaggaaaaaagccagaagggtcaggaaatccagtgaccgtgcttgtcacttttactgaatgcctgtttttcctttgccagtcgttattttgaaagcctctcttctcctctgccctggcatcccattaaatgctgaaccaagagggttctgaatgtgttcggaacccagcagcttgaacagtaatgaggaagtgggggcacaggagggaaggccaccagctggtcctctcctaaacagagaccagcctgaggccagacaggcccgtggactctagcttaagcccaaagctgctagggccaggctggggctccccagtgagagtttgcatttcacgtaggctaggagtcctcaagttagcaggcctccatgttcttatctataaaatgggctcacacagcctcttcattggggtttcttgactatctagagagagaaaagggacataaccctgctttgtcaactaaaagacattttgcaccttgaagacagtggagaggtagaaagagcattgaatttggcgtccaaggtcctggctttgctgcttactctctgtgtatcgagacaagtagcttggcctctctgagccttagttttctcatctataaaacagggtaccactggctgcctccaagggtgatttagagatccagatcaaattctagtggtgaccacagggtttcttcaggacagaagtaccatagtttgtcttcggtgagcatcactctgccaggcgctgggctaagcacatcatgccattgtatcacttcaccctccaaactgctccatgaataggctgttatccttgctgtatagaggctcagagaggttaagctacttgcccaaggtaacacagctgggaaggattgccaccatgaatcaaacccactctgtctccactaaaacatctgctttaaccattgctttactggcttatgtgtcatttgttacaactgatgccatcgaagacagaaacatgactaccagaacagtggagaggcaagtggaagggacactgaggccttagacagcctggggtcccatggctattgtcaagacgaactgggccccgagactccatcagtgcagctctccttctgtctctccttactctctcctgtggctgcaggcaccagtgtttggtttcaaatctgccaccctgcattagccatgcatgccccagtggcccggtgcactctccgtgggagcagcagtgatctctgctgagccttgcctggtgtggggccaacatcctgtggagcctgtggcaaggagctctgggacctcttgggtcaccaacagaaccagggaggaaccaagcaaggggttccaaatctttcctcagaccccttattatccccaccccaggaaaaacaacatcagtcccataaactgcatattgagaattatttgccatcctatagtcatgcaagacactcaatagctgtcgcctactggtggcctccaccccatgcccagctctttagctcatccaatcttcacagcatcacaattctacagaggagcatcccagaggttagagaccatcccaagatcacacagctgctaagaactgtgaccttaatcagatttgctcacaataaccaggccaactacagtcagctgagatccttcaggaccgaagcaaataagtttgtgttttgggtttttaactccatggtttgcaaagttggctgactctaggaatcacctagggagcttttaaaaatccccaaagccaagccgccccccaaacccattaaatcagaatccctgtggtgggactcaggcactggaatttttgaaacttcctgtggtgatgccgatatgcagccaaagttaagatccactgatttaaccagtgtggtttctgaggatgagaaggctccatctaggactaggaatgggatttattaatagtgattgttaatagcagctaacagggtggtcacactgccattccaggggcaccattcacagtttaatctataggagttgaggacttgctgtgaggtacccaaccagcctgttgtatgtggcagccctggtagccagccccaagcgctcaactctgtacgaggcatttgccaagcaccttgcaagtatcacctcgtttatgatatcacaagttcatggaggaggattctaatgtaacgctcattttgcagaggaggaaacaccagatcaaaagcagctgtcccatctcaactctgctgttcagtgggaaacagccatagacaataagtgggcgtggtgtgtcccagggctgtgggatttggtccaaaggctgtagtttccaggctccagctccagagggtagggaggcatggacagagctgacattcgaatgcaagtctgaatggcttcagcctccctatgctactgcttcctcctgcatttctttaacagccatgaagaatacaaacaagccacttacctttctccttcgtgattggcccgctcctccttctccctgctagctcttctcctgggtgttcacctttttctttccagagaggacatgtctaatgcccacttcccctcttagctgctccacagccactccccggatggaccccagagtcttggatctctcgggatgcccagaagccttgggaacaaccccagtcctctgcctcaggaggcccagctgaccgcccaagacagcctggattttcttggcctgccacctgtgctttattgagtagtctcttttataacaggacctgcatgaggttcttccacccagagaccttggttaaataaattaaaaggcagaaaggctggctcagctttctaagtcctgggggtccccagcaaccctcctcaccccacccctcataggtgtatacgtggatctcacaggggttgtttgctggggttcagcaccctgagtggcaaaggcgatggtttttcccctgcagctctgagctaaggcaccagccacatccctcagggttcctgcctcacccaccacaccagcctggcctcagggaaataccatcatccacagctcactgctgatttaattaattttttttttaaggcctggagcaagtcattgagccagggctgaccacagattggagctggggtgcaggactggcttcataattgacagggcccagtgcaaaataaaaaaggagtgccacttgttcaaaatgcatttggaatttcaagacaacaacaacagaaggtcaaaccaaacagggcccctcttccaagggcaaccctgtgtgactgagtccgaccgtctggccctggggcagccaacccactggctggccggcaacttacgtatggggcgaaggtctcagccaggtcaatcacagatttttcccctggaagttaacagaagagacagagaccacccattggaagtgaaggaaaccaaagtcaaaacatcccaaggcctctgatggtttccccacacagcagcgagaataacctttttataactgaatcaggtgcgcctttccccgacttgaacccacccgtccaccctcactccaggcgctctcccagtctctcagctcacaccactcccagcacactatgtctttttgttccctgaacagacccagcttgttcaaggtacatgagtcacacatgctgttccctaggccccaaatggcctccttcctcattctcaactgtcagatcttaatgtcgcctcctcagagaggccctcaccacacctggctgacagcgggtccctccttagtctctatgggagcctggagccttttgtggtctttcgttttcattggcttgtgtgtgtgctgactgttggcctccccagcagagtgtgggttctgtgagcgccgggatctcacttgtttagttctcctctgtgtgtccagtgtctaccacagtgccaggaaaatcacaggaactcgaacatgtgtggaatgcatgactatttttattattacgcactttctcagtggtcattcccgttactcaggagctcttgattttgtgtacttattttgtatctggccacattcttgaactctctcagtttcaaatgcgtttctgttcatccatgtgggaattctgggtgtatggctttatctatacaaatattaaggctgccatctcctttcctaaagttatccaacttattctatttcctaccttatcactttggcaacatacagtgagttcttttaaggatggtgtggctgatgaaaagcaagcagctctggaagatttggggggcacagagggactaagaacaggtgaatagctggggagccaaagtagttattaaagtgtggcatgagctgaacaggaagagagctgaggtcacgggaaggaaagagcgtagctgagaattactcagtcaaaggatgggcgacacttgacaataggaataggcagcaaaagagagaagatctcaaagctccaatctgaatccaggtgttctaatacgtaagcacccagagagcttgatcccacagacaataaaatacccacactaaggagtgggagctgatacagccaactatgtattttgtcgagtgcccattttaaagtaactctaagtactattatgatcactttttaaggaccaaaaaattaggaaggatataacctgaaagcaaacagccttatgaaaaagatgagaaaaaaagggaagttaataagaattctcattacagaaatggttctgagaatatgaatttgagaaaaaaattaacatgtctatcctctgacacttcacctggctacatccaaaataccttataataattaacactttttccaggttacacagcacctttacgtatgtggtcttacttgctcctcctaacagcagcctgtgatgggtcatcatagaaatgccaaacacgggtctggtggccaccgttgcaaagtacagtctcctgttttatgcccagattcctgacatatcaccttgcaacgtgcaccccgtcaaacccccctctctgtattttctgaccccaataagctgtttgccactttcaggttttcacacatccctgttcatccatgaaactgcatttgggcagagaatggttctcatccccttcccagtgtgggggaggaaatgagagtctgtccacaggcaacatggtggccctcaagcaggggctgaagcctggtgtttgaaatggggacacactccctcagttgccacatgaaaatcacatgccaccgggcactggttccccaagaccaaagaaaacttcaaaagttgcattggcaattaccaacaaatgtgtattgatcgcctactgcataccagaccagacactgccaactgtcagggcctggcatataataggagctcaacctctgcaaagctagactcatgaagagagcagagctaaagtctaaattttcactgaaattcctataagcagctaatggccaggcagtgtctatacctttgaggcctttttttttttaagtcagtctctttctctctctctctctctctctctctctctctctctctctctctctctctctctgctgtatttgcttttgggcatttcaaggataaggagccagtttgtagaagagggagcccttgtgtctgaattttaagtaaactgacagatttcaaaccgctgtggtagaagtggggccattgagtagccaaacatttgacaactatccctttgctattagggacacagcagtctctgaatttcatgctctcctctttgatgtgaagaaaatgaaaagctgaacagttgtggaactgtggatagagttagacaataagggtaatactttctttttatcactgcatttatccaaattgtttttaacaagtacatgttactctttttaaatatattttccttttctgttacaagctcattgaaaaacagaaactcaaacataattccttttatagtgggcgaaaactgttgcaaagccaggccaaaaatatgcatgtgtcaacccgtattttgtgacccgttatcattttacttctatactccagacacatcgcaaacatcatctccaattctgacagccctgtgcatgcgttccgttatgatttccattttataagtgaagaaactaaggctcagaaagtcaggtagcttgcccaggtatgcgcagtagcaggtggccaaggtccatctgacatgaaaaccttgcccttcaactgtgtcccatggggcagggtgagattataggctcagctctgagctactcctctgcccatctctacagccgccatgtactcggagatccagagggagcgggcagacattgggggcctgatggcccggccagaatacagagagtggaatccggagctcatcaagcccaagaagctgctgaaccccgtgaaggcctctcggagtcaccaggagctccaccgggagctgctcatgaaccacagaaggtagggatgaagccctgctgcctgggccccgcaagcacctgggcctgtgggggatggggaaggtgaccctggaggaaagcagagctggctttcatcctggggctcctggagactgaggaaggctgaggtgccccacatgatcaccggcaaaacctgtaaagaccctgtccccagtgggtccctgggaaccagagggaccaaaaagccctgttctcttgcccagccacccatttcatgcccacactccagatacatttactgagtacctactatgtgctgggcactgagcccagacctggggatacaagaatgaatgggacccagttcctgtcctcacagacagggacgggtgcatagccaggcagtaggatgggtgcattgatgagggcataaataggcctgagaccccagaggaggaacccgagaggggtctaaaatgacttcacaggagcggtgctgcctcagctatgacctgaagggggactggagttagccaggccggaggtgggtgctggatggcagagggaacctcatatgtaaatgaacaggaaacaggagtcactcactgtgcctggggcatcgattgcgtggtgcaggccagggcagaaggatggactaaggaaaggtctacagcaggggcacaaggtgtggtgggcccgtctggtgaggtgggatgggggagctcacaataccaaagtgggcaggaatgttacagaggcccaggatggtggctggcttttccgtggaaggccgtggtgtgcaatgacagagacgagccagaggggcatctgggaggtggcaggggtgggatggggcaattgatgggatgtgaattggagaagaggaaggctgagcctccccttggaggactgggaaatactcctgctaaccagtaacagcgtgaacgcagcggtgccttcagagcgccctctgctggccgattctggtattagagccggttgtgatttctattcttgttttcagttgtgtgaccaatatcctaacagttatcattttgtacactgagtcgcttttgtttttgttttcaattagtattataatatgagcattttctctgaatggtttttagactcgtccctttaatatcaaaaaacatcaccacaatcaaaaacaaaagcttaaagacaaatcagagaaagtatttgtaatataaataaattttatttttaaaactcacatatacaaaaaaaaattcagatctcttgttttttttctttttttctttttttttgtttgagatgaagtctcgctctgtcgcccaggctggagtgcagtggcgcgacctcagctcactgcaagctccacctcccaggttcatgccattctcctgcctcagcctcccaagtagcagggactacaggtgcccgccaccacactcggctaattcttttgtatttctagtagagacagggtttcactgtgttagccaggatggtctcggtctcctgacctcgtgatccgccctcctcggcctcccaaagtgctgggattacaggcgtgagccactgtgcctggcccagatctcttacaatggacaaggaaaaaatgaataaaaagtaatacagtacagccagacatggtggctcacacctgtaatcccaacactttgggaggccgaggcaggaggatcacttgatcccaggagttcaaggctgcagtgagctatgattgcaccactgcactccagcctgggcaacagagcaagtccttgtctgtaaaaataatattgataatacagttaattcacaaaagaagaaatgcaaatggctggtaaacatatcaaatgttgttccatgtgactaataaagaaacaaatgaaaagcagatattctttctggcctaccagattctcaaatatgaaaagattggctggtgatggtggggagaaatagatgctcttgtacactgttcagaggaggatacactggataacctttctcaggcacagatagatatatgtacctcaaatctttttaaagagcctgacccagcaattctacctttaggaaagtatcctaagaaaataaccagaaataacataaaacttggtctctgcagtcaaacaggcctgggttcaaatcctcatgtggcctacctgtagctatgtcttggactggtatcttcagccctaggagcctcagtttctgtccctgtaaaatgggacagtaatgggtccacctccaaggctacagggaggattgcacaagataataatgggggttggtgtcaccgcaggaagcagccctgaggctgggggaagcgggaaggtgatggtctcctgacagctccccacttcccaccccaggggccttggtgtggacagcaagccagagctgcagcgtgtcctagagcaccgccggcggaaccagctcatcaagaagaagaaggaggagctggaagccaagcggctgcagtgcccctttgagcaggagctgctgagacggcagcagaggctgaaccaggtgggtgatgggcacccagcagggaccacgcatcctccagggctgtcctccagggaggagctctgctgtggccacagctagtaagagggaagaggatcagcagacagagcactggactaagagtccactcctggcctgagtcctccctctgccattcactttgctaggtccttagggcgagtggcttccctgaacctcagcttcctcactggcccagtgtactgcatgctgattctgatttcattcttataactgtcttgtgagccaggtggcattcccattttagagatggggaagctgaggcccagagggggtgagtgatttgaaccaggctgcacaaggagaactcagtctcatgctctgtgccccagctaccaggctgatagcaaaactcatccccaggttggttctgtttccccactgagtgggcccttggtccaaactccacaggttttcagagtaggaatccccctagctccacccacttcactctctgcttctccctccttcagctggaaaaaccaccagagaaggaagaggatcacgcccccgagtttattaaagtcagggaaaacctgcggagaattgccacactgaccagcgaagagagagagctgtagggccagctgccgggctcaggccactgcccaccctggcctggacagcctccttcagcccttctgtacctggcagccctgggccccaggccctgggacgtctgtgatgttcccacctgcttctgtagaaatgtgtcaccccagagggcctggctctccctgggaggctggggcccctaagctcctaggttttccttccaagcacccagccctcctgctccaagagggataacctgcacccctccctgcaaggggttcagagcccagcacaggagctttctctggcagaattgaggaggaagaggtggccctctgacttgacaagccttctgttctgcccaggccttcccaccaggaatctccgaggctccccagggccccgcttctccgtacaccccagctcctaggtctcagagaactcccccacctgtggttttacctgcagccagcagagcttagcttcaaggacacctgccttcaaagccactgaggggaggaagggcagggcagactgcagatggccttgttgctggcatcccggccaggtgggcggggactaacaaagacagctgtttagggtcttctcccctcacccatgctttcatcatcccctccgcacagcctccccgtccaggccttctaaccacacctacccagggctgccgcattcctgcactcagaagtctgcagcggtgcctcacaaacttgattgtgcataaaaatcactggggatcttgttaatacagcttctaactcaatagatctgggagatcctgcatttctaacaagctcccaggtaaggcggaggctgctggtgtgaggaccatgctgtgagcagcagggcgagagtgcccagggctgatatatattggaaatatcacccctgaagccatcgctggcccccacctcctgtggactgatgccccagggattcccaccccacttctgcaaccccaggtatccttcattatccaccccatcccagactcccaccccagggattgcccgtgaagactttggcctagcaaattgtgttggttatgtgagtgttgttttaatcagagatgtacatgattgccaatctgcatttcttaccagtgtgaccacactgttacgatgcaattctagccaaaaaaaaaaaaaaaaaaaaaaaaattttttttttttactttttcctagtcttatggaaagcaaatatacaatgattttcagtaggcttctggaatagaaacagtggtttgaagaccccactgccacctttatggactggcccctttgagtctgaatccccggcctctgtcacctgagacccaacccctagctgggccaactccagtgaattcacccatttttcttcttcagaaggcctttcctgtgtgagacccacatattttaaccttttgctcctatcccatttttaaagaattagagaataaaccaggcctgtttcttttcccctgaaatccctgcctctggcttcctaaacccatcatctaaggtgacagagcagtgctggaatagcatctcctttcactttcccaaaactgccacagatagctgccactggcatgctctttgattcctggaagcaaacgtgggactgtcggaggaaagggattgttctggtcttactcataactgggtggtttgagggtgactgaagtcgtgcttttcctgtgtgtgctgccagcacagggctgtaaatgcagatattgcgcctgtgtgcgtgtgtataagtcaagctccaagaggctcctgaatgtgactggcgtgctgagaatgtgtttacgctgtttaatgtctgccaggtgagggttacactgaagatgcacaatccctaaaataaagatcaccacttccccaaagaagcagccctcgggtccatgtgttgttcagacatgtgaagagaagcaagacagagggtctcagatggacgagggctctccaagggaatgcctggggattcacccagtggtccccagaggtgctccatggaggcaacaagtcattccatgaagccccagaggtagaagggacctcaagcaccacgccctccagggcagccgtgcagacgaccttggttcacttttcaggggtcgtcccaactctgtatctccagccactccaactgtggaggctgtaaatccagattttcactgttccagtctcctttgcagcttaggatggctatgtgatcaggtgtggccaatgaaattgaagaggaagtctacctgggcttctgggaaagcttttccaataaaagacacaggcatggctaacacctccctgggcctcttcttcctaccttgattgagggtgtgatgcctggagccacagcagccactttgctaccatgacaaaaaggccaagagaatcacagagtcattgaccctatcattatttcaccaagccaataccagccgccatccttctccagaattcttgtaaataaaataaatccctctttgttt

SEQ ID NO: 16 - DNA, 74279 bp, Homo sapiens
tctctagaaaaatgttacatttacacatttataattgttaacaacttttttcttcttttctttttgggagactaaataatgggatgatacaggaagaaatatgatttagagaaaactgattgagccaaatttttcaaacggtaatatgggtaatcataggctatggaaagttaaactgagtctccaatgtttatgattatgatgtttggctaggatataaaataaggcttcagaatataaaatatcctgcagattgagaagttttaaaagtagttacatacaagttttatttttccaacgttcctgccttttctaatgtctaaggatgaagcagtgtacagagaggaaagaatgttatatgtgtggtctgcttgcaagtgctggatgcctcctctgcctgctccaactaaactgtctgcttatgagaaagtcattgctcctctgagttcctgcctccctatatattcaacattagaattttgccaggttatcttttagggtcgttcaactctaacatatatatgagtctgtgacactgaactcagacacttcagaacaggaaccctggatttctctggatgtggaaatctttaaatctatacctgactggtaggacaaccaatctgtcttcctttcctctcctctcccacttatgaagggagtccagtcagaaacatgtttgtctacgaggtagtatatctggtatttctgaggaattcggttattatataggattatagaatattcaactttgagtagggtctgtggactccatcaattgcgttctgggggaggtaccatgaaagaacattcctactttagaaatagatattctctgttcaaacctgacaccctgacaggatcctaaaggatggaagctaaagtggtgtggtatataagtcccatgaccttgaacaactggttttatgtgggtgtcaccagtgctttataaaagtaaactgcatcgccccgagttcagtcatactgcaccagctgagcaatgcatggagtggacctgtaggcgacttgcatcgtcttcaacatgaagatagccacagtgtcagtgcttctgcccttggctctttgcctcatacaaggtgagcaatttgtgtgtaatctaagcctcttgccacacatctcaaagccctggggaagggacttttctccccctactcctgccaaaaaatgtttacgtatgcatgtataatcctgaaatgtcttgccagacacagagttctgaagatttatatatgtggctttataattatgttgttatctttagaaatggcaagtagtttgagataatctgaattttctaaccatgagaaattcttccattaattctttattaattcagaaaactgaatagattcttcttcatcttcctcttgctaaatgtatcaattcataatgcatattcttatatatgtaatagacatttaaaacttaattgtaaataatatatgtattttaatgttataggtataaatgaaatattttttaaaattcaatcatctgttcttattttaaagcagtggtatcttctagcttattttagtcttgtgttttcaaatgctaaatgggttgaaagcatttctcccaaagagtgagggacttttgtgggagctggaaggtagatttttatatttgctatttaaccctaagagaacacaaattgcctagacttacgttgctctgaaacattaaaatttttaaaaagagaaactcatagatagtctgaaatcatatacaaataatgcccattttcctaaaataggtgtgtaggtacaaaagagcctatgttaatgagagagtataatagcctgtgaccttaatcttaccttctgtcagatctctaacttttgcagctgtaataaggaggtagagctgccagaattcagaaaattaaattttatgtatatatcctataaatgtaatgctatattatagtttcaactataatatagtttcaaaattataattggtatagtattttgtgtgtatgttatattgtaattttaaaagggaggctggcatttattactccgaaaggaccttttgaagataagctattttgatggggttagaattcacatgagtattattttccaaagtaattgtaactttctgagtgattagacctttgtgagtatatatactaatctcctggtccagtgcccttcttttatttgccatgataaatcttaatgtgttcaaaaaccatttgcggttttacaacatattgtcattaaagcaatcaagatgctgcattaaatggattatttgttttgtttattaaatattttacatttccttaactttggtttctatattttcatcccagatgctgccagtaagaatgaagatcaggttagtcctgctttttctgttcattgaattcattccaagattcccaaagaaaagtggtttgtggccaacaccttcatgttaataatacaaacatattatactggtaggtactaatagcttttgttaaaaacacagaaacagatttttatgaatcaggacatgagcctctctctcacacacacacacacacacacacacactcaacatattaatgatgatggatgtctgcaagaggcaatttatcatgttaaaggagcattttaaaatttcataaacaaaaaataaatcaactggaaaactactattgttccatttaacatctcaacaagccatgatacaccacataggaagctgaaataaattttctagtaatcattatgcaaaagagggtggtctgtatcttgtatatagtcggtgtatatagttcatgtaatgaatatttattgagcatctcttagatgtcagaccctgtttgagatgctggggttatttttaagtaaacaaaatagatgaaattcctgccctgaaaattacgttttagtgtaggaaaacagacaaattaataagtagcttagcaaaacatatggtacgttaaataatgataaatgctaggagaaaaataaatcaggaggcataataggatccctgagaatggaggtggtatccattctcataaggataatcagggaagttctctctggacagacagtattagaataggaatctgaaggtcataagggaatgaaccacgaaggtatttgcagtttacagcaggccagacagaagcacctgtgagcgcagaggccctgacgcaagaaggtgctttaccaactcttaaacctcttttgtttgataaattaaaaaatcattttctactagaagttaaattttttaatctatttgaaagataggatgaccaattactcacacacacacattttatatatttatatacacacacactgctatgcatgctattaattcagcacttaaagcacaatcttaaatgttttgctgaatatgtggcaaaatttgttttatctctggccacgaacattaaaggaataaaaatgtgaaacagctattctttacgttgaaactctgagaaccatggttaaaatactctcttgccgtattttgttgcaatgattttttttaaagaaacttcttacatgagtgttctagagaattttatcatgttctctactatttcatctaagtttactgatagggagaggtccagaaagttcagtagagtagaaaataagctagacatttgggaatcagagagcatgctcacttggaagttttatactgggaaaaaagaaggatattatataaatatcattgtgtataaaaccatcattttctttttcagagtccgtgatgatggttggtgatttatggcagatactgtgaattttacactgctatttttcatagcattaacctctatttcactgaaaaatattttaaaaacaaatttagtgacttcttatatttggtattaaaggcaagaacacaaagaagtaattatttatttggaagcctttctaatcagagtttttggatactgtgtcagaaatgaaaactattgatgtagtcttttttacgatgctgtgattttggttattttccaagtttagtagcttgggttcctttcagcatgataaaagcatgttaaatgtcataaacatgaacctaaacagcagggaaaagcactgcagcaatctgcaaggatcttaagcatgcttaaatttgtcatcacctaagagtcattcttcaggcaaaagcaagctggtcagtgctctaacactgagatagggcaatggcagctcctggagggttttattataatatctggagatggacaatagaagacaacaaattaggcctcagccagtgagggaaacaggaagaacttggccctagagggctccagttttcctgggacatgctgagaaaaagagaataacagcaacagtaacaaaacaaaacaaaaacaggccagggactggaagttaccctgcaagtaaacaggtgctgaaaagtcatctactcaactcaggatgacttttggtctaaatatgcttctgtttcaaccctctctattatggtcattgaaagggtattccattttgctcagagaaaaactcaactgctgctttccatttttatggtcttttcctgtttcccaagagaatacattggataatttcataactcagaaaaatagcattgaatctcatcttaactaattaatcactgtgaacaaatttcttaacctattatttgggcctctgatgctcagtttgtaagaaagggagtctttctaggaattaagttctcatctaacagtgatattggagaagtccaatttagggattattcttattgatgcaactctttaatttttcttataagtagagacaaggtctcattatatttcccaggaggatcttgaacttctggcttcaagcaatcctcctccctttgcatccaaaattgctgagttacagccatgagccactgcacctggcctgatgctactcttttatgataagctttcaaaattatttagagctttattccaggattatcatgagtcgtctatatactttctataagacttacttaataagggatatattttcattacaaagaccccaggctcttctctgattctactatatggattttaggatcaattatattcatcaaggtaagcataacttgcaaagttggcatttgatactgtagaatcagagatcagacaggtctcaagatgcccagttattaatctgtgtccagaaattactactctgctactctgatggagtcactgtgtagctataataatcttagagatatttaagcatgccatccttagctaaatttcccagggctggtctgtgatatcgtttagttattctccttcaccattaatcattttgcaagtgctaccaactgcctaccatttttaagaggctagattaagtacatcattattcatccaggcaagtatacttctgttctacctaatgctgtatctatgtcacctagcaaagtatagtaatccaataataagtgattgctggctcattcaatgatgatcataaagatataggagactactggagttcaagaccagcctgggcgatgtagtgagaccctgcctctccaaaaaaaaaaaaaaaaaaaaaaaaaaagaaagaaagaaagaaagaaaaaacaagcacaaaacaccagatatagatataggagcctaaatagaaacctttaataaattttttggaacaggttgtgtttgtcagagttgaagcaaaagctttgtttatttgtttcctgatacaagcaacttgaagcagattaaaaaaaatcaaaacaaaaaacaacaaaaatccccttagattccaaaggcctattctaaagacctagtgaattttcactgggtacagtggctcatgcttgtaattccagcactttgggaggctgaggcaggtgtatcatttgaggtcaggagttcgagatcagcctgcccaacatggtgaaatcccatctctgctaaaaatacaaaaattacctagatgtggtagcatgcacctgtaatcccagctactcagggggctcaggcaggacaacctcttgaacctgggaggtagaggttgcagtgagccaagatcatgccactgcactccagcctgggcgatagagcaagactccatctaaagataaataaatacctagtgaattttctaaattaaaagggaatataacattttaaaatcatactttactaggtagcagaaatgcaccatattttaagctcctaaaaaagaatgagtgatgtatagcaggactttaataataatatttaatattatttattaatatttaatattgaatgaatcaaagaattaccacttttgaagatcattctactttccttttccccaccaattctattatttaaaatgtttcccctgtcctccttaaactttgtataacggagttattggtatttacaaaaccaaaagcccaaaacaaacatagtaggattttagttccaagggatgtgccaaaaaaaaaattaccagagagagagagaaagagagagaaagagagagaaagccttatgcaattattgagaaatttcctcagtacttccatagattcacaaggtttgattctgatggtagtgatagtagtgctgatgacatttgtggggatggtggtgggggtggaagtatgggtactttctaaaaaatataatacaaatttgaaaatgcaaaatggttaggcctctcccagaacctcggaagggggatgtgacagtgaagggccctgaatcttaagctttattagctttaaggtaagtctgcctgtgctcataagtcaaatgatttatcaagggacatgaagttcttttcagaaaataaaccagtctagaaacttgttttccagataaatataaccaagaaatccttttttcatttaacactgttaaaatttctaggaactgatatgttgcagtacagccatggggaaatgtaggcagacattttataatgttcaatgctcaaacaccttgcctcagtccttcagcaacattttcatattcctttcacagcaattactattggcctactgtgtactaggtattttatatgtgtcatcttagcatattccagtaataatactgacaatcaccagcaacatcaaaacaataataataaaaaaggaggaagaaggaaggaggataatttattaattgaatatctactatgtatcaggcattctttgagggctttacatacttaatcttcaaaaaaccttggaattgtgtgtgtatatatatgcagacatatacatatatctacatatatatatcaaaataaagcttgttttgatgtacttttagctaacacaacttttttggcattatcttaggaaatgtgccatgaatttcaggcatttatgaaaaatggaaaactgttctgtccccaggataagaaattttttcaaagtcttgatggaataatgttcatcaataaatgtgccacgtgcaaaatgatactgtgagtaaaggtttctttctttctttccaatgtttgagttaacagctagtctctgaactggtaaatgtattctttttctttcaagtgcatttttctaaaccgaaatggttaaataaaagtgctgagcagatcactctgacatttcccatcagataaagttggataattaccacccacctggaaagattttaataatcactcaaacaagattctgaaagcattccagagggcccagtgtcaataccttctgtagcactctatagtcttttgaggatgtagttccactttgaacttcctggttttggaaaaaaatgaatttgacaaagaaagtcagattccttgggcctgttaagacctgattctgttgcagcctagggactgagaagattggcttaagcataatgccagactctcccgtgacagccaaccagcagaaggacttaagcaaggtataccctgattctgtgagctgccagtgtctttagacacctagcattattctaggatgagatgaactaaagggtagattatagtttccaactccttgcagctcagaaagaattagtatcctggaagtttaccaatctctattcaatgcttcttaacttggtttccttctctccattgtcaccccaaaggtaaaagaaggcttgggttatcaattgcaaatcctcaaaccagaatgtcctaatttgtttttgaaaaggaaggttagcctcaatttctgaccactgtcaaaacttcaacagtggtagcaagccaatactgagcttacccacttaggataattatattacaattggctttttaaatgtcaggttggtgtgtgtcacaggatttaatttggggattgacgtagtcaatcatattgggataatgaagctcagatcgtttgatcatgcactgcttctagtgaagagactgtgagactataaagaagccaggacaagatttaatagaggatgggaggcctagggcaggttgaataattctttctttttttgaaagctgaatgtaaaccagcaggtatattatttattataaaattttcttcttgtttcataagatgttttaatatgagactgaaagtatgaatataataaatttactgaaaaataatgtaaaacaaaaatgaaatgccttaagagtctaaagacagtttatcattttgaagttattcaattattatttttatgacttacgtaaattatgttagaataaaatttttttttttacctggaaagaaggaggctgtgcaaagcataaaagctgtcatcagattcctaaagaactggcttatggaaaagaaaattgatttgctctgtgggtccctagatgttggaattagaaccaatataagcaggttcaatgtgaatattctctttcaaaaactgcattcaaaaaatggtgcagatagctttgagagttggtgaccacctggctgttggaagtattccaggaaggtagtctgttatgcagttaaagttagagattcttcctataataccatgttcgagatatttttcaatgttgaagggagatctggggttctgtgtccacttctgaacatgctaccaattttgacatgccaggctaggctgaggagagcagttaaaattaagtttaccatgttagctgttattgttaaaagttgagcaaacaatgtttaaactatgctatttcttgtccttttccagggaaaaagaagcaaaatcacagaagagggccaggcatttagcaagagctcccaaggctactgccccaacagaggtgagactatttggagccaacctgtttacttttgagaggatgtttgactctatttagagctatctgtttattccttaattactaggtcatacctgttttgaagccaacaacttaggagggagggaacatgggttagtccaggggtgggctaaatatctggtacatcttgtccataggcccaacccatgatccgactctaaaaacattttaggcactgacggaaactaagaggtggagtgagccagtgtgatgtctgccttccaaggccatcatttctcattcctcttgtcctgtcttagcccaaagaagagctttcctgggactgtagaactaagttcaaatcttagaattcttattgcttgtgtaacttagaaaatttatgtatctctggatctcaatgttttcatctgtaaaatgagttttagaccgaatagaaactaagttttaaaagccggtctcagggtttaacatgttctagcaggcatttgactcattctgtttcctttttcttttactcttttgctttttactgtatatgttccagtacctggagggtcctcctaattcaactatagttgcttgtttatatctattttgcagacagggactcaggctaatattttgtttaagaaaagtgttctctggtaaaaaaaaaaaaaggtcataaaacattaagaagtaagatagaaggaaggaaagaaactgcaaatttatcctactatataaaccatttcacttgataatttttttcacttagaaacatttttaaaatctttacaaaattataaaaataaaatttaaaaaataaaaatttggggtccagattggtggaaatatatatctagcctacaatatctcacaaatgggttactgacaaagctgggactaccaccagctattctaaccactactcacatcaccccaggtctcctatgcagtttcttcactaatttccactttcttttccttctctgctggccccaacacgtaattaaaataatcagtcaaggttagtacaccttaattacttataacatccatggtctaacaacgctgacatcttccttggcagtgttagccaagaacatctgagaacctcagcctccacagtaaacatagtctactaaattatttgcctgggctcaaccagtctcacttttaaaacaataacagacaccacaaaattgatccataattgaaaactctttatctgtagcaaaagagagctacttttatattctacaaaatctgtgggggccagaaaggtttagtggcaactttatatgtgtcttatttgtcacattcaaagagtggctcactttctaacatccattctcctcttcctcctctgtcttcatcataaaaaaatgatatatctatagtgtttaaaaatataaaatatgaggaaatgacaaaaaagcaaaatacacacaaacataccaattttaacaaacctatctaaaaaatatagctagttagatgtttccatatgtagacacaaatttattgaagtttaataaagtaggagttttaaaaaataaaattacagtcttaagaaataaaattactttttgttaatatattatgcctgagtcacacacacacacacacacacacacacacacacacacacacacacacaaaactgtaaaaaaaaaaaaaaccctctagataaaactcttaatagcgatgtggttcactacttaggaaactacttacataaccaagtagtaacttacattaagttaaggcagttaacatttggctgtgtgcctttcaaataagttctgtctaaatttttccttgtctctgtatttaaaaggattcatccaattataccatgtgttttttgttgttgttgtttttctctccactataaaacagaacaatgtgctgattttttctgcttagactccgcccatcagaaatcaaccctgctactccctctcagaataaggtgctctgcatttcaaggagtttcctcctacagacatcctctcactctctctttcatcactaattttcttttcactagtatgtcatcctttcatttcccgactctagtattccctccattaacaagtcttgttggtactgcctccaaagtctaactccttttctccatttccatccctaccatctcaatccagtcatccataatttctgatctctggtgttttggtacatgtaaagacttgtttttttaattgatgaattcattcattcaatgtttatcatgatttaggttgccaactttatagaatattaagttcacacgagtctgtgtgtttctgaggtccctcttttttcagattcatttattgctttaataactagtatggtaagtcccccttcttagttcatgttgttaaaggttgatgggacctatgcatagatatatggtttccatatacatgttagagataaaaataactgagtttataaaaacttcatcttgaatttggtaacccagtgtgtttatggatacaaagaatttgtaaattaattggggtaaaattgactttttacagtattaattttctaaactcatgagcatagaatagtttatgaataagtcatataattttgatctactttataaaatttacaaaatattcagatttttataatttttgttaatatttttaaaatgtgtaaatttattactattttgaatatattttgttttttattgtgttttatctgtttattgttgatatagacaaattctattgatttcttcaggttaatcttatgtcagacaacttttgtttttgttcttggtagttgatcatattacctacatataacaagagttttataatattcctttcaatcttagcacatctttctttcttttcttatataattggtaaaggatccagacttcaatagttaaacactagtgatggtaatgaacatcaaataatccccttgtctcttcatattaaagggaatacctctaaagtttctccattgaatgtaatatttatcatagcggtttttacctctacacttcagcaagtttggaaaattcctttctatttttagtttgctgaatatgtgttgcttattattaaaagtcttctttgcaactattaaaataatttgattttttagtctattaatataaataaatttctggatatatttcttaatattaaactattattattttcttagagtaaatcatactttataatatattttaaataaatttatgaatttggatactaatatcttaattagaaaatttgcaattatgttcttaagtaaggtgaatctccacttttatcttttaaataattcttatctggcttgggaatttacataaaattatcctaaggtgtgacactttagactctgactaaatcaggtggtcagcagatcctctcctcagaaagcaactataaagctagacaaaattgaccaaaaaccattttagcaatctgaaaattgatcagcagtctataccaatctgagaagcatttatcttgaaaaactgctgactttaggaataaaacgagaggtctgtgatgttcttgctcagggatattcccatttcatcccctggcttggttggcatggaggttctatacagggtacaaaggtcagcaaaggcattgccattgttgaagaaggctaacctaatttggagtaacgagcaaaagtcatacccagaggtgttttcagtgtaagtgataatcttcaccaagggtaaggaaaatggtctgaggttgcagtcataattgaagcaagtgtattcctggctgagccttcacacgtagttgaaagagcccaaagagggtcaagagattcgcaaactcctaactgactataaagctgcgcatatccgcttaataaacacaaaatgtcccagtgagaagcaaatgctggagtagatgcaaaagtggcctgaactttgcatgccctcccctgtacacaaaggtctatctgagagggtgaaagcattgttagcttgaagtatttgaacacaaactgtgttaaatccttagctgaccattaaactacaaaaacataggggaaaaacataggaagccaggcttaaaaaataaccatgatagaaactatcattttcttagctgcacatcagcagctgcaattatgagagaggaagatttcaaagatttaatccagccacagaagcaaaaaaagaataaaaaagcagtgaaaataatctttaaagaaaaaattgtaaacctgagtacctatattatctaaaatgttgtttttataatcaaaatgttcagtttttataatccacgttagtgaggttaaaaaaatgtcagttttcaccaaaagttataaaattttcaaagtaacaagaatatacaacccatactcaagaaaaataattaatggagtttgtctttaactgtgtacagatgttagatgtggcagacaaagacttgaagcaactattaaaaatgtattcaggatactaaaaaaaatcatgtttgagggttcacaagaaagtataataacaatgaataagccgataaaaactttcaatgaaaagacagaataatttttaaaaagacccaatgaaaattctggagttgaagggcacaataactgaaatgaaaagttcagtagagaggctcagaagcagatttgtgaatccttaaaaaagggaattaccaaacttgaggaaagcttaataaaaactaacaatggaaatacagagacagacaatagagaagaaaaatgaacaaaattatacactttttgagacagcagcaagaaagccaacatatgcataatgggaataccacaaatagaggtgagagaaaaaggaatacaaaaattatttgaagaaacaatggcctaagatgccttaaatttgatggaaaaaaattaattttaacatttaagaaactcaatacaccccaaataggataaatatgaagagatccacatatggctcatcatgattaaaatgttgaaataaaaaaaaaaaacaaagagaaaatttagaaagtggcaagagaaaaatgacacatcctatatacaggctgtatacaattaaaagctggcccctcatctaaaataatgaaggccggaaggcagtaaaatgacatgttcagaatgctgaaagaaaaaaaagattaagcaatattctatattctcaaaagctatcctacaaaaattaaaacaaaataaagatattactgtactaaagaaatctgagagactttgttgttaacacaactaccttaaaaataataatgaaggaggtcatttagctgaaaggaaataactaccagatggtagcttggacctacagacagaaatgaaaagcaccagaaatagtgaaaattgagttaatctcttagcctttttaaaagaaataatcttaatatataaggcaacaattataatgctgttttatcaggtatatatatatatatatatatatgacaacaatagcataaagggtgatagagaaaataaagctttattaaggcaaagtttctctattttaccaggattaagtattattctgaagtggtttgtaataaattaaggtgcatattgtaattactagagtagctactaagaaaatagcatatataataaatatataacatcaacaaaggaattataaaggtgtactagaaatatttaacccaaaacaagatggtagtagaacagagaagcaaaaaaagacaaaagcatattgaaaacaaatagaaaagtagaaatgtaaatacaaccataaaagtgattatattaaacataaatggtttaaacatcccaatcaaaatgcagaaattgtcaaatgataacaaaggaactataagctatctccagtaggtgctccttagattcaaagacacaaatagttgaaatgataacagatcggtaccatgctaagtttaaccgtaagagagcaggattggctatattaatatgtgataaaatagacattaagacattattagagacaaatagggatattttgtaactttaaaagtgtcaatacgttaagcaatataacaatgataaatgtatacacacctaatagaggctccaaatttatataacaaaaaatgctataattaaaagaaatgaaaagaaatgaagaattcaaaaataatcgttaggaatttcaatactccacttaaaatactgatagaacagctagactaaatatgaccaaatagaatacttgaagaatactatcaactaattcaacctaaactgaaatatagacagtgcttctccgttgattgtagaatatgtattattttaaagcaacagaggaacattttcaggatacactatatactaaggtacaaacataataaattttaatatattaaaatcatatatagtatttttttttaaccacaacagagttgaattcaaacccagcaaggaaaatgaatcgtgaaaatccccaaatctttagaaattaggcaacacacttctggataattggtgggttaaagaaacaatcttgagagaaattggaaaataatttgaattgaatgaaaacaaaaagacaacaatttaagacttactggacttgtctaaagcactttctagagatttaaatggcttaatcagaaataagagataggattcaataatttaatcctctaccttgagaatattagaaaacaaagtttagcaaactaaacccaaagcaagcagaagaagaaacatataaggattggagcagaaattagtaaaacacaaaacatacaaataatagaaaaaattaataaaaccaatgttggttctttgaaaagatcaacaaacctgacaaacccttagttttattttcccttcaagaaaagaacagaagacaaacattaccaaaatcaagagtgaaataggagacatcagtatgtgccctggagaaactacaaggcttatgatgaatattatgaaaaatattatgccaccacattaaataacttagatgaaatagaaaaattcctagaaataaccaaattattgaaaattgacccaagaagaaatggaaaatcataatagacttacagcataagtaaagacattgaatcagtaattaaatttaaaaaaatgcccaagagcagatgactttattggcaatttccattatatactgaaaggagaaataatatgaattctttacagattcattcaggaagaagagacactttacagctcattatatcagtccagcattattctgatacaaaatgtagaagacatcacaaaagcagaaaactactgacaaatattcctcataaacatagacagaaaaatccttaacaagacactggctggcaaatgaatctgcaatatgaaaaaaataaatcattaccaaataagaattatcccaagaaagcaatgttggtttgggaacagaaaatctattagtctaatacacaatattaacagaataaagggcaaaaccacatgattatcttaatagatgttgaaaaatcacttattaaaatccagcactcattcaagatgaaaactcacacaaaatattatcaatagaagtaagctttttcagtctgataaagaacgtctgtgaaaaacctacagctaacattataattaatggttagagaatgaatgctttgcccttaggattgagaagaaagcaaagggtggtttactgtcaccactcctattcaacattgtactggaggttcttagccagtataaggcaaaattaattaattaattaattaaagacactttttattggaaatgaagcaactgtctttaattccaaaacatgataccatatatgaaaagttctagggatccacaaaaagaaaaattactagaactaataaatgagtttagtaagatttcggtgtgcaagattaataatacaaaattgtatttctatatactagcaatgaacaatttgaaaattaaaatatttcattcacgatagcataaaaaatgtggaaatgaatttaacaaaatgagtacaagacttatacactaaaaactataaaatggtactgagaaaaatgaaagatccaaataactagtgagataaatagtccatgttcatagatgagaaaactcaatattgttgagatggcaattttcccaatattaatcaataaattaaacatattcccaatcaaaatcttgtcagtctttctttttggtagaaatagagcagttgatcctactagttatataaaaaatattgagacatttaacagtaactgaatttaaattttgttataatgcaatagtgatcataacagcgtgccgttatttcaagataggcataaagatcaggggaatagaatagggattacttacttttatggtcagttaatgtttaaccaacatgtcaaggtaatgctgagaaaattgaatataattaattttaaaaaacagttttatcttataccatacacaaaagttaacttaaattttattttggcactaaatgtaaaagctaaatatatgaaacttctcatgtaaaatataggaggaaaaaaattcatgaacttgggtaggtagagtgactttagacataaaactaaaagcgtaatccatgaatacaaaattaataaactgaaatttataaaaattgcaaatttgtgtgcttcaaatgacaacaagaagtcaatgaaaaagcaagttatagactgggagaaaaatagtcacaacctatatagcaggtaaggacttaaatccacaaaacataaaaacctcttacaaccttattataaggagacaattcaattaagtatagatattacaccaaagatatatgaatggctaataagcacacaacaagatgcgcaacaccgttattatttaggcaaatgctaattaaaaccacaatggtgtatcactacacgtacccactagaatgattataatcacaaagacagaaaatgcaaaatgttaagggtgtggagaaactggaacacatatagtcagatcggggtaatatacaaggttacagccatattggaacacagtttgagaacttcttaaaattttaaacagattgaccatgtgatccagaaaattcagtcctaggaattcagtgaagtgaaaatacaggtccatagaaagtcaggcatgtgaatatttatagcaacaatgtttttaatagttctaaactaaaaacaatccaaatgtccaaatgtccactggtgaattgataaacaaaaggaatatatttatacagtgaaatattattcaacaattagaagggatgtgctactgacaattttgcaatatggatgaacttcaaaaacactatgcaaagtgaaagaagctagaattaaacaattacatatttataattccatttatatgaaatgtccaaaaagggcaaatttacagagtcagaaaaatgtttaatgattgcttgaagctggaggtgggggctggatatactgtacacaagcacaggggaatctcgtagggtgatgaaaatattttaagaccagattctggcgatggctgtacaactctttccatttactaaaaatcactgaatcactttcaatgggtgaattttatagtatataactaatacctcaataaagctgtttagaattttatttttcagttcatatgattgtaactgctttggaatgatttgtacattactattatttaatacaaaatttcctagaccttcagaaaaatagattataaagctattgggactgagttattttggggtgggaatatctcagaccaatatatcaattggattaatgtttattgacctgtgtaacaaatgtagttatcttatactttttcatagtcatatatgcaatttggtttttgtaatgtattagcatactgatactgatgaaatgctttcatcgtattaatgtctcaatatttatatggtagtttttaattatcattccatatatttttacttttcatattacttgtctctttggtcagtcctactagaaatcttttatatcaggttgtttgataatatactctgttgtttctgttttctatggtgttaattcctgtttctttatgtttgttcctgttcattttacaatggggttgaggaatactttattctttaaatttaatttttaaaaaatttatgacaaatatttttgaagatattaataattatacatctcaggatttatactttaagtatttctatttatcattattttccaaacacttcttaatttctctacccctaatgttatttagtaatagattatctaattttcaaatatgtggaacttttaaatattttatattagcttttaattttattaaattttggtcagagaatataaatgatgtagtattgattatttgttatttcttaagactttgtgacctcacaaatattctgcttttatgaatgttttatatattctttttttttttttttttttttttttttgagacggagtctcgctgtcgcccaggctggagtgcagtggcgcaatctcggctcactgcaggctccgccccctggggttcacgccattctcctgcctcagcctcccgagtagctgggactacaggcgcccgccacctcgcccggctaattttttgtatttttagtagagacagggtttcaccgtgttagccaggatggtctcgatctcctgacctcgtgatccgcccgcctcggcctcccaaagtgctgggattacaggcgtgagccaccgcgcccggcctatatattcttaaaaaatgtttattttctgtttcttggttgtagttgtctataaaaatctaatggcttaatattcttttttttttacttaatatataaatttctgagaagtgtttgcttaaatctctaactccagttattgatttatttaagtctattacattctgtttgttattgtttgacatatttaaagtctatattattaggtgaatatatgctcatgattgttatactttcttgttcttgttcttgtcattttttacttcatatattgtccttctttgtcacttatgatacatttttggactcaattctaatttttaagtgttaatattgctgcatatgctctcttcctcttcatttttgtcttgtatatttttattatcttactggtttgatatttgcatgccttttcattttaatttttctcaatacatgggttcttttttaaacatcaaattaccaattgtctcttaatttgtaggtttagcacatttatatttattgttatttctgttatagtgagacttggttctttcatttttaaaatattttcggttactatatttagtagtttcttctttctagctttttttgggtggtgatttatttttgttcttattatgactatccctaaacaaatagccatacttttgattatttattctattgctaatatctgtgtctattgtcaatttctttgtcttctctccaaatgtatgttaatccactctccatatattttctgtaaatataattttgttattaacttgattttagcttaaaattcttattgcttttctcttttattctttttttgttaattatagaaattgttcctttcttcagatatttctttctatatttatttccttcttttggagacttctaattctattttaaatgttctttagcttttccttttttagaaaaattgtttcttatttccattgccttctaggagaattccttgatctgatcatctggttcacaagttcattatttatttgtacctatcccatctttattctttatattgctagatttattatcatttgaatattttccatatacaaaatttccactttgttcttcctttataacttctttcttgttattgttttacatttgtttatgcagatatcttctcttatctctccataacataattagacttgataaaatatttttctacccattccaatatttctacttcaattaatacatgttgtttagtatattctattttttacttgtcagatatacagatattcttattgtaatattccataatggctgtatttattttttctgctaaattcagttaggtagtgttcaatgtcaagcttcagtctgtagcccttctggtgagtataaggatagaaaaagagataagacccagtgctggaggttctgaatcccctcttttccactccagcttgctgccacttcaccaggtcaggaatctatctgtaaggtctcaggcattgtcaacattaggaagaggtgttttctgtaggttgtgatccaccacctaggggtttggaggggaaggagatggagtcatatatccttgcgcctgttttcatcatcccccagctggccttttgacttgctctgtcattcccctctctacacctgtgacctagttagtacgttgctgttgattttctggggaagggggatagtagtgattgttttgagttaattactttgatctgtaatttccctatgcttctgtagtatcttcaggaatgatttttgagagaaaaccaagagccatcctgctttttctttatgcttcggtcacatttcccttctttctgtccattccttaaaaaggacagtctagtttccaccacaaatcctttgcaattgccgttctctatgcccagaatgttcttccctcaaatgtttttgccactatatctaaaatagtccccattctggtcactattgtatttttctgtttatttgtgagagcacttactataatttatagttgttgtgcatatctgtctctttctatcagaatgtaagctccttagaatatgtattccatttttttctctctctctcttttttattttatattttctgtggcagcttcacagtccagaagagtgctaaaatgtagttaatatgtaataaattttgtggaataaatgaacaaatgaatgaatgaaataacttatatggccactgcttatcttattttcaatgtatttttaacttctttctaaacatatgaatagtggagtatgttctttagcttttcttttctattttcagttcttttccttctagataagagtttctcaacctgatcttctgtatcctacttttattctttatattatgtgacatactgatacatcataggtctacattctaagtgtttcatatttatcattaaaatgtctttattttgacaatgataacatgaagttgtattttgcaatgtgatattctaaagaaaaattatccagttttattatttggttttaggtaaaagttaaagtcaagttaactctatatcttttttagctaggttatgtcacaataataagttgccaaataatgtttcataagaattcacttgatccttattgcaaatctggaatgtaggtagggtgtgaatttccatttttctgatgaggaaagtgaggtgcaaagaggtgaagtgagtgggtggcaggtctgagacttgaacactagtcttcagttattactttgtacatttgtttttctttaccatcaggtttgttcctaagtgtatgtcacattattagaatagagatttgggctttctcctgccgtacctaaaagatgtttagtttacttggcttgtcagtagagaaaacattgaaaataacaacaacaacaacaataaatggttctgtgtcaggcactgttccaagtgctatacatgaattaacatatgtaaatccctatatagtcctgagagtttgacaaaattataaccattttgcacatgaggacactaaagcatagaggtgttaaataacttgtccaagtcccatagcttaagtggcagacttagaaatatgaaacaagcaatcctgctcttaattactattctaatctataataatagaaactttgctgtagtttatagtttacttagagctttcatatccgtaatctactgggcctcactactactctgtggagaaggcaggcaggattggacagacgaacaacatgccaagtttcagagtggtgacgtggcctacttcacccagacagcaagtggctgaagtaatactgaaattctttcttttgaaatctaattttatctgttcttggatcatgttttattgcccataaatttattagctcaatgtagccttcatgatatgtttttcttctccagcaatttacattattgtgggcttaaaatgttaatctatttatacatctaaggactattttgtttcttacattttgacgttccttgatcatgtcttttgcagctgaattgtgatgattttaaaaaaggagaaagagatggggattttatctgtcctgattattatgaagctgtttgtggcacagatgggaaaacatatgacaacagatgtgcactgtgtgctgagaatgcgtgagtattctctgaagtaggctttctccctaaaacgtgttctctctataattacatgacacaattttccctacagtctttaagctaacgattcattatgtgggagttagccattcctaaattattagtaccacttcttttactactcttaagacaaataaaggtgtatagcataacactttatattttacaaagcacttttatgtatgatttatcagatggttatcactttatgaagtagacagaatagggagattatagattatatgttcataatctataaaatgttatagattttatatttaaaatgtataataaaatatagctttaatataataaaacagatttaatattttaataaaatatagacttatgattttataatctataagttatagattatatgattatcatatataacagattatataatatatttacacacatacatacatatatacatatatatacatacacacatctatcttctatctatccatcatctattatctatttgtttatctatgtgtataccctttttcacagagaattatttcatcatcaaattatgtttattaagtgcttaataatttgtaatattagagtagataattgagactttcaatattaaatttcttcccatctctcaacatttaccaaatagctaaggcatcttactgtcctatatcttgtccctgttttgttctttctctaccttcaatgctagatttggttatcaattgtcttcaccaacaagatgacatacctgcttggcgggttctggcttgtgatctcaatcttgaattgtctggtcttaaggttttgcaaatatgaaaaccaaggtgtgtacaggctaatgaggggtattataattattcactttttgagatcctgcaagctttagctctccttgcaataaatattttcagcaaaataaaactgcattaaaacactctcatcttttgcaggatggtattttcagaaattcactttaaaattatgtcctcaactctcaccaagggtcaacatagagaaaccgaaaacaaacgtagatatatgaagaacacacagatttttatcagatatatattgtgtagcacaagtatgagcatgctatatatttaattcttactgtgtcttatgtggggaatcccattataaatctttaaatctctggtccaggtgaaagtttctctcccctaatttctggtatatttctttgtactatgtactttgtactatgcgatgagaatcatacttctccttgtgttgtttcccttgcagctctagctgctaggaggctctacaataaaattgaaaattttatttttatagtgcccctcagctgatatcctttgaaataacttttttcttatcacttttaaatatttagtttttttctttatattgtttttactaaatttttattgttttacagatgttatcattgtaatctgctttaactttttacaaattaggaaatatgtcttacatttgcggttctgtgttttcagatatactttaaaggtctacgagactgaacaaaattaattatcaagactttatgtactttctatgaaaaataaaatactagtcttcataacccaaataaagagtagtatagtgggatgttagataatacaaatttgactttgtttatttaaaacaacaaagttccttgggtgctgagtgttatctattatccagttacaagctttacttttccccatcttctgatgtggatccctcctctaaacaaaggttaaaaaaagatttctataaataacatttacaagtctgaatctttaccatctcttccatgttaactacatttctttgacttgaagttataaacagtgacttttattagaaaaagtaataaaataatactatgtggcagctgttttcgggagtaaaggagaatgacaatgcaatgtagagcagttaggtttgaatggtgggaagttctgtgatattaaactgctgtgtctactaacttttgattctaggaaaaccgggtcccaaattggtgtaaaaagtgaaggggaatgtaagagcagtaatccagagcaggtgaggtcaattgtcagcctgatgggaaatactgggaggctaacttcaaatagtaagtaggtgctctcctcttccttcttaggtgggagccttggaaggaattaattcttgctttatgtgaaatggaatacccagtactgcccactaatatgaaaaagctaattatagtctctgaaactggatcagattactttggtggttagatctttcaatctattgctgctttgtataaaaaaaaaaagaagaagaagaaataaaaaggaaactacatgtgtagtagaaagggcacaacacttcagtcacttagcctgcgttaaaaccccagcagtgtcacttgctgtttggagaccttggacaaattacttaacctaaaatgagatttgaactaaatagattttttttctatgatacagttttgtgagcctgtgatggtaggggaaggggaaggaagaaaggatctcatacatgtcacacttgtctttttccaggtgaatgattttcctaattttcaaggtctgatgccctttttataagcttccagagcacctgaggtgacttgcaccaagtcatttagcatcatgcaattttaaatgtctctttttatcacctaggagattgggagcaagttgatggcaaggactgtgctctgtctgagttctggcacatagtaggttatctgtttactaaataaatgaataaacaagtaaaaaagttttatatttaaccacatgaattatagagtacttactgagctacatctacacagctggtactgctctaagtggcccatagcaatgtcagagggactgagttcaataaaatttctgaaaacagtgttgtcagcattacaatcttggtaagtttcaagttcttttccctgttcttcaggatgtatgcagtgcttttcggccctttgttagagatggaagacttggatgcacaagggaaaatgatcctgttcttggtcctgatgggaagacgcatggcaataagtgtgcaatgtgtgctgagctgttgtaagtagcatcatccccaggtggacttgatgatgatgcacttggttgctgtcccgagaatcactcagcagagagataaaatccttttcatgaagcatgcaattctttgtctttacactgtgaaatagcctttctcacagaaaggcttcttttctttttcttcttatcattgattgaagtttcttaaaagaagagaataaggtggtcatgttagttattaaattcaagactctcatttcttttaaattacagtaatttgaaaatgtatagtgttttataaggcacaatattttaaaatttagaaagcactttcatatggaatgatctaggtcagtcgtctgacatccattgcttcatttgggcatatgtagagacccttcctgagtaatgtgaggctaattaaaataataatagtaataatgccatgtgtctgaatctatttattagcttaaaaagtggaacgcggatcattacaaaaggaagggctattgggttaatctttatctgagtgcctggcagtgcttgggcattaaagacgcagatgtggataagatctaattagtctttcatattctggctgttaaacaaggtttagactctctaattcacgtgccagcaaaccttaaattgctatatttacatcactggaactttaaaatcaggacagagatttaactgattagcaaacaaacgtcacacctgcctttgaaaattacagttagtccttgtagaattcaaggacatgtccaatcaggtttacaaaacagtgatgataactggtttccagacaggaaatcagcctgatttccactttcttatctaggagacatgttctctcaatgttcaaatctgccctaattctgtagggtttttttttctttttatgcattatgtgaaaaggggaatttgacctctctaactcctggtttcttactctgtggaactgagatagccacacctatctccggaatgagacgctaatcaaatgatagatgtgaaagggcttaaagctcaattcaaatgtagctttcattaacaacttagtacttttacatgaaagcaaacaaatactttacaaggtatacaaagttatacttaagggtgtggatggcaatgtctcaaatgctcagtttggtttcacccttgtcacagcattattttaaagctcttggttctgcctgttaaagggaattttcctgacaatcttctgtttgtcaatcaaggtgtcacacccattcagttttacagaacaaagcttctaattgactgtcagtgagtcagtttcacaccctttcttactataggcaagaaagctaatttacagaaagcaagtttcccagataagctattgccgtctttctttctttccttatctttggcaatttctctggctcaggcattgaagacggaaatgcttgtctcttgtaagaggatcattttcagcaattcgtagcagaggatatgaaagtgtttagcacaggactgaggatactgaaaatatgattgagtcataaactgaccaactgtttacttttcttaacagtttaaaagaagctgaaaatgccaagcgagagggtgaaactagaattcgacgaaatgctgaaaaggtaaaatgactcaccaacgcaattttgttcttgtggccatatttattaacaaatgtatgcctaaacctttgagtaatgaaataaagtcattgtcttttattattatatagatatttttcttaatatcaaaattccccaaattgactattcctagaatattaatcattagattcagatttaaaacagcatttcctacctaaggcccaaaatgtgcagtttccacctgtgtttctccagtcctctagcccccaaaagaagatataagatagaaagtttgtataaaccaaattctgcttaatttctagcagccttctttttggtttagtgtaaacccattttactctgtataaattgtttaaaattggcaatgaaatataaattaaacaggaataattttaaaatagtgagagtgttttaaacactatatccactagtgcattttatgtgcaattaaattgacacaagttgaagttattcactttgccattgtgattattctgttcagaaaaacctgcatttataaaggtcttgattctgctttaaaaaaaaaaaaagacaaatttttagaatgtgttttaaaaaaatccttaaaattatttttttgaaattacttgataatttaattattcaatctagtataaaaagttttgaataagcactttaggtaatgcagcctggatttcttaaatcacctactttcaatgagagggatagcagtttctttgctaaatggctaaccttttgttgagaagtcagaacgcctgagttttagccttggttttgccatgctctgggtgtgggagactaagtaaataatcatcctgggccttaattttcttgtcagcaaagtaaagaggttggataatgacctgaattttaccttcctgttggactgtgattctacatcctgcacacttttgtactaatacaagtgcactcctttttgcagatcgtagggcttatgttttcctaaaggaagaaacaagcccaccttttggtagtcaagagctagcccttcagttcgtaatgcttatttaatgaagcaaagctctcaacctaaatagggtattgaaggtttacatttaggaaaactaagtattcagaaccatctacagtttatgcaacacttgccaaggattgaaaaggaattcttttgtggtggttgttaaatttcagtctaaaactttgggtcatcctgtgatagttaacattttattacttcataaacacagagagttattttcctttgtttttcattaggtctctgtacttccctcttcctctctgtggctagggtcattgttttggtggggtcaccgggcatgatggtgtgaataggactgctttattgtgatggctcaatatgttccctataattaacttgtcactaggttgcaaacacagtgtttcttcagaatctccttggctgaatcacaacttataaactgaaattatcattgtttcttttacgagaatcattgagcattaattttttataccatgctatgattatcaggtgactgtcttctgcttctctatttctaggttgttacaaccatgaggtttggagcacatccattgctcctccaaaaataaatatcttcttaataggaagcagttaggattctctgttaaagcatcccaatggaatttgaattattttttaaaaaaccaaagaatgctagatctagaaaaggtcctacagagcatctgttccaaaaacctcattgtagaagtagtaactgtggttccaaaggagaagggactttgctgtggtctcccatttgggtgagagggacaatctagtggcccaggtcatttgactcctagccatgctctttatgcccatgttttcttgcctgaaattgaatgacgaaggtcacacagttgaaaagaaagttatagaccaggattttttgtaggtcatattatagtactatatctcaccacaaaatgtttaatgacatagagatccccaagcctagagtagcttagagtatcatttttttggtaaagtttagccctcctcacatagtagagttttcaaaacacagaaagtagcctgaaagtattgaaccaaagcatcaggaaatctgaaaacaaatctttcttggattttttttggtggggggaagtcactcctttttagcttttctaaatgagtatcagtcttgatgatctatctgtctaaggtgagggtgaaaggaaattagatctactctctctctacaatgtcagaaattattatggataaagaaggcagaatacacaaaaattatccacagatccatagagaaaatcaactaaagtaagcataacactgttggataacatcttgtttctttatacttacaaacttagctggattattcttgacttgatccatattaagtcacttttagacatctcatcttctcacaacttttttttctttttttttttgtgatttggctgctgcattttgttgtgtttgtgctggaacctcatgaaagatatcccctgacccctattgatctgaaagttaaaaagaaatacctagttttaatccaagaaaactcttggtcagccttattttttccgaggctgttttttatcttttaataaacctaccacataacagatacaagtgccaagtagttgacaatataattactgtttcttagtaatcctcattaatatgttgtatgtatttgccaacttctagacctgatgttttgtggtaataaatctattataaagtttccagattaaaacgtagaaaaatggtaaataaaattacttgttggctggatgtgttggttcatgcctataatttcaacactttgggaggccaaggcaggaagattacttgagccaaggaattcaagaccagcccgggcaacatgatgagatccagtctctaccaaaaaggaaaaaatttagccgggtgtggtggtgcatgtctgtagtcccatttagttaggaagctgaggtggaaggatctctgagcctagaggttagaggcttcactgagctatgatcattcccctgcaatccaccctgcgcaatgcagcaaaatcctgtctcaaaaaataaaatatcctgaaatgaaatgaagtaaaataaatataattgtcttttcaaaggatttttgcaaggaatatgaaaaacaagtgagaaatggaaggcttttttgtacacgggagagtgatccagtccgtggccctgacggcaggatgcatggcaacaaatgtgccctgtgtgctgaaattttgtgagtatagaagtggttttttcagagtgattcaaagggtgggagtggagattgattggattgatgagtaaaaataactttgaaaggaagctttgttgttgagaaccatctgagcagttttatgccctccacaaatcataatgccacctagtgagcaggcactactgatgtttgtctatttctgaagagaaatggattccattttccagttgaaatattgacttacagcatagcacacttcttaacattcccctgtgactgtgacctatgtgaaactgtttgtgaactaattctagtatagaatgggggtaaaagcaggtaccacgacttcgattgtttttcttcagtaattatcccatggtaacagtgttgatgcaacactctcagatacttcaggtttatacattaattggattactcttatctttttatctgggacatatgaccttgggagaagggcaaatctcacaacatacaaattatcacatttatgaaaatgtcttagatgacatctcatgacactttcggcttctctagctctacaagccctttcctgtgtcctgtcctatgccagttcctcccggtcttggccagatgatgtcccctcctcttgtagattacatttcagattatctttccttggacaagaactcctaaagtccttccctaattgaaattaaattctcataatccttagtaattgtcttttctaaccaccatcacagttggcaattatacaattatttctccaagtttttgttgactttcagtcttttctaccagcctcaagaactacaagagggcagggtatgtgtttgtattatatactcctgcatgcccagggcccagccaacacttgcccaaaaaaccataattactcactaaatgaatgaatgaagatatgaatgaagatctcccactctcaagaagcttaagttcagtagcagaaataagccatggacatgtgcacatatttatatattgcaaaatagaataaaaactgctgtataagagaagactattcgatacaaaaacacagcaatagacatagcgctcatttgtatttgggaactggaatgtcttcttcaaaaaggtagaatttaagctgcagagttttaaatttcttttaagaaagggagatgagaaaaaagatcattttagtggaagtaaatggtataaaggtgaaattaaagggtctttttggggatttgaggtgtttttaaagtgtttgtactaaaactcaggacaacttagatatttttccatctatacctaatgactgttttgtaacatgaagatcggaagcatctctactcatttattttactttttccagcaagcagcgtttttcagaggaaaacagtaaaacagatcaaaatttgggaaaagctgaagaaaaaactaaagttaaaagagaaattgtggtgagaatcagtttgatcaatctagttacaacttgtgtgtgtgtgggggggtgcgtgtgtgagagagtgcatattacatagtatgcactttcaatattgtttaatattttccacactactagtaggtttgctggaaactaatttctagttattattttgtgaaacttagattaaaaaattatggcattacaatttctagctgtatatggaggcaattaatcaagtcacattaataatgtagttttgcactcctaaatgaaggtgaaatatcaaaacattgtctgaattcaaagtgtgatatgtagtcttcgatgtgtggtagctattgtgaaggtatttacttcaaaaacaatatcaatgttgaattttaatgtgcttccttttaaattatactgttctctgctttctaagtatcttttaactagtcacctgtctgtttttctactgctaccctcttagctcagacacttaatagttttcttttgcattgacgtattggcattgtacctggtttgtacactgttggtctccatctttctcaatcttcaagatttaattcatcctccatgttgttttcatatgtcatagaatatgagaacaaaaactatggttccacgagtcagcgatgctataaaattccaatgtttgaagatattctagagtatattcagaccatttcacttcttatagaaaccctaacttatttcttacagacagttttccagacttctatgatgtgcagtcaacagttctcctaagtaagccactccatcaggccaccctctgccagtataactccattttctttctttctttctttttttctttttctttttcttttcttttctttttttttttaagacaatttctttctttcttttttttctctgtcacccaggctggagtgtagtggtgggatcatggctcactgcagccttgacttcccactctcaagctatcctcacacctcagctttccaaagtgctaagattacaggcatgagccactacacatagcttaagcctcattttgaactgctttcttcccctcagtcctaggttaccaagtccttttaattttgatattcaaatatctgtcaactactattttatcatttatttccaatttttctccttccttccctttcttcctttcctttctcctttttctttttcttctctctattcttttttctcttttcctccctctctttctctcttttttaataatataattactgttctaacttcagtccctagttaatcaaatcctccacacatctggttgataacctttgtaaaacaaagatttgattttgccattttctgctataaacatttataattttcccattgcctaaaagtaatatccaaattcctttcaaagtttagtggtctttgattttcaaggtctccttttgaccatttcccaaatattattctctttatccaactaattatttagccactatattcataaatatgttagattacctcaaaatagcatgttctttcacacccctgtgtgtttgtccatttaattcctcttggatggcctttttccacattatgttcctgaatatattctcaagatagaacttagacataagttccctgaacttccatgaattattcttttcattgtacttgtacacacttaattcagactagtgttatatttcttagctttttatattgcaattacttatcttttccatttgactgataaagaacataaatataaataaatcatatttctatttatatattcctaacttaagcattcgttgaaaatgtaaatggatattacaaggagagaaatatcacaatttttggatggtcctaaatcttaaaagttttatttttcatccttaatttctcttttttctttgtaaaataacatttaacattcatacatagaaaacagaactatatctcaactttttcttattcattattcagaaactctgcagtcaatatcaaaatcaggcaaagaatggaatacttttctgtaccagagaaaatgaccctattcgtggtccagatgggaaaatgcatggcaacttgtgttccatgtgtcaagcctacttgtgagtatagagttttagaatgtcaaagaaagaagggatcttgcaggtaatttaatagaaacagcttctttcatagatggggagactgtggctcaagacagggaagtgagttgaaaacattacatggaaaatatcagtgatagagctgggagtaagtacctagagttatttgttttaagacgccttgttcctctgacactccctcttttagcactggaatgtcctgacaaacatgaacttgtacaaatagtagatgcccccttactcctgaaacttcacacgttagcctgttttagcaatttataggtatctcatcttccatgggagttaagagtccaaaggtgatgcttaatgtagaaatggaataaagtcaaaattcccatgaaacaacactaaactcctataaaattacaatgggtattattttatgtaatgcaatatttctcaataagttagaatggacagttttctttcaagatttacgatagctctttatttggctgagctcaaattaagtatttaacttatatttagaatctatggctttctttgttttgattgacaactacatatggttgaaatatcatcagttaactgtacatactgtgcaattccattgtacaaagcaaatttaggcttatttgttttatcagtatatggaaattattgtggttttttttttcacatcttgtcctttagatgaaacagctatgagtaagcaaaatatttaagtttaaagcaaagctagggtacacatggtgtgatagatagaccatggtcttgagggaggagaccttggttgtagtcatatcctgagatgtagcaaagaccccctctacctctcatcttctctgattaacaaggggatgagtagatgtgctttgttaaggccactttcagccttcaggttatgccaccatgattttagttttggtgcctctgttatgaacattgatcatgctccttttcttactatgggcaagaaaactaatttacagaaagcaagtatcccagatccactattgccgtctttctttcaacattaaacagacattatgaagaaatcatagcaccatactatcctggaggatattttgttgcttctcattgatatgcagtgataaagggacaaaattgttccactctaaggagggagaacagttaacagtgcaaggatgtggagaaatcatggcatgtgtttgttcctaatggatctgcttctttttccctcttattcagccaagcagaaaatgaagaaaagaaaaaggctgaagcacgagctagaaacaaaagagaatctggaaaagcaacctcatatgcagtgagtggaatccatccaataaatcctatttggtgctataatttgaacaaattttaagagcctaaagggtgagattttgccctgcagaaatccccagaatatcttaactcttcaatctggggatggtattgagatgaattatatgggaagattgatccattcttgctgattaaaaactaactctgcaaaaaaaaaaaaaaaaaattgtttaaaagctgaaaaactgagttctacttctagttttatcacttatagactgttagcttttgctaactactttccagagaaattctacatgtatgctttctacatatgagtttctgatatttcacatctaatttgagataaaaaataccttgattcccccaccaacgcatgatttttatccctgaaatattacaatattagtttccaaagccttagctcagttatcatcaccaatggttttgatgataaaagtctcctaattttcactctggattttatcctttcccttgcccaaccagtctccctaacatagttggagtaatgtttcaaaatgtaaataagatcataatattgctcttaaaacccacaagcagctcatcatcatatacaggatatgctttaatcctgttatctctcctcttatttgtatccttatctccattcagaaaatcatgctctgctatgtgccatgtcttttcctacctgtgtttttcagctagttttattttcataaacctgtgtgcgtatttcccaattcacttttttttgcccagtcaaatcctatttacacttccacagtctcacctaaattgttcttgctccctgacaccttccctggtttcctttgagttctcagattttattgtaccctgtatgttcgtacctattttattctgtttagattatagtggaatttgcttatatattgcttgtattatatggggacattgtgctatgttttattttttcctatctcttggcatatgatgtttttcttgttgtcaaattgaattttacatttgagaaaaacacaattaaaatcctcagctcaaagagatgtaacattagtttctgccaatgtagatgtttgaaccttctgctttaagtagaaatgaaatatatggccaacttacttcttctatctcggcaggagctttgcagtgaatatcgaaagcttgtgaggaacggaaaacttgcttgcaccagagagaacgatcctatccagggcccagatgggaaagtgcatggcaacacctgctccatgtgtgaggtcttcttgtgagtagccctgcagctgggaacatggaggaatgattttgttctttctatttcatttccatgttcaattatgggagggccacttcaacataaaaatgaaagaattaaggcatatttagagaaactgtctgattggagacatgtatttgaaaatccatgtcctttgaagattgtcaagacttcacacttaagcaaggagaaagtcataatcttgaaatattcaagtagttttgtcttttaagtgtggaaacaggacaagttctagcttatctccgtgaataaaagtgaggccagtgggccaaagaatgaaaggtctggaagacaggttccaagtggatgccaggaagaacttcctaacagtttgcggatttcaaagatggatgatttaccatggaattccaaggatgatatcagtacagactttacaggcagattaaagcaaaggcttgggagtcattagagatacagtaatgagcattggaaatttagaaaaccacctctggactagggtttaaatcccaagtctgtacttattatttctatatcttcaggtgagttatgcattccgtctgtcagtttatttgtatgttggggttataataatagttttgtaatgcaattgtgaggatttcacagtgtaagcacagggttaggcacatcacattcaaagaatttaatcgttgttaagtgtaaaattaaattatatttgagatcacttctaatgtggcgattctatgatttttacttatctcttcttaaccatccttttttagccaagcagaagaagaagaaaagaaaaagaaggaaggtaaatcaagaaacaaaagacaatctaagagtacagcttcctttgaggtgagtttatatcctccagcaactcagagggatatggccctgaggatccacagatcatgttcagggaacacgtgcattccttaaaactgtatgaaacaattgtacagtttgtgttttcatatgtgttttcatgtgtgcagttatacatgtgcatatgtgactatttcttggttgttgggttcattgtttttatcacttaaaaaatccatgccttcaaagttaatcattctaaaataagccaattgctaatcctcgtttaagaaaaaaagtacaagctttagctatttttgcaatctgattcagcctatgttcaacactttcaacttcctgcctcaatttcacaggagttgtgtagtgaataccgcaaatccaggaaaaacggacggcttttttgcaccagagagaatgaccccatccagggcccagatggaaaaatgcatggcaacacctgctccatgtgtgaggccttcttgtgagtagagcagtagccccatagcgtctgaggattgagcagtgggaatttccatgggaagttttcaaaccattgtgaataatgcattttcttcttcagtgtagcattcagtcttgggtgtcatatttaaatggactaaaaacaaacaacagcaacaataaaacaagtggagggctttctattatgatataaagagatgcagaataagccagacacagaaaaacatataatgtgtgatgtctcttatatgtgggatctaaaaaaagctaactcatagtagagagtaggatggtgcttacaagagaatgggagtagggaagggtgagggttgggaatgaggaaatgttaatcaaagggtgcaaagttttagttaagcaggaggaataagtttatgggatgtattggacagcatggtgactacagttaataataatgtatcatatatttcaaaaacattaaaaaagtaaatcgtaaatgtccttacaccttcccaaaaaagataagtatcatgagacaactatgtaaattgcttgatttaatcatcacaatgtatacatataccaaacatcacactgaattcaattaatatgtacaattattatatgtcaagtaagaacacaatttaaaaaagtgaggtgcagaataatttcttctatgacatttaaaaagtaacctagaatcattcacccagagaagagaatacttcatgataattatactaattgcttttagttttatgaaaacattatcagatgaaataggaaatacatatgattacacataaaatattacaatgcatggaaaatttatgggatttttttgttcactatctttcttcctacttattctatgtgattttaaggaatataattaaaatggaaaagagctataggaagaaagatttgggctcatgatgaagattaactttgtaataaagcagaaaaagacaagaatggagattttattatgtaggagttgggagcctattgatagggtgcctaaaataggtctttaggatgaatgtcatggtatggccggcccttcaaaaacgtgactaggcttttcttaaactcttgatttttgactaaaaaaacccccattttatttcccatgtgccaagaatcttagaaaggacttaatttatttagtcttcccatatagaaagcaatataatccagcatattttcccatagcatttgaggcttggagcactaaaaatctattagaaggaaagttgagatcatgaccatataattatcacaacaaacgtttgttgaacgcatataattatgtgacacttgctcagagatttgttgcctaatctcatttcatcttcacaacaaccatatgaaatagatgaaaccagataaaaagcaagaacaaaaaacaaaactaaggcccagaacagttgagaatgacggaaaagtcaggacaggatatgggacttacagatgaaggaaaagttaatgtatttcttgttgtggggtataatcacttagtgaagtctttcagcctgttttttgttctcccttacattaatttttcagtagcaagaaactaattctgccacttagtggtcatctttgctgcctcctctgacaattttccattggggaaagaaaatgctgcttaaatgttttagtcaacttagactcgtgataaaggttagatcggttttcatataaagatgtatgaacaatcccataattttagatctattttagtcagtttatttcataagtatataaattctttattgaaaagaaataacctttatcacctcatgttttatagatatgttaacaaaggtgattgattttttttgagaattattctaccctccatagttagtttttgcacactttcataccatgtgaaaacagtcttttcaatttttaaaaaagttttagtttgatctatgtgcaagtattttgttgattgggacacattaaaacattttcacaaattatgtaatttttttctacattttgaactatttgtgttatatatccaattatgctgtagatccaatccaccaagctcaatttgcaacactgttagttatccaaaatgtaacagctatcactttcacttcatttccatcatatgcctagttttggaaggaaagtttcctttcaataatgacaataatgattatgtcaatctcttataacaattatatcaattattttattttgtaccaggtactgttctaattgctttacatgtagcaactcatttaatgctcttaacattccaataagaaaggtacttttattacctcttctattcctcctaaacacacacttaaagatgaggaaggcacagagaggttaaggtacttcttgtcttccttgcagaatttggctccagagtctttcctcttaaccaccatgctatactgcctctcagaagataaatattacctctccataaagagtaatcacacatgcaaaagaatcagcaaataagaaagtactattgcagtacatatactgggaagttaaacaggtttactccctaattcaggggctttctcttgcacaccattctcttgaggtagagtgaatcataattgtttattgtctaataaaagtataaactactatgggtggatatttggcagtgtttgagaatagtcaaaacaataaatgatcaagctatgaaagttaaggatctagtctactatattaagatccatttctggccaggcacggtggctcacacctgtaatcccagcacttttggaggctgaagcgggtggatcatgaggtcaggagttcgagaccagcctggccagcatggtgaaaccccgtctctactaaaaatacagaaaacttagccgagtgtggtggcatgtgcctgtaatcctagctacttgggaggctgaggcaggagaattgcttgaacccgggaggtggaggttgcagtgagccgagatcgcgccactgcactccagcctgggtgacagagagagactccgtctcaaaaaagaaaaaaaaaaatccatttcttctctctttttcttttcggtttcttaaagtcaacaagaagaaagagcaagagcaaaggctaaaagagaagctgcaaaggtaatattctcaggaatgctgatgctgtgccctgacatttttcatttctttataattctttacttatcctattagaataaatgttttctgtttaattttcatgcctgaaataaatgaagaacatttttaacctgaacaaaaagggtcctgataagaagtgtccagagtaccaattttatttcacaattattcaaattttgaggtttatttcataaaaagtggaatgttaactttttgtaaggaattttccccatatttggcttttattagatttctgttgttagagtattaacttatgccatttactaatttcaatttacattattcatatctctgttatttcaaatagagagtataagatctcaatcattccaatttacaaaacgaaagcacatatattatcatatttgagctttgtcaccacccagctatggagcaagtggtggttttcttgcacccaattaagattattaagttgggcctctgactttccagttatttttattccactctccatgcttttataattttatacatagcagagtcaaatttatctgtgtggagatgttgaattattctcatataatagctacatacaagatttatctttctttctttttttctgttttttttgagatggagtctcgctctgttgcccaggctagagtgcagtggcgcagatctgggctcactgtaacctctgccgcccgggttcaagtgattctcctgcctcagcctctctaatagctgggattacaggcacgtgccacaatgcccagctaattttttttttttttttttttagtagaaatggggtttcaccatgttgaccaggctggtctcaaactcctgacctcaagtgattcactcaccttggcctcccaaagtcctgggattacaggtgtgagccactgcacccggcctgtttattctatttcttaacaatagccacaacagtacaaacctcatcattacttggggaaaagttgacacagtttaaaatttgccttcttactgactcttttttttttaaataagtgtttctactaggtgaaactatcttttcattgatcatttagaattgaaaatgtgttttcatccattatgtttgatcagctgccaaatcctcttagatatttccagtggtattaacatattcctccttctctccactcctattcttaccctcttgcttcaaatccacatctcccattcctggtttttaatttttttaaatcaatttactcccagaaatatgttagtttctccagggatcagacttattctcttctctatgtataaagatatgtctttttaaatttatttatttatttatttttgagtcaggtcttactttgttgcccaggctgtagtgtagtggtgcgatcaaagctcactacaacttcgaactcctgggctcaagtgatcctcccacctaagcctcccaagtagctgggactacaggcacacaccaccatgcctggcaatttattttatttttttattttgaatttttctgtagacacagagttttgctattgtgtccaggcttgtcttgaactcctgggctcaagcactcttgcagtggcctcctaaagtgttggaattacaggtgtgagccaccatacttggacaaaatatatatttatttcttaggttaagcatgttttttctcttctttctcagacccctaaagacaaatcacaggtaagcaatattctcatttcctccaggaaggcttctcatctaagcctgcctatggaatcttcccacctctgatctttcctagcttttacagaccatgctatgcaacacaacacacacgtatgtttttgatgataaatattttcagatctgctataatgatgggacaattctgattgatgacggaagctttgtaaatacttactgatttactactatgtgttatcacttttgtttttactttttactctacgttacatattcctcataataggaaaagatgcaggaaggatagaaaactactctgagaaaatattttcttcatttcccaggaaatctgcagtgaatttcgggaccaagtgaggaatggaacacttatatgcaccagggagcataatcctgtccgtggcccagatggcaaaatgcatggaaacaagtgtgccatgtgtgccagtgtgttgtgagtgtccaccccatctctcccactgaatttcttcatccatgatcgcccctgagtctcagatccttcatgcatgtgtagagtatagaccgtgagttatatattagaaaggtttacaagcagatggataagacattaagtaatattgaatcatatagtgacaatactattatttattcaattatccttctattttccaattaagtcaagggaaaaagctcaatttaatggtttttttttaacacttgataatcttcatttgtgaaaaagagagagcagaaatttcatgatttggattggatgatctttttgatgtctttcccactcctgacattttatgatttgttagtctattcagataggagctaaggagaagccagctggatggaggtctgtggggtcagtacataaagactattaaaatagcctgaacaataaatggaataggaaggattgttatttatcctttcaaggacattactatataatgcaaacattcataagtggtttagtgtggagtaaaacctttaggaaacaggctcataccctaaatgtttactaaaatgtctccttgttaagccaggttcatggccttctaaggtctttgttttgctgagtggtgtaggtaagcctgtgactacagctccatcgtgtgggacaatatagaggttaattattatcacttctaattctcctttttaggctcttaatctgctcctgaacttaaccctaaaataaatgccgagaaaaacgcttatttaaataatacctgctgaggtgcaaagttaatgtctcctaactttcacatgtcttgatccaaccttaagtggatgcatacaattccctaaaaggagaggttgacagagtagagcactagaagaaaagtggcctgaaattcaagaagccagggtttttctctcacccgttcaatttgctggtgttgtggtaatgactaaatgtagtaaatgctaaggattttccagcattaacatgctatatgtcagtagaaaatggcaagaataccagaatattaggcttgtgttcaacccccaaagattagcagttgaatctaactggacttaaatcactactgcaatctaaaccttgaatttcaacttcaatattagctccattgaaataatatttaaaatttttagtttaaagtaaaacatggtttattatgattttgagcccatcatctgacttagcatcaccctttgcctttatcacggatatggtagttacttggagaggaaaggtttaagcagtgaaataaaatcaagacaattgtagctttattcggaatgttaattaaaattagcgacgtacaaaaaataagatcacctgagggccacagactgataaagatgcatgcttgttttgtaattattcttctttagagggggaatgtaaacagctaagtttatctgtactattggttaaagcaaaagcacctctcagactagataaatttgtattgaagactgaatctgactgttggtttggaagatcctcattccttttaaaaatgtactaccaaaaagagtagggaatcatattcagcctatatcttctttttctattacagcaaacttgaagaagaagagaagaaaaatgataaagaagaaaaagggaaagtcgaggctgaaaaagttaagagagaagcagttcaggtagttgtttgagatcatcagagccacataaatattcaacgatcactctccctagggagggctcctattccctcctcctcattccagtattcttagtttctttgcaaactgggaaaatgtgtttggatccccatatacaagagtactcccctttccttattcaatttattcacattaaatctattaattgctcgtgcaggagagagatcaatcaccattttctcccctgattgtgtcaattatattacctaagaaagaagtatatatagattgttatcttactgtctgaatgcagactaatagagacagatgttcagatttttctcaagtacatttttgaatatgaatatttaccttaaaaacagcaacaactagggatcccacttaattatctgtgagattttgaggagataaaagcatctctgagtcttgagtttgcattctttaacatctcacatgatggtgataacaatgataattgtacattcgttgctactgtatgcatcatggcataaagttttatgactgatatttgtagtagccattgaagggacatattattatctgtgttttatagaagaggacttggaagctgacataagaagttaagaaatatatttaattagttacatataatacaattatatactgatatattatttactatatattaacataaatattatatgatacaaataatatcatatataattataattatatgtagttagtaacttgagaaccaagaattgaaccaaaagttctggctttaaggcccatgatgcactttagattttacacgcttctgccatttgtattattcctgcagactatgccttaggtcctcattattcttttcttttgtccttctgtgatttagaagagctcatttctactgctcttacctttgctctctacaatctactctcaactcttaagccaaagtaattatttaaaaccataaggcaggtcgtgctacccagtggcttctcacctcactcaaagtaaaaatcaaggtccttgtagtgtctggaagtgccatacatggtctgatccctgccacttttcataggtcacatttcctattattctacattgttctccatgcaccaattatactggccaccttttggtttctgggacatcccaagcattgattcatggctttctatcacgtggtcacaaaaacaatgtggttaaaaaactggactctaggctcagactgtcagggttcaaatccttgcttcatttccctaccagtaaggtcctacagttaacatcttcatatattagctttctcacttataagataaggacattattattacgtatattatttttatgaagtcccaagaaacttattaatgtataacagcacagtgtcacacatatcttaagtagtcactctttaatattatatttattgctgttaatgtcattattggtctaatctcattgtccagtggggtgttccatactggagagttcaccaattcttcaacatacaatgaactttaccttctatatgccattactcacagtcagaatatccctcttgtctaccaaaattctggccacttttcatggctcagactgtgtgttaactgctccctaaatattttcccatgtgtgcaatatacttaataactctatcacttgttatgccaacaatttaaaaagtattttagttatattattcattgtattataacttatagttgcctctatgtgttttcttcaaagaaattaaaaactctgtgctagttttctatggttgcgataacaaattagcacactttagtggcttaaaacaacataaacttctcattgttcaactcccacttatgagaacacatggacacagggaggggaacatcacacaccggggcctgtttggggactgggggaaaggggagggagagcatgcaaatatctaatattagccccctcatgcaaatatctaatgcatgcaaatatctaatattattagccccctcatgcaaatatctaatgcatgagggggctaaaaacctaggtgacgggttgataggtgcagcaaaccaccatggcacatgtatacctatgtaacaaacctgcatgctctgaacatgtatcccagaacttaaagtaaaataaaacaaaataaaataaaataaaaaacaatgaaaacaacaacaataacataaacttcttatcttatttcataggttagaaggctaaaaaggatctcactgggctaaaatcaaagggttggcagagctgtattccttttctggagtttgcaggcgacaatccatctctttttctccaaatctagaggccgtccatgttccttggttcttggaccccccttctctgtctacaaagccagcaatgttatatctctctgactgttcttctgtggttacatctccctctcactctgtcttccatctcgctcttgcagttttaaggactgatccttgtgattgagccttacactgagcccattatggcaatacaggataatctcttcatttcaaggttattaacttaattatatctgaaaagccctttttgccatgtaaggcagcatattctcaggtctcaagtattaagacttagacgtatttggtggaacggtattattctgtataccacagattcctttaccaatttaagaggccatacatttttcttctctgtatctttcacagtgcctagtgcagaataatatttgacctgaaggttttctaatgagataaataacagcaatccatgttccaaatgtgtgacctagttctctgaaaagcattttggttactatcaaccttcagcatcaccttttccatgcaatcattatgttttagtttttaaagcagtattgtggaggaagatttctagtgtttagttattggactcttaaaacctgcttctgcttcatttggcaggagctgtgcagtgaatatcgtcattatgtgaggaatggacgactcccctgtaccagagagaatgatcctattgagggtctagatgggaaaatccacggcaacacctgctccatgtgtgaagccttcttgtgagtgggcggcagccactgctgctactgagtgtgggagaagatcagcatcgggtgggcaagaggggtgacattggaagttttctccaggagatagataataaaggctgtctttgcactgagtttggaaatttactattataaagccatatattcagcccatttatttctggtgttcttcaatagtctgagaggtacttgaatcaccatcaagaaaggaccatgtgctaagagcaaaattacactggagttaatggcataaaaggattaggacttctgttctctgcaagcataggtcactgtcaaataatccaaaggtgtaatcattaggtgctaataaattgaaaatgagttaacatctaattgatatcttagtttatttctggggagaagaacaatatctttatttttcaaaagagatatagtcataaaagtttcttcactggtttgctatggcatgtgcgtcttattctttaaacaaccttaagaacaagaacggctgggtgtggtggctcatgcctgtaattctagcactttgggaggccgaggcgggcagatgacgaggtcaagagatcaagaccaccctggccaacatggtgaaaccccacctttactaaaaatataaaaattaactgggcatggtggtgcacgcatgtagtcccagctacttgggaggctgaggcaggagaattgcttgaacccaggagaaggaggtttcagtgagccaagatcgcgccactgcactccagcctggcaacagagtgagactccatctcaaaaaaaaaccaaaaaacaaacaaacaaaaggacaagaacaatgatgtagagagatgtgtgtttacctttccactccaaagctaagttggtggaggtatagaagtaatggaccatttttatgtagagacatttctcctttagggtagtatgtattgggtgctaggaatgattgttttgtcctcccttttcttatagccagcaagaagcaaaagaaaaagaaagagctgaacccagagcaaaagtcaaaagagaagctgaaaaggtagtaatcctgaatgtttatactgcaatgaaaggatgagattttgcagtatctctgtaaaaataactatggaattactgaaaccccagttgtgagggaactaggggttcatttagtccaggggttgagaaactttttcttaacagaacagatagcagatatttctgtttttgtggccatagaatctctgtcacaactactccacttggctgttgtgactgtaaaacagccctagactgtatacaaacatatgggcatggctgactccaatacaattttatttataaaaacaaacggctggccagatgttgctcacaggtcacagtttgcaaacccctgatttattctgttcccatatattaatattaagatttaaaattcagagaaaaagaagaacttgcatgtaaagttaatgggagtatgagtatcagtaccaatagcttcatatttcaaagttctggaacaatagaattcaatcctagacttcctgataccacagccagccttctttctagtacactatttgtttttggattaccacatttggtcaacacatgtgttccttgctttacctgtggttatattttggtgccagcatttaggaaaaagattaaaaagtagcatccccaaataatattttcttggattcaaaaaggctggctccaagtagtttattccaagttgtggtcatttccctgcccccatcaaagactattgagattaaaaataacctctaaagaagtatcgccctggaactctgtatgtttggcttgtttacagttgtattgcacagttgtaataattctaaatttaaaaataatagcagttcatatgaaaaatagattcactcttcaacatctacaagagaaaattcttcagtatgagctaatttctgatttcacattactactacagacaaactctcctctcattattttttcttttgctaaatataactagttaggggatctggcaatgaacctttaagcagagctaggagaaaaattccctctttcatcctcattgaatttcaacttgaactaaagaattcagaataaaatacaaaatcaattgtaattgccatttgtaattaactctttgaacttcagtgattgcttattctgtctcaatttctcacgtaaccctaaacaaggagtgtgcccagtcatcagagaactaagtttattgagagtcttgtgtatggttgcaggtttagtctggattttggggctatcaaggaaaaagaaatacagccaccttcttaagtcctttgtgtttaatataaattgaacactataactgccagaaaaaaaattctcaggtcattttctctctcttttttttttttctataaagcacttagtaggaacccagtaaactaatttcccagaagatactcaagctttctccttttcttttccttttaggagacatgcgatgaatttcggagacttttgcaaaatggaaaacttttctgcacaagagaaaatgatcctgtgcgtggcccagatggcaagacccatggcaacaagtgtgccatgtgtaaggcagtcttgtgagtgcacaaagaaaaccactactgtgggatggtggaattggggaagcaatgagccaggcaaataatatgtattgtgtttgtcctttccttacatgtaatagaaacagaaggttatctgtaaagcatttgaaataaatcttttctttataatggccaagattcacagttctagaaataaaataaatacaactaagctattacattctctgttagttctggggtagaccctgccagtagatcacacttccttgataaaattcttaagttatttgctatcaagtggatcctttctctggattatctcgcaactcatgttggaaagaaaacacacagattttaatgtcaaagtccttacctacattgttgaaaataacacattttcagaaaatgaaaagtaggtctttacacaaagtttggaagtacacctagaatatttaagtccttcaatagcatttaccaaacatctacaatgtacaatgtgtataatgtgtataatgattatacaaaggtgaatgaaatagataatcttctcagaaatcatatagtccactgatattagtcacagacgtaaggtaatataatacaaaggagggactgttgaatgaaaaatttgtctgtggtatgttacagtacttcaagaaagggataattaatagaaagttttatggtgggataaaactagaccttataatttggataaaatgtggacatgacagaaagtaatgagaggagaagaagggaacagcaagagtaaggatctaaaattaggaaaaaaacaagtcatttagtttagtcagaacttaccaactttatcaaccttgaatgcacaccagagatttcgaggtcaattctacatgtaatgggaagctgcaaaagttgttcagataggacagtaagtggcataaatattgttcctttaggaagattcatttgttagcagtaaacaggagaaaaagagaaagaaagtactaaacttaagaattgctactcatgtagagggaggagctgcaataaataacccaggaagaggcagctacgcagagcaaggaggtaggctagaaggcgagtggatcaaggtgggggatgctgtgaaggtgaagtcaatgtcatgtggtgacagctatgcaagctgaaggacagtaagcaattagagatgattccactgttttgtgtttgtttttttgtgaaaggtagaaaatccaggagaaagaatacatttggtagagaagataatgattttggggcctcttgaacattaggtattggcgataaacacagctggagatccccagtgaacatttatgaagtgttagttaattgctcaccttgtcttttttttttttttttcttatggagtcccactctgtcgtccacactgaagtgcagtggtgtgatctcagctcactgtaacttctgcctcctgggttcaagtgattctcctgccccagcctccctagtagctggggttacaggcatgtaccaccacgcctggctaattcttgtatttttagtagagacagtgttttgccatgttggccagactggtctcgaactcctgacctcagggatccactcacctcagccttccaaagtgctgagattacaggtgcaaaccaacacacccagctttactcaccttgtcttgtttatggtgatatatatgtggtgttcttttattttaatgagacccttcctggcaaaggactccatataatttatatttttatttttagagaaggcctgcagcatagtagatgttaactcaatgctcgataattctgtacatatgtgatttgttcatataatgagaaactcaaagaaatgcacaccactctctgtaatctattgttccctacctcccactttctaatttccagccagaaagaaaatgaggaaagaaagaggaaagaagaggaagatcagagaaatgctgcaggacatggttccagtggtggtggaggaggaaacactcaggtgagagcaacctctaatttcagtaactggggcgggctcaactccttgacaataggactgtgaatagcgtatatagtctatggtaaaggcagtgctaagtccttgagagaacagagaagtttctccttaaggttgcagggtaagatatcagcacattttcactgctctggggttcatttggatttctttacaccttgaaataattaacaatatgtaatgaccttatcccagtctcctgagccctctttatggtaatctagacctcatatcaataatcgttctcatcagtatcacatgctcttcattttctttcattattctttcttgccttggacagagccactttttttaggtgtcttttctgttgatccaaggcagcatgataggacaaaagagcacaggctttggagtcagattgggttatgattctgctcctactacctggacttgtgagacattgagtaaattacttcctctcactgaattctactttccctgatttagcagtactcttccagggataaaagaaaataatttaggcaaaggtttagcatgtttcttgaggcatttttaagtgtcagcatggcaatgttgcacataaggtcactccttgggtctctgaacacagtttcataaaattgcagtcgccttatttatctttttacaaccttggaatatcaaaaccatgtcttcacttccagatctgacaaaggcccaatatttacctttgataaactctggctattctgtttttttcccatcttttttgctttaggaggctgagttctcccttttaaggaatagccctgttgattagaattgtctgatagacattttgtgtgtcttgttcataacttggtcaaacctaccttccttgacattttgcataactttgggttttcctccagcatttttctctctcttctatctgcactagagacctgcacatttttttctgtataaggccagctaaatattttaagcaatgtgggctttgtgggtcatatgatgtctgctgcaactattttactctgccattgttgtgggaaagaagcaaaaaaataatatctgaataaatgagtgaggatgtgtttcagtaaaactttatgtgtaagaacaggaagcaggaaagatcttccctgtgggctatacaattgaaccttgaacaacatgggtttgaatttcccaggtccacttgtacttaattttttttcaaccaaacttagataaaaaatacaggatttgtgggatgtgaaacctgcatatatggagggctaactttttgtataggtgagttgtacagggccaactgacagacttcagtatacatggattttgatcctggaaccaatcccccaagtgtaccaaggggaaactgtagtttgctgacatttaatatatgctattaaattcagtcatatttataatttccttgtgtagatccttaaaagcaacattagtagccatgacaactcatctcttataattacaacatgggtgattctggtccccttttctctgcagatgccagacctagatgttaggggtttttttgtttgtttgtttgtttgagatggagtctcaccctgtcacccaggctggagtgcaatggagcaatcttggctcaccgcaacttctgcctcctgggttcaaacgattctcctgcctcagcctcccaagtagctgggattacaggcacccgccaccatgcccagctaatttttgtatttttagtagagacagtgtttcaccatgctgtccaggctggtcttgaactcctgacctcatgatccacccatcttggcctcccaaagtgctgggattacaggcatgagccaccgtacccggcaatgttatgtttcttataaagagaggtgaaagaacttctcttactcagactgttaaaacaatttactaagaatacagtagactaagtaatccaggggctcttcgttcttctctgttttcaggacgaatgtgctgagtatcgggaacaaatgaaaaatggaagactcagctgtactcgggagagtgatcctgtacgtgatgctgatggcaaatcgtacaacaatcagtgtaccatgtgtaaagcaaaattgtaagtatttctctcaacaggcatgtctaaaatatagtcacattcctcttgaatgaatggctatttctcatttgctatggctccttccatgcaaattattctttttgctaatttccaaatattctatttttttctcttgcgttctctaaggaacaatgagccttagcaagggcagctaaccaagtggctgatttctattgtattttctattacaattctgtgaactctaagtgctatcatgatagacccttgttctttattgtgccagaatcctaggaagactttgtcacggccatttggaatcattgaccagcacagttgaagaaagctgacttcttgtcatttgcacgggacacacttagtgcataatccagggtcaatatttgttaacaagatgaatattcacttttttctcctccagggaaagagaagcagagagaaaaaatgagtattctcgctccagatcaaatgggactggatcagaatcagggaaggtgagttattttttgggttttggcaagaatcgtctttctgtgagtcagcagttggcgatcaaaactatagaagaaggtgtcaacatgatcaagctagagcttgcccttagaaggtcaggagttaccaagttatcagtgactctcactgataacttgttcagtgaagaaacctaatgccaagtggacatctttaagtctgacactttacaaggcatttttataaattacagtttatttaattatttcaacagcctggtcaaatttggccttttaaccttatttcgtagatagggaaaatgaggttttgcaagtatactgggatttatttttgtttttgcattattttgctgctagtgtaagttactataagcagatgcgtaaaataacacacatttattatcttatatttctggattccataagttttaaatggtctgattgtgataaaaccaagatgttggtaatgccgcattcctttgtggaggctctaggtgaggatctgtttctttgctttctctaacttctagaagctacctgtattccttggcttgtggccacccttaagccagtgatggccagtcaagtccttcttatgctttatcattctcacactgactgtcctgccgctgcctctctctttaatgagtaagaacctttgtgattacatgggccccacttggataatccagggtaacttccccattttaaattcaactgattagcaatcttaattccatattcaaccataattcctccttgccacgtaaagcaacatatttggaggttccaggaattagaacatagacgtctctctctgtgggacattattttgcctatcacagcaaggttacatggctgcctgactcttggaaagaaatcctctgattctcaaatccaatcaaatattatgtaaaaacagcacttccaatataatcttcccatcttttcaggatacatgtgatgagtttagaagccaaatgaaaaatggaaaactcatctgcactcgagaaagtgaccctgtccggggtccagatggcaagacacatggcaataagtgtactatgtgtaaggaaaaactgtgagtatgtttcaaaatgagcttttgactgtgagtcttaaagtacaataatcatttcttaccagtttgggaaaatgacaattgttttagaagcagatctggtaattaatgaggcgtttgttcactttgattgaaatgtttcattgttttccccccagggaaagggaagcagctgaaaaaaaaaagaaagaggatgaagacaggagcaatacaggagaaaggagcaatacaggagaaaggagcaatgacaaagaggtaatagatgttagacacgctaatacctgaattcagttagttcattgtatggtatatttattcaacaaatatttgtgaaatgctgactctgtcccaatcattggtgatataacggtaaacaatgaagtcatggccagatcttgaaaataaatagcatgctcttcagttccccaggagtgactctgatgcaattgtagaaccagtgacaactgtcaaattattgtagttagccagtgaatttcatttttgaattttttctttcctttgagacagggtcttgctgttgctcaggatggtctcgaactcctgagctcaagcaatttgccggagctcaagtctcagcctcccaaagtgctgggattacatgagccatcgcactctgctgtttctgaattttttaaacaaataaatatcaagcaatcagatgccaaaaattacaaagaaaatcagtatcaaaaatttggagtttgaggccaggcacggtggctcaggcctataatcccagcactttgagaagctgaggcgggcagatcacgaggtcaggaaatcgagaccatcctggctagcacggtgaaaccccgtctctactaaaagtacaaaaaaattagccgggcacgatggcgggcgcctatagtcccagctacttaggaggctgaggcaggagaatggcgtgaacctgggaggcgagcttgcagtgagctgagatagcgccactgcacaccagcctgggcgacagagcaagactctgtctcaaaaaaaaaaaaaaaaaaaaaaaaggaaaagaaaaagaagaaaagttggagtttgagataataaattcttgatctggcatttcattgccacctagtgttcagttttggtccttataaatagtattcaacactacaacaccaacacgtagaatattacacagcacaatcttttaatgcaccgacggactccaattagaaaagataaatagcgaaatttccctgggaagatttttcctattagtagggcaacttttcattaagcctgtagtggctaaagaaaatgaaaccttattagtaattatcattatttaaaaatattttgggaatatctgttgtgtgttacggtagatgaaatggctttgagaaaataaccttattgcacaacttcacatgatctctaaaggacatctatttaaaatcttggtaaatttttaattttatgatccttatttaaaaaattttgaacagaaaaatgctatatatatttatatatagaaaatactgagtaaaaaaaaaataaagaaaatatggaggcagggtgtggtaactcactcttttaatcccagtgttttgggagaccagagcaagagaattgcttgagcccaggagttcaaaaccagcctgggcaacatagtgagaccctgtctctacaaaataataataattaaaaaaaaaatagccaggcatgatggtgcacacctgtaactctagctacttgggaggttaaggtgagaggatcacttgagcccatgaattcaaggcagcagtgagctatgatagcattattgcactccagcctgggcaacagagtaagaacttgtcttaaaaaaaaaataaaaatattgagattgtgtgtgagtgtgtgtgtgtgtgtgtgtgtgtcaaatagagaactaccgttttatctacacatgcaacgttaaataaggtttaccaataattatatttaaacctccccaaaatctattcagtggtgatattgttccaattttttagaattcaggaaaacttaagagaagtgaactacacataattaatgaatagaagagccaaagactgaattggagggttgcaatacagtcagaggagtgctattataaaaatatgtggtattgtgagcacctggaaaagaaaatacttccagtaatttgtgaaaatggtggttgtgagacatttaatatgttgataggtatttaattccagagaattttttaaaatgctgcaattaaaagtaaggcctggaattgtttgtttacggacatcacaatttaaagaaagaagggtaagtacaatctaggttactgtgttattttttaaggtaatgtttccatatcaccactttggctctttgggcttacaggaagttccagagacttctgtagctctctgaagattttagtacattctagatcctatctgtagactcggttctattggcttctttttatgatcattatgtttcaatgaacacaaaaggcagctccatatacttatccacacataggagttttattctctgacttgtaaaagcaaataagtaaaaaggtataacctggtggttagcaggtttctgatcacaaattcaacactgactttatttaatagctctgagatttatttttctcatctgtagaatggggatgatgcgtatttatcttataagatttttacaaccactaaaggaaatctattaaaccacacgataaagcacctcgcacaataatttttttttttttttttttggtaaattgtggttgagaaatgaagctgaaagtttacgtgtttttatgttttgccagaagagtgtcgtttagttcattccagggcttttgaagtagacttatgtgtggaatactgagtgcactcatagggagacaggtttggggctctgcctcatagaaaatggtattaaaatgagatgggacagggcactgggggctcatgcctgtaatctcagtgctttgggaggccaatgcgagaggatcacttgaggccaagagtttaagatcagcccaggcaacacagagagactcccgtctctacaaaaaattttaaaatattagccaggcatggtggcacatgcctgtagttctagctacttagcagactgaggtgggagtgttgcttgagcccaggagttggaggctgcaatgagctatgattgcaccactgcactccaggctggacaacagaacaagattatatatatataacaagattatattatatacataacaagattatatatatatatagatagatataatatattatatatatagatatatattatctatctatctatatatataatcttgttatatatatgtaatcttgttctgttgtccagcctggagtgcagtggtgcaatatatgtgtatatatatatatatatatatatatatataatcttgcttgcaatatatatatatatagtttttaaaggaatgggctgctttagtgaaattccattagggcaagacaatcatttgatagagatgcaatggagaagattcaaacttcttaggtagagattgaataaagtgcctttaaaacatatttcttctctgaaatttcacttctctgtttttttcctgtgttatgagtttatatctaatcggtcaatcatgttatcaggtttgaaagattataccatgacagtaacaactttttctgctactgttggtaggatctgtgtcgtgaatttcgaagcatgcagagaaatggaaagcttatctgcaccagagaaaataaccctgttcgaggcccatatggcaagatgcacatcaataaatgtgctatgtgtcagagcatcttgtacgtaaaaaggtttatcaataaatttgatagttgtgcctgtttgctagaaattagtttttgttacttttaaaacctaagatacttggcatcacacattaatgatatgatacctcctctcttttgaagagacaatttccaaagcactttcacaataatttttttattttgatgttgaaaagcataatcatacccagaacctctggggtaggaagaggtagcttatcagctaggtaacctgggacaggccagttcattgtgcagagcctcagttcctcctgagggaaaaatgactgaacaatatagttttgtggagattcaaggacattttaaaaatgtttatgaacttcaaagcattatacctacgtaaataacattcaaggacattttaaaaatgtttatgaacttcaaagcattatacctatgtaaataacaatcaatattgtgagtttggttataatttaattggaaaagtaaaaatgagaattatagcaactttctagatgagagtcttaagtctattatattaaggaaaaataaagaccttttaggatcatatttttctggataagagtatagtaacagcatctatgaaagttgatagcattgccacaaatatattatcatgaaaattccaacaatcagaactgattagcttataaaaatattcttagatttttttttaggtataagaaaacagtgttagatttgctaatgtttagaatcgcagaaatacttggttaaagacaattcagtaacaacccttgaaaaattaccctatctttttttttaattattctgcagtgatcgagaagctaatgaaagaaaaaagaaagatgaagagaaatcaagtagcaagccctcaaataatgcaaaggttatttattaaaggataccaaaataaccattttacttttcaccttcagaattttgcattcttctccagctttgggaataataaatatattaatatcttaacttcaaagaaaattgatttttcttgtcttgtcactttgtatcataacaagatttttgggggtttgggggtttgataccttttttgattttgtagaaaattctctgagagtgtgtgtctattattgttttagtctttcctccttgggagaaatatggattgaaaagtagagggtaacattctttaccaactcaactgcatgcttatctttgacactttaagtgtgaaacaaggctttgggtagcttgctgatgtttattttaataattcaggcaatataaaccaatctaagtctcccttttagcttcccttctgttttcaccagatgattctatcagcattaaagaatcagcagtgtgcatgcgtgatgctttcttttctatttatttttcaagactacaaagaagacatctttattcaattctttaacagtaacaatcacatttgtagagttagatccctgagcaattgtccttttgtcaaaagcatgcttcatggggaaaatggggaaaggaaggatggatgaacgggagaaaaaaacaggaaggtctatcaagtgttgttttatgtttccctacatttttcaggaccagtgcagacaggttcagaatgaagcggaggatgcaaaatttagacaacctgggcgttccttggcctctgttgccaggatgagtacagtgagtctgagcccagagctaagagaggacttcctaaaaccaagtttgaagaaatcactaagccaaaaagggacaaagccatgttcactttccctttctcattttctaggatgagtgcagtgaatttcgaaactatataaggaacaatgaactcatctgccctagagagaatgacccagtgcacggtgctgatggaaagttctatacaaacaagtgctacatgtgcagagctgtcttgtgagtaagaggattctgctccccctgtagctagcaggggaactgcatttttagaaactgctgcttgaataagtttgtatatttatgaaccccatgggattttaaaaataagtctttagaattaaagccctcaaattgagaacacctgatatagtagaaagaacactgagacttggagacaaaaattccgtatgtaagttctaaccaagatgtatactagctgtgtcattaaacaatttgttttcaactttcagcatcataattagaagaaattcttcaagatctttattccacaactagatcagactcaattgagatgcctttaaaaataaatacaaatttttacaccccaaaatatattatatcagaatcttggggctatggaatttgttttttagaaagagtttctaggttattctaaaaagcaaatagaaatggagaccaatggacattataaatgatgatgatgatgatgatgatgatggttgtaaagcacactgtgaacacaacaataatcaaatttctttagcttttcatagtgagtgttctttgagggggaattaccaaatactactcccattttatgttctagaaaatcaaaacttcagaacattaacccacttgtcatctgttaagtgatgaaagttctaaaccagctcctaattgtgtacttttcttaatatgtcatcctggtcactatctcaatgttctgtgattctgttttatttatttatttatttatttatttatttatttattgagacagagtctcactctgttgcccaggttggagtgcaatggtgcgatctcagttcactgcaacctctgcctcctgggttcaagagattctcctgcctcagcctttcgagtagctgggatgataggtgtgcaccaccatgcccagctaatttttgtatttttagtagagatggagtttcaccatgttggccaggctggtctccaactcctgacctcaggtgattcgccagcctgggccttccaaaatgctggggttacaggcgtgaactaccatgcctggcctctgtcacattttatgaggattgcttaacttctcactggaagttataggaactgtttcttattttaaattattttttattttcttctctagtctaacagaagctttggaaagggcaaagcttcaagaaaagccatcccatgttagagcttctcaagaggaagacagcccagactctttcagttctctggtaaggaggactatttctgaaaagctacttatcaatttaattttcttgattttttttgacctgttgctatttgctattttcatagaagggtctgaggtttgctgattcagtgcagcctgaagtcctttgaggactatatgcagtttatgcttggtgagagttctgggatttctcattagtgccttatcctgtgccctttgagattatttgccctgcttcaatttagtacattttgaaatttacaatgtgtgtgtggaataattgtgactaatttcacatatggtaaaatacatagtcaggtgcctcaattctgtaattttagcatacctcttggtattcttagcttcctcacctagcttccgcttatttccctcctccaaccaaatctgtttctacatcctggaactctatgccaagcatgctcacaggtataaatttccgccaattagcaattcgcagtagctaaagcttcttgtttaaaatataggctgagctgggtgcggtggctcatgactataaccccagcactgtgggaggccaagcgggcagatcccttggccccaggagtttgagaccactgtgggcaacatggtgaaactctgtctctagaaaacttacaaaaaaaaaaattagctgggcatggtgccttgtgcctgtagttccagctacttgggaggctgaggtggaaggatggcttgagcccaggtggtcgaggctaccatgagccgtgatagtgccactgcactccagcctgggtgacagaacaggaccccacccttctctcttcctctctctcgtagctgatggtcaccagtaatgtaagtattagtctacattagcatgataagatttactttgtagagccttcacaagatgaggagtagaaaggagcaaagaggatatgagaacatcaagcagattctcagattgggccctaaaaggaagattttagcacctaggctgatgacccagaaaaggagaaagaaaggtatcaaacatgaattttacttcattattcacccaattcaactagggtaatagatgagttacatacatgaaatatgcattaattacatatttctggtaaattgagctccacatcagggatccgaaggcatggagaagagctattaacaaaatatgtttttttttttaaatactaaagtataatagttacatagaagaaatgtacatatgcaagtaaatagctaaatgaaatatcacaaagtgatcatacctgtgatagcagcaagaaataagatatcatcagcagaccagtagccccctcattctccctcataagctacagtctgctttggagctatttcttttggagaaataaatctttcattattcatttttttcatcaagccggcagtccttttgtcagtctacaaatacttactgagcacctgctatttttccaggcattatttatttacttatttatttatttatttattttctgagagggagtcttgctctttcgcccaggccggagtgcagtggcgcgatctcggctcactgcaagctccgcctccgcagttcacgccattctcctgcctcagcctcccgagtagctgggactacaggtgcccgccaccacgctaattttttgtatttttagtagagacggggtttcactgtgttagccaggatggtctcgatctcctgacctcgtgatccgcccgcctcggcctcccaaagtgctgggattataggcgtgagccaccgcgcccggcctccaggcattatttacgtatgctaggttaatagccataaacaaaacagatagcgctcactacatgaagttcatagtatattggaaaagcagatacaataaataatatgaataaatgaaaaaataatgccaaggaggaaataaggcagaaaaaaatggtacagtaaattctgagatggggaggggaggggatacaattttaagtgacatatacagagaataactctctcagaaggtgacatttacatcaagacctaagggtattgattctgtaggtatatctgaggagaacatattccagagagaaaacatagcaaagcgtttagtgttgttgaaatagagctacctcagctgtagaagaggaagtcaggaagctaatgggaggccatgttataaagggttttgtagacaattttaaagactttgcctaatattctgaatgaaggttctgagaagactaatatgatttgatttatgttttaaaggaataactttgcctgatacctattgaaaacactgcagggaggcaagggctggacagctagttagctattgcagttgtctacagaagagatgatgctggtttataccatgttagtagtggtggagctcttgagaggtggtaagatactgggtctgttttgaaggtggagtcaacagaattttttgagttgatgtactatgttaaaaaaatgaagagagagagagagtaaggaacattgtagtaccttttgaacattatagcaccagttacctgaaaaaatacaattgatatacctggttgagtctaacctttgccagggtttcatataagttacttatctaaattctctgtgaatatttgtaccaatatggaactcaccacaatctaaagcaattcatttaggtgtttgaatcatttatcaaaacaaaggaacaagtacacaaatactgcttgactcctccaaaatgagtattagcagatataatactattaaattttctatgtcgtctttgtatctgttttcagtaagtagttttcaaggaatttattaatttcatctatgttgtcaaattttttggcatgtagttatttataacatttctaaattattcttttagtatctacagctcatatagtgatgacctgttatctctaatattggtaatatatgttttcttgactctggtcaattttgcaaatagcttatcaacttattcttttcaagcagctaacttttggctttgttctattttctatttcatcaatttctcctctttattacttattttaaaaaattttctatgctcatcattggctagctccttcagatgaaagtttagatcatccattttagaacctctttcttttctaatatatgtattaaagttataattttcccccaaattactgctttggctgctgggatttgataggttgtattttctttgtgattcatttcatttctaaattctatgattactttgagtcatgagttatttagaactcatccttttacttataaatatatttcttataaatattatatagttgattctttttgttcttccagttggataatttctgtcttttaactggagtacttacttcttaatattctatgtaattactgataccattggatttaagtcttccatcatcctatttgcttttgaatactttttttatattttggctctactttttgcctttttaaaaaactaatcaaggtcttggaattatcattaattattaaactcatacttccaaaacactacgaagagcaaatatgtttcttcttttacatggaaaatatacatatgttttttaccgtggaaaacatactaacaactaaaatttactgaacacttagtatgtgacagatactgcgttaagcatgaacttacatgcattatctgttttaatcccttcaagcagtaatataaagtaaggactactattatttatgattttctggtgagaaaattaaggctgagaaaagttagataagttacttctctagttagtggtagagctaggactcaaaaactcatgcaatttatgagtatttacctctgagtctttcctttctaggctgtatataaccaataccttcacttaaaaaggcgaatattatttctggcatgcctatcattctagatttcttcttatgggcaggtaattgtgtcacatattataaaggatatttgctttcttattgctttgctactccttgtttctttgtttacttaccttgtcaagttaaaaattgccaaatacaggaagttaaatccacctcatatggtgcaaaatcaatctttgagtttgaataacatatatcacactccttttacaaccatttattcaagttggattaaggaactcaagaggttttcttaagcccacccctcttcttgaatgccataaagtacgtctgctttattttttgcttcttcaggattctgagatgtgcaaagactaccgagtattgcccaggataggttatctttgtccaaaggatttaaagcctgtctgtggtgacgatggccaaacctacaacaatccttgcatgctctgtcatgaaaacctgtaagtattcaagttgccccatcatatcttccagtttagaatttctcagctagagtgttaacccatagtaatgcactgatataaattcgaaatgtgttgcaagtaatttattcatcatagaagttaaaaattcaaaatttgtgaattatctttcttatatgtaaaatagaaaagatttaaggctattcctttggtaaattgcttacctacattgttatatgctctactgagaagaagagaaagaaaaaaaatagtggagttacaattgcagaatattggtataatcctgtgtacagtcatgggagtgtgaacatcattcattctgtgtgtagtggagaaaaacagtagagaactactgctatataacccagcccagtgtattatatctaaaaggtcctgtgactataatatagctacatattccccatttctttaaccctgcctcttgaaagaagtagtaccttgcaaaaggaaagtgcactgtacaaaagaaagcccaataaataaatagctgatctgatgtctgctctcatatttatgactatctgggtatctggaggcatattatttcatgattctgaatctcactcccttcattggagaaatggagacagttctctgagctgctgacttcacagatgattgaaaagaactgctagatatgaaaatatttttatcttaagttaaatacaagggattcattttaatactcttattattggctttagttttgttgttgctactctgctcaaatgctgtctgaattttaaaataatttttaaataatttccccttgtctctatatgcatcccttcccttctcctggccaccatttggccagctttcaaggagagaatggtgacaaaccttggttttcccatctcacctgaccccagacctacattgtagtactactttatccttcttaggacactataagcaaggcccagaacatgaggataggactccctgatatcctgctttttaatcctggaaaaatatttaaaagaattcatcttttaggtaaggtatggtagatataggtaaggtatggtaggtatggtatggtaggtatacttcatctataggtaaggtatggtagataaggcactttcagatttcagtcactgaatccctgcaacctgctatggaatgttattatctttattgttcagaaggttaatctgaggctcagagagtccaggtaatttgtttaaagttacaaagctagggagtaaatcagacaggattttgaccttattgatttggatctaaatacagttttcttttttctccactaaactactgttatttctaagacagtagttccttaaattgtcaaagaccaaagattccttagataatatgaagaaagttactcctttcaagaaaatttaaaaaaatgtgatatgaacaatccacacacataatattcataggctcgtggagtacttgaaattcatctgtagaccttataggtttttaagaattaagaaattcccgtttaaggaataaatataactgtccaggaattccattactatatataccttatctccagcccagaaatcctttaattcctctttcttataaatgtcagggcctaaattatccatataattttcttcaacattttcatcaactttatagacccataacaagtgatctttttaagggaaatttagcataagaaactgaaatgatgaaaatattaagaaagcatacctcaggatagtttgtttagctaagggagctgggagtagatattataaagaaggatcaggttatctgaggcaaaaggaaacaatattcatttctaaggttttagagaaagttatatgagagcaatttcaatttaagcaatgctaaaagacaaattgcactgccttgatagataatgagtttcccattaccagaggcaaacaagtacatgtctgattcataatatttctccagtgagaggcattaaaattcgtactccttaagattcattccaactacaaaactcagactgtatcatttgtgtcttgttatatttttccccaggtcgtattattggtactcaatatagtcaaacatctctctgggatctgattctcgcatctataaatgcgagatcacctttagaccagatgatctccaagtttatttccaacattctctatgaatatatcagtgaatgaaatgtgacaggataggtccagggctaggggatgaatctggagcagaagagagacagcctggatgatacctactgaaaatgaaagtagttgaatgcagatcccagatcctccctctaaatacagtttggtttgatacccaagtgtcctgcatgttggtccttatttattttcttattataactgagaacttcctcgttgttgaagcatcctctgatctgttttaggatacgccaaacaaatacacacatccgcagtacagggaagtgtgaggagagcagcaccccaggaaccaccgcagccagcatgcccccgtctgtaagtacataagtagactggcctccatggttacgttgtgaggagcactgggttctggttttgttctcttccactgagtaatggacatttatctggccagagaggtgacactaggtcaggtgacccagaattggtcacattttcactataaggataattaagtaattactgaaataagtggaaataatgtagcagttaatattttaaaatatttaatgggtccattaatagattgtttatgagcaatgtctccaacataacgttacttatttcaggataggttttgttttctgtgatctataataaaaagatgagacagagaccaagagaggtcagagagtgacagagttggatttaaacaatttctatataatgcccatattcttgaactttacattgtattaaattatttcccagcattaaaagttgaccaatttcatttaaactcctgaaaggatgtttcaacgtacgttactgaatttaacattctccctggtggctatttgaatagtcatcctcagggagatggtatgtaacatgaaaaaataggaattttcaaataagagaaaaatgttttgttatgggataaatgtgagtgcaaatttcagtttttgctgtgcttatacgagactcttggcaaatcacataaatactctaaaccaaatatcccaatgacctatgaaaatattcaataaatactgacttttatgcatttggcacagtgtctgaaaaattaatgtcactattattattatgcctaagaccaaagtatgaatttagaaaaagagtcgaaagtatgaactttttctaacagaccatggtatagtgcttatttatttttaataaattattgtcaattgtagtttgataaaattatgtgtaataaacaatattttaatgcattatatttaataaagctatttattattattcacattctctttgctccattccactgccacaaaaagctttggcaataatggaatcagaaactattcagccagatttgaaaatcttagtcaagcaatactagataaggccatattaaaaacgtctgcccaacaatctttgttaagggaaattgtgaaaacaagaatcataagctagagtcttcctagtttcacattagcagctgaaagcaatgtagaggaagccgaggactggaatgaaatcagaagaccttatctttctcatgtgggcttgacaaagttatttaccacccatttaaagacctctactctggttctttaccaggatccataaaaagggagtttaaactttaactctagtccctatattgtgtttgctgtcttattatatagaaattcttagtagttggctcccattttattgacagaatatactgttccccgtcctcacaaactcacctttacatatatctcaggagagaaaggtcaaaatagctttatgccagtccaatagaccacaccttagaccacacttccctgtaactctcatcctgtgtaggcaacttggaaaaactactttataaagaacttgccataggtttatactgataagatgtatttctttaaataatgaagaatgttgccggggcttatcacacagggtgttgtaaaagagtgccgttcttccatttctgagtgtatgctttccactggagttgcatagcaggcattaataatgacagaaattattatgctgttagttaatgaaacaaaaattaacgtgtcctggacacaggtggaacttcagtccctgtgtaagattcaagtgtgtgatctcgggtacagttggtacagactggtcatggcctagcattgttctgatgactagtaaggatgtatatattggggtggaagcctgttgtttgaactttatttctgggtggaagtttctctaagaaagtctggaatctcaagaatagaataagagtccaggcagtcacaagtttcttggaaaagtaggttgagtatcttggaacccactcttttgttactaagtacataatactttctattatgcaataactattatacagtaactactaagatttacataggtctttagagttttatgtacattttctgtttgtactcttacaatagtcatttgattagggcagggatcactgtctttcccattttacagaaaatcatcctgggggaaactgtcacttattaaagtcccttagtataatatcttgggttcaatgtagatatcctgacttcaattccagtgctctactaccattccttagttgtcaggagattctgaaaactaagtgctgttgagaaggcattatctcaattaaaagatgatttgctatattggaaggaaatttctatattaagaaaaatacaaatattattttgtgagataaatgactattcttatctatatctgtcaatttcatgacagattttcaaggattcaggaaaaccgaagcttgctactttcaaaccaaagaaaacctcctggagttgatataggcaatgaagtggagatttgagtttggaatgacagtgctgctcgtgccccaggtggtactagttgaagatgtgcagttatgtgaaagaaaacttcctgaggccctcgccccctttaagattatttttaaatattcatttaatgttttaaaggctgatttcaaatatatggatgagtcaggcaaaggaagacagctgattacattctagtggtctacaacaaactatagtagaaaaacattcgtattacaggaagtgaattcaagttatgacgtaacatgacagtggcaagttactaaacttctctgaagctcaatttcctcatctgcaaaatggtgctaatgacacctacttcttttttatcagcatgaaggctgcatgtaatcaaaggcagaattaagccatgttcatatttgtgtccacctcaacacgtagtacatactaggtgctcaatatttgttgtatcaaactggataaaatgtgaaagtgattttaaattgctacttctttgcagaatgcaggatctatggatttctttgattaagatgcagctataaatatacagcccacatttctgcaatatctctgggttctagcatctaacctacccatcttctcttctaggacgaatgacaggaagattgttgaaagccatgagggaaaaaataaaccccagttctgaatcacctaccttcaccatctgtatatacaaagaattcttcggagcttgtcttatttgctatagaaaacaatacagagcttttgggaatggactcactgattttcagtcttttccatctctttcctcctagactctgtgatctgagggtataaagacatctccaccaagtctgagccctcaaaatgtcctgattacaatgctgtctgtccaactgcctgttcaataaaagtaaactcagcag

SEQ ID NO: 17 - DNA, 90965 bp, Homo sapiens
gaagggacagaatgtgagaaaatcctagagacattagggctagatcttcaggtgtggaaggggttctaaatgtcaagcattttgtgttcgttttttaggcatagagagtgcattggggattttcgatgaggggagtgcctagcaagttgctgggtacatagtaggctgataatcaatcaatgatggttcaactaatgaaggagagaaataataattgccacaaattattgggtgattgctatctgccacacacttttctaaacattttcactactcatgtaattctcaccacagcccatgagatggtttctccatatccattctacagatgaggaaactgagactcagagaggctaagtgtcttgctcaaggctgtgactaaagagtgggcatctaaccagagcctgtgcttccacactgctgtgcaatttggaaaacagaagaaggggagagaagaaaaaggggttgtgggaccaatgtcatccagaaaggaagctatgataggcccaaagtaggagaagaacaatgtgggttggaaataagagacattccaaagatgcaatcaacccaaatctgttattatttgatatgggtggctgggcagagggaagggtcaaaaaggctcccagcttctagttcagtcccggggaagtgatagagctattcaaagaagttgtagtgagagagagggaagatgacagtttggttttagttgatgtgtacagaaatacgggtgcccaggagcccacaaaacggccagaggagaaatgctttcaaaggcaagctgcagggctccttggttttgtcacattcctcattctggggctttgcggttttgtcttgggaatctcgaggctctcccaaggttcctttctatgtttatatcatttagcagggaaggattgttaatgactaatctgtgtccatgaggcacagagccaaggaagagatgctgctgctagcccagaaggccgcctgtgatcatgcacagtacactggaactctctcctcctcctcacctcattgtctccccgacttatcctaatgcgaaattggattctgagcatttgtagcaaaatcgctgggatctggagaggaagactcagtccagaatcctcccagggccttgaaagtccatctctgacccaaaacaatccaagtaagtacctaattcctttgggagtgggttgtgtatctcacagcaacagagaaaaaatagtcacttaaaagtttctctttgacatctgtaatgtatgtcaataaatgaattctaagttagtagagtttgatgtaaagtcctgaaaattaaaaaagagagaaactaaaaaacaaaaagaagcagaagcaaaagttaatgagtcttaacagttgcttacctattgaaaacttatttagaaatactcttttaacattgtggtcacctgagtaaatcactggagatagtgcatttcagaaatgtctccgttctgattccataaacaatttgacttgtatagtgtgctatattttggtgatttatcaaatcttgatgtgagtttgggagtattgctaatgtcagatgacttgggaactaagaataagacatttaacctatgcttaattgaaatgaaatttttccctagaagaagagtaggtggaaaaagtcttctttcttgacttcagttgtaaactcttctattgctttccattttgaatattaatatgacaggaaatatcagatggaaatatttttaaaagatagaaatgtgagtatgacgaagaactttagtaataaaattgtccaaggactaaatttatagataagatacctctttgtctccttattgacagagtgaatggggcaactgtggagcctgacttacttcttttaattgggtttttattcagaagggaggggcaggagggaatgacaagtgactcaccttgaattcttcctctaagaaactcacacctgagctttgagctataaagaaatctgatgctgtttctggtgctgtcttagaatcacttcaggagtattgacaagaggggtaggaacccttagaaataatattagtgataaataagaaggcaggaagaaacttttggaggtgatggataggtttatggtatagattgtggtgatgatttaatgagtgtatgcctatccccagactcatcaaagtgtatacatggaatatgtaaagcttttatatgtcagtcacacctcagtaaagtggtttacctatctatctatctatctatctatctatctatctaaatttttttttctgttcctaaaaaaaggaagggagaagagaggaaaagatgttcagggagctaccattttgtttctagctgtgattttataaaatgatagacacttttatctttgtgttacgttcctacccccagtcctccaaattatggatctgtgccatttgtaccgtggacttttctgttttctgaggatgttgcaacaaatactgatgcaactcctggttaactgataaagtactggccagggacaaagctctcttgtcctgagacccttcctcaagatttgcagcaatttcccaccacgtacctctgccctctcctcacagctggagagggaaagtcatggaatccttgtccttcctcttgtttccacctcttcaagattgggccaattgcaatggaatatccattggttgtgaggcctttgtactctgcaaggaaaagaaaagaaatgtgtgtatgtatgagtgtgtgatggagctaacttttctacaatgtctactaacatgtcctagcctttacttcattcgcctgtttccttctcacaaaaaccctgtatgggagtttttctttactttttattattatttttttgagacaaagtctcgctctgtctcccaggctggagtgcagtggcgctatatcggctcactgcagcctccacctcccgggttcaagcgattctcctgcctcagcctcctgagtagctggtactacaggcgtgcaccaccatgccactattttttgtatttttagtagagacggggtttcactatgttggccagactggtctcgaactcttgacctcaggtgatccgcccgcctcggcttcccagagtgctaggattacaggcgtgagccactgcgcccagccaggagtttttcttatactcattttacagatgagaaaactgagactcaaaaaatacaagtgacccgtccacaggcagatagttaggaagtagcgggacctgaacttgagggcgggtctttctgactccaaagcctcttcctggctactctgatattggctattggcggaggctgggaaaacttgaaatggggaatgatcggggagcggcgaggggggaccagccgttaagcattccagcctgacaggggtgatttgttaaacccaggaactagttagacgtttcctgaaacctcctgcatagggcattttcgagagattgcaccatcagtagggaaactggaaagtttggagcactatttgttttaacccagagaccagtctaagatagctgggtgaatatttccgttatcagcgttttaattaaagaccacaatgaactctccatgctgctgtgattagggacatcttagagaggagctcagaactgctgtggctcacagtctctggattatgaatgccatgagaatgcatatcatgatgtgatagattttcaaaggctcacattgtcattaggtgggtgcataaaggacagaaaaggttctttacttcatagaaagagatttcccttccctttgctctcagtctcatttttatcttagtctctagcaacacagattataaaggggaataaaagaaaataggaacaagctagatacagtgatgagtgcctgtgatcccagcagctcgggcggctgaggtggaaggattgcttgagctcaggagttcaaggctgcagtgagctatgataatgccactatactctagcctgggtaacatagagagacaccacctcaaaattttttttaaaaaataagaaataggaacaattttcctcccaggtatttttttattgtcacagtagtttctaccagtgaagatgtagctaaaaggcatcaccatacgagtgtccttagtcaccaagctgtatgaggaggcaaaaatcattattacatacaaatattcatccttctgtcttttctctcccttctctcaccctgctctggaatcccctaacccctttgctcttcacagtgaattattttctccctcagtttgcccatttccaattttggccataaaagaacatctactattcctactctctctgctttgtaaattggtgataagatgacactaatataatgcaacttgattgcaaagtaaaattgcaaatattgcacaggaaaaaaaataagatttattctttgttaggattaagaaatataacagggttctggtgattaaaataaataagtataaatataaaataaatttttattaattttcattttttaatataaaatcctaacaaaactttgagattttgcttcccattttaaagagatttagatgacctttcccaggtctcaatgaacctgagacaacctgggtctattacactttaattaatgttattaatgtaaagaaaaggagaaatggtatggctttgcattttcaagtcctgtagatatatttaacacagttatctggaaaacatggtaaataatgtagttgtgcatggagaagatagtcctgctgtgggatgttgctgattagagaaaacaaaaacactgctctgggctgtgactgttcctaagcagagagctatttgctgccatgtcctagagagttatggaagctgccagtgtagacgacaagttgataccagcctggggcttaaggagcaaaagctggttgccatccagaatttgcagggcagagacaggacaaagaaatgtcattccaaagtggtcatgtaaaagattcttgctctcctggagtcccgactctgaatctgaggctatagctgggcttcagggggccagggtcacttaagactacatttaaaaatctatgcattttacagagaatttttagggcagtgaattcattctatatgatattaccaatggtgggtacatgttattatacacttgtcaagacccatagaatacacaacaccaagattgagccctaatgtaaactatagtccttcgctgataaagatgtgtcagcataggttcatcgattgtaaaaaaatgtgccactctggtgctggttgttgaaagtaaaggaggctgtgcatgtgtgtggggggtgggggagaagacgtatatggaggctctccatacattttgttcaattttatagtgaacataaaatttctcctaaacatttattaatttagaaaaatatctgtattttgtgtatgtctttcctagagagaggtttataatttttgttgaagctcaaaaatgctgcacaatcctaaaattgttttaagaaaatgaagcaaacccttcttttctggagaatctaaatatacctgcttatagcatctgattatataattggcaaagttgaggacaggaaatgataccctaggagactgacatatcttaatgtagtcattgtgttaaaagtttcaacattatgaataagtctaaaatattttttgaccttcccctagccctattctcctctacttcactgtttcaatgttaatacatatcaaaacactttaatcttgtttaaccacttcctaatagttgatactatagagcacagttcatttagccattccactgttgatggttttttaggtggtttgccctctttctgcattagaggcaatgctacaatgaacatcctggtgcataccagcaaagatttctccaggaaagatacctaggaattaaaattgcactttattttaagatacactgctaaagagccctccaaaaagactaaaacctatgcccccactagcaatatgtgagaatgcatattttcatacactttgaatattatcaaagttaaaattttttgataatctcataggtgaaaatggtatttagttatagtaatatccattttcctaattattattagtttcagatattttctgtgtttactggccacttgtgtttccactttggtgaatttcctttttgtatcctttgccaatttctctcttgggttgtttatcctttctgtttttatttataggaatcgtttatatattgtttgtactaatatttttggtgttatttatgttgtaaatatttttatccatttttatatatttagctttgtttgtgatgccttaacctctgtcttacatttcaacgttctcaaatgtattcttttcctatttacttcttatttaataaagtccttctcaatccccaaatccataaagatcataaatatattttctcccaataattttataattttcagtctttaatccatctgagatgtattttccaagaatgattcataaagatgtctttatttttaccctcaaagcataggcaattttcttgccacaatttcttgaataggtcatccttcttccactgatttgagctgagtccactagctacagcatagacaactatttagggttgctcagaacacagcatgctattttcccttcctatagccatccctgttgcgtgtcattttcctagcctaatgcctattccttcaagactaagttcaagaatcaaccctccacgctcagaaagatttccctcattctcctcactatacccttgtttaaaactcatcaattacttccatttagaagaaaatccaaactccttaccatggccaacaggccatacaagagctgcctactctcagacctcatttcctatagcccctccttggctcactcatttccagcctcactgggcttgtgttgttcttccaacactccaagcccaggccctttgcttttgctgatcactctgcctgaacttattttccctttgtatgacttactcattcttgtccttcacatctcagttcgaatgtccacttttcagagagctcttctctgattgccctctccaaaactgtgttcaactacaacactctatacttctcttttactttcttattatcctcatcagaaatcctattatttgttgacttgtgtattattcacttatccctctagaatgtaagctctttgtcttaccactgtatttctaaaacctagaccgaaacttggtatgtagtagagaattaatgaatattggatgaatgaatgtccctgcttgtgctcctgatggcacctgtgcttagctctgttgtagcaatcctcacactactaccattgggtttttcttgcctgacttttccactaagctttctgaaaaatcattattttttactatgtctagtgtctgtcaataaatgtgcactgacaaaataaatgagtgaatgaatgggaaattgatgttgagatgccgtttttaaagagtaagtaccttatcacacatagctaaagagaccaactgacacatccaccgtactagtgggaaatcttagatctataagtttagaaacatttctatcttccaagttaccacaggagacagtgttactgattgtttcatgattataaacaggacccccatcttcccacctcctatgggaattttcttattgttcttccagtttccactaaccagtctcctcactgcccttctagcctcagatcatcccccaatcccaaagcccaggccatatatgttagcggtttttttagacagcatctcacttccaggtactgatttctataccagtcatttatgtctttgtaacaaccatcccaaagcttagtggcataaaacaggaatgatccattaattctcatagttctgtggggcggctgagcagcttctctgctggttatgcctgggttcactcatgttgctcattcagatgtgagttcaactggaatgaaaggactgagatggcctcactcatgtctggggtcttgatgtggccgtcagctgggatagttggaagagctggacttctttctccatgagatttttaaatctgagatatctgcaaacagtatggcaatctcagggcagcattctttcttagatatggaaaacagaagctacaaggtctcttaaagcctggcttagaagtccccaacctcacttccaccacattctgttggtcaacgaatttattagaccagctcaggtccaagggctagcgaaacagactttgtgcattgatgagaggtgtggcaaactcacattgtaagagcgtgtggaaaggaagcaattgtggtggccatctttgcaaacaatttccatgagtaagaggcataatatttcaaagatccaattaagtatttgaaaaaaaaaatgacaagttagtcacggagaaagcattcaacaaatagcttcttgaccattttgactaatgtacataatgcgaaaaaagaaaaaacaaactttcctgattatgaagagtgaacattaagaagaccaaacaaccacaacaacaaaactattcctggtagttctgatggaagagaattaacaacgggaaattcgcgagattaattaaaactatttccggcccagcatggtggctcactcctgtaatcccagcactttgggaggctgaggtgggcagattgcttgagctcaggagttctagaccagcctgggcaacatggtgaaatcctgtctctacaaaaaattaaaaaaattagctggggctgggcacggtggctcatgcctgaatcccagcactttgggaggccgaagctggcagatcatgaggtcaggagatcgagaccatcctggctaacacggtgaaaccccatctctactaaaaatacaaaaaattagctgggcatggtggcgggtgcctgtagtcccagctactcgggaggctgaggcaggagaatggtgtgaacccaggaggcggagcttgcagtgagccgagatggcaccactgcactccagcctgggtgacagagcgagactccatctcaaaaaaataaaaataaaaataaataaataaataaataaaattagctgggcaagtggtgcatgcctgtagtcccagctacttgggaggctgaggtgtgaggattgcttgagcctgggaggtcaagactgcagcgagctaagatcgcaccactgcattccagcccaggtgaaagagagagaccctgtctcaaaacaaacaaacaaacaacaaaaaccctgaaacaaaacaaaacaatttcctggggtggtcaactcatgtataaaatggttcccatggggagactggaaagcctatgcttaagagatttccaataaaaatggttaccattcactaattagtctacattgtggggaagcagacttagttgttagatttctttatgtgacaaaaaaaaaatccttcttcggctcttgtgtgtattgtgttgtatgcctctattcactaatttctgtcctatggcctaagcaagactgattctaaaggtggttatctagtaaggtatattattcattcactcatttatgtattagttactttatttattcatgcaaccatttgttcatttactcaattaacaagaatttattgtgcatctaagatgtacctggctggcattgtgcaaggcattggagatccaatgtaatctctcctagagctgctggtttaatgggagacacagaaaaccaaatccacaaaaacaaaggttgaattacaatggtaacaccactgcaaagaagaagtacccagggctatgaacgtctcctggagtttgtgctaatcaaggagttgagaagcagggctaggcctagagctaggcaagtgaggcactgagggtgcaaaatttaagaagacattcacttccaggttcctggtcctggaagcctcaactccaggtgcttcttctacatctagttggaaataaaggtcagctgttgtttaggcaccattgtgtaagctccagagagcagagacgctttgaaagctgtggatatctagttgatgcaggtattttattatttatttatttatttgagacagagtgtcactctgtcacaagactggagtgtagtggcgcaatctcggctcactgcaacctctgcttcctgggttcaagcaattcttctgcctcagcctcccaagtagctgggactacaggcgtgtgccaccgtgcccagctaatttttgtatttttagtagagatggagtttcaccatgttggccaggctggtctcaaatccctgacctcaggtgatccacccacctcagcctcccaaagtgctgggattacaggcatgagccactgtgcctggcctgtcatagttcttgacaaacaagtcatatttcttgctgctaatgggcacaaacaaaactgaggttgattagtttgaatatcagtataagttgatcatagatatgatccagagaatgctattattaaaaatttaattaaaatgttaatttaaatattaaattttattttaatctatcactaaaaatctatgtagtggttactaagatagtaataaaaattgtttggttcttatagagcactgtcttcagaatgatgtggtccaatggtcatattggctcgcagccatccttgttggccatatgttgtccttgacgtgtctctggattttcggaagtatctatttattctaaatctgtatttctgtcctggaaagaacttcagtttgagtgctgcttgaagaccaaatacttggaaaaataaaacgttttttcttttcctagagctcttttctctttttccttaagaatatatttccaggtcaggcgcggtggctcacgcctgtaatcccagcactttgggaggccaaggcgggtggatcacttgaggtcaggagtttgagaccagtctggccaacatggtgaaaccctgtctctactgaaaatacaaaaattagctgggtgtggtggtgcatgcctgtaatcccaactactcgggaggctgaggcaggagaatcacttgaacccgggagatgaagattgcagtgaactgaggtcgtgccactgcactccgacctgggcaacagagcaagactctgtctcagaaaaaaaaaaaaaaaaaaaagaatgtatttccagcctttgggcagaatctaaggcttcctctgagcataaaatgatgatggttagaaaaccttcatgttttttcctgccctttaaaaatggattacatagatatccaacaaagtgtatactttctatcaacaactgagttcatttgagacaatgtcaccaaggatgatgtcttgatatgtagagttcatagtgaactagtgcatgtaatcggtttttatcttcatcctccaagcactaagattcctctaaatcagagtcaaagttatttaattgcagcagtgtctttccaaggtctccgattgcaaatggtttatactaagtcagaggagctccatacgccatgaacttcccatgacacacggtatctaaataagtaaatattgataaccagaaagtgggagtccaagctaccagtaactatgtgtcttatcacaataaaaacaaacagtgcataccatttctgaaataattcctgggtccttaaatgaagacttaggttacagcattttagaaataagcaaaaagtaaaataaacattttgtccctcctttcaccaatacccaaggtttaaactttgtatcatggggctgctgcttctccttcctcctcctttttgtatgctgtacacaagttccttccttcccatctctactgacgccacgctgctatgcactctggtcaccacacaacaacttcctgaatgtttctccttcttttactgcttcccctccccagcccaccttctcactagagtaatcatatctactgattttattgtgccactcaaaatttccagtagttccccattgaccacagttaggttccccaaacattttatggggaggaattactttttcctcaaagctttaagaatggtgtgtagcaagggcaaggatgtgtgagaaagagagaagccctgtatgaacttgtgtatttttacataggaagctttccatatataatttcattcaatctttttcattgtgaaatattttcaacatgcaacaaaatagagtaatataatcaacttccttgtatttattgctcaacttagaaggagagcattacaggtattatagaaactccctatgtacctgcccagtcacattctgcagctctattctgaatatggggctcattactttcattcatgtctttacagttaaggcaaggatcacaagctttttctacaaaggatagactgaatattttagactttgcagaccatatggactgtattgcaaccacagtacttaactctgtactgtggctcagaaaggagccatagagagcaagtaaacaaaagggcaaatctggtccttggcaggctgggttgggtctgagagtcatagtttgctgatctctgcagtagagtaacagtaataatatgtagcactgctttgcatatctttatatcaaactgtatgtattattctgcaacctgattcttttgctcaatatgatgtttccccatttattcatatgaatacatctagttctagttcattttattttattttattttttaattttttttgagatggagtgctctgttgcacaggctggagtacagtggtgcgatctcggctcactgcaacctccacttcctgggttcaagtgattctcctgcctcagcctcccgagtagctgggattacaggcatgtgtcaccacccccggctaattttttgtatttgtagtagagaagggatttcaccatgttggccaggctggtctcgaactcctgacctcagctgatctgcccacctcggcctcccaaagtgctgggattacaggtgtgagccactatgcccagccgctagttcattttatagtcatttattttagttcagattataattattttaattgctgtatagtattcacctgtgaatgtgcaatttatttattgtatccattctctttttgatggacattatgctgtttccaatttcttaccattggaaacaatgtggtgaactttttttgtacatgtcactgtatacatatatttgaaaacctatgaaagattcactttttaagctttacggcaaccctattatttcgatttaaatccccaatcaggggagtgtctgggtggtagtgtcaggaggaggtgctgagtgagtagttccaggtcatgcgtgaagctacggaatgtcagaactggcactccacccttaatctcctcatgtctcatccccagtgatatttatactagaccaaagctattatttctgcatatgtaaaacattgccagctatgcaaagggaatatgaaataaatataagcaatgattcctctcttctagaagtttacgatctggtgatatagtaaagacaaaacagatgaaatcaaagcattaattactatacaaggaggagggagagaaaaatgacaaggaagcatcaatcaacaaactggaacatataggggaaaaatctataagactgagaggtgcaagagcacatttgagcaaatggagacatgctgtgcccttgaaaggcaaaattaaatatcagaaatgagcagattttctccctaaatatctacgtttggcaccgtctcaaactcccaaagaaacttttctttttaagagtgtgataaaagatatgataattttatcacagaaaacaagcaagggtatcttaggaaatgttgaaagagaatgatcgataataagaaaggatgatattgatacaagaagtaactgcacgatcaatggaaaactaaagtcttaaagaagcactatgaaccaatgggtgagggaaaatgtactcaagaagcaattctgaaaaaaaaaaatccaccttgtaccataaactaaaaataagaagcaataaaagtaacctttaaaaaatcagatatatttaactacatgcaatgcaaaactttttaggtaaaggtaatttaaaggcatgtagtaaatataatagaatgctaatacattcaacgtatgaagaactctgccaagtcaataaaaaaaggaacacttcagtagaaaaatggcaaaggaagtaaacccaaaatggaaactgtcacacatagccaatatagatgtaaagaaatgttttttaaattactgctaatcagagtaatttaatacaacaagataggatttgtcacctagtaaattagaaaaaattgttcaaagtgagagtgggtgatgctaataaaggtatgatgagaaaagcagtcttactgctggtgggagtataaatggaaaaaaatgatagaacacaatttgacattttttatgctttgctgtattgcctcaattttctgcaatgacccttttattttaaaaatactttagcttaaaaataaattttaataacttttcagaaaaacagtggatgaaggaatgcttaaagttggggttttattaagttaacaaactattaattgagactgattaggctaacagagggggcagctggctaatctatcctgcatccaccctatccctcttccaggacaggggtggggaatgggggagtcagggggaaggtagggaagtgatcatgttcaaatcagatctttttcttttctttacctgctctgattcttcttcttcttctttttttttttttttttttgagacgagtctcactctgttgcccaggctggagtgctggagtgctggagtgcagtggcgtgatctcgagttactgcaacctctgcctcccaggttcaaatgattctcctgcctcagcctcctgagtagcttggattacaggcacctgccaccacgcctggctaatttttatatttttagtaaagacggggtttcaccatgttgaccaggctggtctcaaactcctgacctcaagtgatccgcctgtctcagcctcccaaagtgttgggattacaggtgtgaaccactatgtctggcctttagctgcatttctaaggagatttgcttcctctacttcatgtgttctgccagctgttgaccatggctatcacctgacaatgttgttttcctttctttcttttctttttgagatggaatctcactctgtttcccaggttagtgcagtggtgcaattttgggtcactgcaacttctgcctcccgagttcaagtgattctcctgcctcagcctctcgagtagctgggattacaagcctgtgccaccatgcctggttaatttttgtatttttattagagatgagattcctcatgttggccaggctggtcttgaactcccgacctcaagtaatccgcccacctcagcctcccaaagtgctgggattacaggcgtgagccactgcatccggccataatgttgtttttctttctgatctggtgttctctcttccacaatagactgctttctctacttgtgccttttggcatggaaaatgagctgccccatttgtagagacagtctcatggacaaggcatagttttgagtaaatgggtactcataatagctagtcataaagtaaatcctgaaattttaaaaaaatgtttaaaatcttaaagtcattagaaattaaaaaaattcaaatttatatacatattttagtggcagaaaatatgataaaatgaccaataacagactctcacgtgtagacatatgctaccttaggataaaattctgccatgaagtggaatggaatgaaatgtaaacttgaggaagaacaggaatgattaaaaagtttccagctgttaaagaataacttcatctatttcttaaaaggataagggagggtaaaaagttgctgtgatatttagatttaatcgaattatttaaaagtaatgcaacaacatgtaaaaatgtcaatttttataatacatcagaaattatattacttgcaactattttattttttagtgaaagacattagatgtcaacccaaaaagtgtgttgaaggagcatattgtttttcaagggtctttcaaaggttaaaattctcaacctataacatgactccttttatggaagggaggatttgaaggaaaaaagactatagagctaaagtcaagggtctcctgggagttcttcttttgcagttccttccccaaaatgaaagtgaagagtattagagaaagaagagcaccaaagtaaccgtaattagacaaataatgtatatggaaactcttggcaaataggctaaagttgctaatcccagtaagaagctgttaagaggtaaagaaaatctgactattatgagatgtatttaattaagtgggtttatatccccaaggtaatctttacatttattcatagtttacctctaacactactttgattgtttgaatcccttctgttctttgtttcaggcagggattaacatactttttgtgtaaaaggctagatagtaaatatttttgggtttctgaaccgtgcagtcttgtgttgcaactactgtactcaactctgctactgcagggagaaaagagccatagatattccataaacaagtggctgtggctgagtaccattaaactatttataggcactgaatatgaatttcatataatttccatgtgtcataaaatattcttcttttgttttttttaaccatctgaaaatgtaaaaccattctaagctcacaggctacacaaaaacaggcagccgaccggatttggcctgcaggcaatagtttaccaactctgtttttagatacagtatttgaaggcccttttatactgaagagtgagaacaatattctggaaggatacacaaagaattagcaattgtaattgtatttaggtaaggaaaatgggtgtctaagctgggaagactttttttcagtatactgtttgaattgtttaccatgtgcttgtgttactatttcaaaaatttagtttctttttttttaaagcccattcgggaattgtaaacccaatgaatctgacttgagtggaccctgctaactatctggattctagagagttctgctgttagctaatcaggggcattcacatggtaggtctccaatcagggataataacttaaatgatgcagaattaggggaactggacttttcatttgggagagcaagtgataaattatgtcctaagcttttgtgccaatagggcttataacatttctccaggaagagcaagtcaaatgtcatagaatttggcagaactaagcaagaaaaacaataaatgcagataatttaatagagccaacatttcttgagggctgactgtatgccaggcccttaatttgaaggtgccaagtttatatgaatgtattgaagaaaatatatcacaggaatccaaaatgaagatgagtgtgcctggaaaatattaaaaaactgtaatgtgcagtggaagtacgggggagcttgctgaacatggctcaaggttaaaaaagacagatgtgagacaaggagagcacagagggaaacctgaagtcagagtcacagagctgtaatatcctatttttaaagaccagaggaaatgggccttaagttacagagtataagcttgggttgaatattaggaaaactttctgaccgttcacattgtgggttcctggaaaatattattatgggaaattgtggaatttcctattcccaagataggagaaactctagaacaataattgcctaaattttgatggggagtggggtatttaagcccatttattatacaatatacagacacatatacatatttagtatcatgattcatatatgtattcatatatacacattatatatatccttatacaattgatatgtacatgctgaaatttgaatttccctagtcctcaactagcttatgagtatgaatgaggtcctgttaataacaacaactcaacatttttcttttgagactttagctctgtcgtccaggctggaatgcagtggcatgatcagagttcactgcagcctcgacctcccaggctcaagtgatcctcctgcttcaacttcccaagtagcttggctgggactacaggtgtgcatcaccatgcccagctaatttttaaatttttattagaggtgagttttgtcatgttgcccaggctggtctcgaactcttgggcttgagtgattctcctgccttggccttccaaagtgatgggattacaggcagtagccactgtgcctagccagaaactcaacttttactggcttactcttcaggacctcccgctcctatcagagcctccctccccgacaacaccccagttatttcaggagtgccttggggtctcttcatgtttataactaagtctgctctggctgttccttccactccattttgtgtccatggggcagagcagtgcccaaccagtagtcatgattcctctgctgggcacctctgctgcccagccctcttgggttcggagttccactgtgatatatggcatagttgtttgaggatgagggtgaggttgaagtgagttctctctctcttctgcttgttgcattggacggatctgccttatacctcaatgtttccagacttcatttttatttacaacccttttcttctcacctctgggtggtaggaaggtctcctgaatctagtatgggttggtcaaacacagctacactgaaaattacatatgtctctaatggctaaggctttcctttggggtgaagttcatggtccctagctctctatgagtttagaatggattttctcccaccaagccgcttatattaatggatagtagagtttggcagtagggcttggtggaatttgatgggctatgccgtgggtttaccagatggacccagatatgcctggaacccacagtggacacagtttgtgtctcttctcagaagactctccctcattcttgcttcttcatgtggttcttctctgttgtcttcccatcaatgcagattgctctagtatcgcccatctttaaaaattgcccttgaaactacatcctccctccgctacttctctatctcttgactctctatctcttcacatccaaacctctctattacagcatcctgttatttgccttcataaacagctttcatgacaatatataattatctatgtatttgggtgattatttaatatttattcctaattaagcttgatatcatggatcatgaatgtttattttccttttgccattttatcttcaaatatctagcacagagtttagtgcagaatatgtgctcactgaatatttgttgcaagcattgaataaatgaataaatgaaggaaacaggtttctggtggacgactttcccagcagccaagtgcacctgaaactcacttctgtttgagctaggacatttggtgagtgagagagaaagagagatacgaataatggggaaatcctaatgaaatacatacttatccaaaaaacccactatatcctcttcctgggcagcaaatatagacagctatttatttgtaaataaagtcataccttggtggagacagaaaaaaaaggtttgaaaatcatcctcagaaaacagcttgggaaaagagattctgacagcacacattatcacttttcattatttaacctttcaaattacttctttagggaggtagaagacatcgtagaaggagtgaaagaagaaaagaagacttagaaacatagctcaaagtgaacactgcttctcttagtttcctggatttcttctggacatttcctcaagatgaaacttcagacactttggtgagatttaccattatttttcttcttactatatctttttaaaaagccccggatcaatacatgaccaaggtagatcatgacagtgaaaatgaaagcccctgaaatttcctctaaaaggcagatacaaggaatatctctgattttctgatctgctgacataatgcctaaatagtcaaaaaaaattccagtaggaagtggctttaaatcactattaatgtttataaaaacctattcaactttagaataaagtttaagataataaatcatggattcatctcattttaaatcaaggccttttatatttgtttttttttctaataaagacatagtcaaaatgtcatcatatcttgcccaaatctcccaagggctgaaatttgaatgaaaacatacggtgtttttttcagataaattagtatcttttatgcaagcacgtatcttgggcatttttaggtccaaatgaggtataaaaatgataaatattgagaaaagatacatacagaaaggctatagtaaaatgcattcaaagggagccatttgtactttcgtaaactatctcgctgtctccttccccagctctcctaaccaacccttcccgcattcccacagtcacaaactatttattttcctttcaggagttttttttgaagaccaccataaagaaagtgcatttcaattgaaaaatttggatgggatcaaaaatgaatctcattgaacattcccatttacctaccacagatgaattttctttttctgaaaatttatttggtaagttgtcaagttcatttgaatatcaataagaacaaactacgatttggaaatacatgaggaaatgcctagatgatgagtccagcccagggtcaagaacatgtttttgttccttccaagtactcaatcaatgttagctactctgcaaggttagaggtagatcggaccttggattcatgggacttaatggtcttcatttttatagatgaggactgcaaaagctttgtgaattgctcaaggccgcgaggctagataattaacagagcagggagtagaaagcgattcctcctctaaggctaattccaatattattatagcaggtactaaactatgaaatcatgattcttatggcttaatatgacacctattaaaggctgagtttacttaggttatagctgggcagatttccttttgcagttcctccggtgctgggggatctatggcacagtgtcaggattagtcatttaagcaggattgaggacaaattgtactaagcagttttcagtagatctgtaactagatgataccataaaatgatatattgctccactttatgcatttatgaaaaacatctcattataaagagtttcaactgcaaacattaacaaagatttaaccaaggcaatattttgggtgggacagggagcctttctgccagtgttaaaataattcccttctgcataatagccctgctggcagcctgggatgctcccagttttcaccctccgttaatatatgggccatgatataccataatagtgaaaatgcaaacactagaagttcctcaaagttcaatgtatgaaggcatgaccgcttatttggttgctgatattcctaggacctgttaattaataatttgttctgttacctattagtcattagcactttagtgtgtaatagttgattaggccatttccaaaaaggggtcattatttgtaataattatttacatgtgtacctgcctccatacagtacaaatgcatttaagggcagtgaccatatttcattaatattttattatccagtgcatatttagtaggcacttgataaataagagtccagtaataaataatagaagggaaaagaaaaagaggtttatggaaaaaacagatgttgatccgtaactcttagagagaccaaaggcggcagtaattatttattaaatgccagttctcccaagtacttgctgcatcttatttcttccagttggcttatcttcatcctgtagatgcagtcaagggcagtgggaggccctgcctccatgtctagccacttgaccatttgcttctggcctgcctgcccttccgtggttcctcagaacagagtcaatgtatagacatcttaatgattttttcttctagcaatcagaactcacagaataattaggactattggcacataccacagataaagaaaaattgcactcaagattttttttcaaacagaaacttccatttcctgctgtaaaattttatgattgtaggttgagatctctgagcttaggcttcatcattactaaaccaatctattcagctccaatttgcatacagagagaaaattgtagggttttccttacaagctagcccaattttcagccagcacagaagatttcagggtgatttcagcagccataaggtgaaaaagatgccagtaaattcagaaaaagccacgaagatgccgtcaggttagaagcatctaaagatgattgctaaggaagcactgtgccttctgcttttatggtgtggttctctcctctctctcttttgctggaccacattcttattccatttcctaacactgcatttaaggtttctgagaatatatagcacaagctgcatgagctgcaatgcagagctgtaattctttgctggagcagtttcctcaactctttatctggtcccctcttctggtaaactaatctgaccatgtgtgaccattaggactccttttccttttctccactaagctgtagagccacgtctaagcattattttcaaatctctttcccctaggccctcagtctcacttcacttaacacatctgagctaggctgggcatagtggctcacacctgtaattccagcactttgggaggctgagggaggtggatcacgaggtcaggagatcaagatcatcctggccaacatggttaaaccctgtctctactaaaaatacaaaaattagcttggtgtggtggtgcatgcctataatcccagctactcaagagaactgaggcaggagaatcgcttgaaccagggcagaggttgcagtgagtcgagatcgcgccactgcactccagcctggtgacagagtgaggctccaactcaagaaaaacaaacaaaaaaaaaacatacctgagctaaaggtatgccaaaggggaggacgaagaaaattttgattcctttattcctcttcctcatcttcttgtgtgtcatgatgacattgatggcttctatggccccttcatgtgcgtagggtggaaggcaccagggaaaagactggcccatgaatgagtagcccacaggcctaactcagtactcctgagtctaagctacgccaggggttcagaagggttaatccatgggttcaactgcccagaaagctggactcttttccagtggttaactgtgtattgaaaacagcagtcatgttgttataataaaggcaaacaaggttaatggaatagtctatggatagctgtcacttcttctcttcaaatatcggacactgacaatacgctgggccttggaataaagcagagaataggacaggcaagatcctagtagaaagcaaactcacaataaacttgtaagtaaatcaataaacaaaataatattatttttataccttatttggacctacagatgcccaaggtagtgatacatgctatgaaggcaacaaaatagggtgatgccctatagcctggagtgatgggctgctctaagtggtatagtcaggaaaggcccctgaggagtccacaattgagcacagcctgaaagacaagaagccagagagaacattccgggaggagacaataacaagtgcaacggcccaaagtctggaatggactcagaaggaccttgtcttctactcatttttatttaggggtggacaactgctttcccattaaccagctgtgcagccttgaacagctcactcaagttcagttggtaaaagtagattatcaggctgggaattctaggacatttactcaaattaaacatttgagtccacaaaaatgctactgttgtccacgtcaggaagtggtgacttaatggtactcacttggtacacggctcaacaagtccttttaaggtggtcctgggcatggtccccttcactgcaggttattataaaggtcataattcaatgacaactttaaggcatttagaaggtgacctgaagacaaatacagacaagcactcactactgggtcctggagacaataatgaccttttcagtgataacttgcagcttcttctagaggtgaccatgggccccttactcttcaaaggctttgcttaaggtgaaggggaaatttcttcacccctgtaatgtttattccaaaaagcagagcccaaatgaggacttgtgtgaaggcagtttatgtgagacatgatgagggagtggaggcgagggagtgggcgatgcaacagggaaggagggaaaaccaaagaggtcagttgtcaagatccctggtgtgggggaggccagcttgatgccactgggagcagcacagagaactgtcagcagaggggtcagggactggagcatatattaatattaactgcccctcggctcccgttggttgagcgtcaccccagggggcattaattccccgcacttctggactgtttttgagctcaggccaagctgtctcctgtgggattagagaagttctgggcagaaagcataggaacgtgcggcatgctcttgaaatgacaggtggtcagcctgcagtcatcatctgagctcgtgtatgatcagctgccacaggtatggccgagatcagagacgggctgaagggatgtgacagctccaccagaaaaagaagaaaagaaacttggacagaatggaatcagagagatgggggttggaatcacctccctgaagtcctttaatttattctgttgccagacatccctgacaaatccagacggaaatctagcccgtcggtaactgaatccacgtagaggcctgggggtggaaggacacagttaccacacagagattcgtctcctttcctctgggagatcctgcaagccaggaagcttggtcaaagattaatttagtggattaaaaaaggcgtctctgatgaatgaataaggcaaagttttatgcaattagtgcataataaaaagtaataatgacaaagtccacagctccccaccatctgacatagtgaataaaacaggagatggtatattaactaaagtctatatttacttttagcaaattatgtttttaaaactcaaaaattacaaaaatttagagactaaagagacaaagcattccaacaataagagaagaagcaagagaaaatacagtcttatcctcccacacccaatgttcctgggcacagtgattcctgattcacttagcacagtgacactgggaatggaaataaggaataaaatagcgggaaatgaaatctcagaggcaagtgagattctctgaacttcagtttttacccacataaaatgaggataataatgtcacacttcacaggttgttgggaggaaggaatgggctgtgtgggaaagcgctctgtaagctgcaaggcatcctaaaatgttacaattaatccagagtttgaaatgtagttgtcatattttaaattgttgaaatgataaacaccattccactcattaaaagaaggaagtactgtttatctcaacattgtggagtgcaaagaactttcaaggggccagagagaatcaacaatacgtaaataaggctgggcgcgggggctcatgcctgtaatcccagcacattggaaggccaaggcaggcggatcaccagaggtcaggagtttgagaccagactggctaacgtggtgaaacctcgtctctactaaatatacaaaattagctgggcgtggtggcacgtgcctgtaatcccagctactcgggaggctgaggcaggagaatcgcttgaacccaggaggcggaggttacaatgagatgggcgacagagtgagcctcagtctccaaaaaaaaaaccaaacaaacaaaacaagaaaaaaacaccaaaaaacaaaaacaaacaatatgtaaataaatttctggttacctcacctttgcattattacattgctaacaacagctttggaatccacgtcttgtattgcttttattattgtatctaacagtctttccggagccccattctgattgaggcctagcaagtgtcaggaggtagatcctatacaatcccattcacttatctttcatttcctttggctatttctcattgccttatgcttcacttagctgtgtatgcccattttcttagggtgcgctttatttctttatttttatttttatagagaaagggccttgctctgtcacccaggctggagtgcagtggcacaatcagagctcactgcagccttgaactactgggcccaagcaatcctccctcctcagcctcttcatgctttatttgtatcagaatacactcactttgaaatctgcttcttccctatgacttatgcttaaattgaacgaatcttccagatgttacagagtcagtcagatgttttaaaatgcaattaaaggttttgagatgcagtttgtagaatatttctgacatttgatttcaggtatttttccatctcactgagttcaactcaagtgaacgtagttctgacttcttgggtgaattaaagttcaaagtttccaaaagatagagagataccattgtctcagataaaatgaagctttgtttcagcatacttgaaatattttgtcactgctatttcttctccacagctcttccatagctgtaagcagtctctaaggcatttaatttactgttactttggttttttctttctcaaggaatctcagttctggttctcttgatagtggagtaaagaaatgggagaaggaaagaaatattgaatgagcctcttcttattacaaaatagattactgattctttcagcaggggcttgcagagtttggaaaaggtgtgcaatgagtcagagagttggccagctggtaggcgattccactgcagtctaggccttagctctcaaccctgcaggctaagaaacagattcttagggatgccaagttaaaaaagattgactataaaatcatattgcaaatatattaacttacaacaataaaaataattgtaatgataacagctagtatttcttgagtgctttatagaaattaatgtgtcagatatcaagctaagtacattttagatttgttaacagatttcctgggttggttccaatctctgccatctactaccctgtggtcttggacaaattccttaactttgcacaagttacttgccttatttaaataaggtgataagaagaatgcctggcacatcacaagtactctatttgccactaaaattcactctcacaacacacctataaggtaggtaccattactgttccccttttatggtgagaaaaggaatatttagtgatgttaaataatctgctaaacattccataattagtaagtaggcaactgaaatataatcaggacaaggaaacaaaatccaatgtttaagtctccaggcttagagaatacttctattaaccttgtcaactgggaaggtctttcaataagattatctacctttaaagtctgctgaccatgtctgttctgaaggatagttctcagaaaaaaaacattgccaacatttactctaggacctcccttttttcatgccttcatagctgatgccccactcagcgtgagaggtacaacattcacagtgctcccaaatactctgccgaacagtgccatcagatagaactttctgtgacgaaggaaatgttctagctctacttcgtccaatacagtagccactattcgcatgtggttattgaacacttaaaatgtgactggtgtgactgaggaactgactctaatttaatttaaatcaatttaatttaaatagcctgatatggttgggctctgtgtccccacccaaatctcatctcaaattataatccccacatgttgagggagagacttggtgacaggtgattggatcatgggggtggtttccccatgctgttctcatgatagtgagtgagttctcatgagatcttgttgtttgataagtatctggtgcttctcccttcctactctctctcctgctgccttttgaggacatgctttgctgccctttcaccttctaccacgattataagtttcctgagacttccccagccatgcagaactgtgagtcaattaaaccttttttcttcataaattgcccagtcttggatagttcttcatagcagtgtgaaaagagactaataaatagccatacatagctagtggctactgttttagacagcagagatattcaggaaaaaatatttttttagggaaaaaataatatgagacagttgatcatctctaagagaaattcaaagggatccaatcagtcttgttatgagaacattctgtgtgaatttcactcagcaacaagggtttcctgggtcagctaaataatcctgctcatttcttatctagtatagatgtttctgagggcaaccgacaggtccatttattttggccagtgaaaaacttagtggagaattcttgaaatggaaaattctgaatcattcgtctagcttcatatcctttgggtagctttttcacctatgaccctctcagggaaaggatagctctgggattgtgaggaagggagaacgaggtcagaagtaaactgaggactgaaaatggctttgcagatggtgaccccgatcaagcaattcaaactgaaatatacccatagaccaccactcttttcctctttcttggcaattagggcaagtgtaccttagtttttccaccacgggattttgagtcagaagacctgggttaaagtcccagcttcattccttactaatgggatgactatagacaaatcactgaaactcactgagtttaaaaataggcttaaagatagtggaagttagaaataatacctccctccaagggtgcaagtgaagatctgatgagataatgcatatggaaccgctttggaaacttgtgaaggctatagaaatgtcttagcaatgattattccacttgtatagctcacctttgcctttcaaaattgctttcatatttactatctcattttatcttcagaacaggcctaaatagggcatgaattattatctatgttttaccatctattgatgtggacaaatggggcccacagaagctgagagactcatctaaggttacacagtgcatctcgctacattatgcctgggctccaccctggatcaactgagtccccttctaaagccctcatttctaaaaaacaaccaatagacttaagcttgatgtacaaaagttatgctgaaggataaaatatagaattattcctattcaataagcaacccaaggtacaacatgagtccaaagctgagcaatcataacatcaatgtagtgatgatgggtagccacctgttgtgctaagcattttataaatactattttagttaataatcacgtataattctttgaggttgtatagttatcaaccccattttacaaccaaggaaataaaggcagaaaatggttcaggaatttgtccattgtccacagagctaataagtgccaagacagcctggatgtattagtttgctgggtctgctgtaacaaagtaacatagactgggtagcttaaaccacagaaattatcccatagttctggaggctggaagtccaaaatcaaggtgtcagcagggttagctcttcctgaaggctgtgggtggaggatgtgctccagggctctctccttggcccacagatggccatctccgtctcctctctgtgtgttcacatcaacttccctctctgtgtttctgtctctgtaaccaaatttccagtttttataaggatacaagtcatattggatcttcattttaatttgattttctctgtaatgaccctatcaacaattaaggtcacattctgaggtactggggtttaaggcttcaacatatatacatcctcatcttacaatggttcaacctactatgtttagactttacaatggtgtgaaatagacacttttagcatagttttcaataaattgcatgagatattcagttctttattacaaaaaaggctttgtgctagatgattttgtcttacatggtggtaggcatgtcttacatggtggtagggaagacagaatgagagccaagcaaaaggggaaaccccttataaaaccatcagatcttgtgagacttactcactaccacgagaacagtgtgggggaaaccaaccccatgattcaattatctcctacaggatccgtcccacaacacgtggggattatgggagctacaattcaagatgagatttgggttgggacacagccaaaccatatcaagcattatgctttaaattcttccattttaaatcataccattccattttaaatcataccattctgccaccttttgatggggacaaatgtcaggacccggagcatggcacttgacctccaagtccagttttagagccagtgaacagaaacccaccctctaaaagttcttaaactggaaaagtactcccccaaaatgtttatctaagagactggtttccagcttactaggcaatttggcattaagaactttcctcataaacatttacaaatattctgctccgtaatgaagttaatcagtaaaccacacaacctctgtcctctctcactccttacctagtctcattttcagtggctgtgaataagctaagaatggtaatgcagtttcaggggttagaaaatccaattcaaattagtcctcactgcagctgtacgccgtcaggatttttcatggaaatgatgagtatgaagcccgcgaaaggtaggacactgttcacaggtgctttcaggtcgagctcttgcaactggactgaggaaatctggggactttggttggagatgacagtaacagatgtctgtcaaagatagtggctcagtcagacccagaagactggaatgagagtttgggttggggtgatttttatagggttctaaacagacgaatatcttatggggatgaaatccaaggatgtttcccctaatattcttcatagactcttatgtcaaattatcactattcttccaaaccaaacattagacaattctaatattaatatcaatggacacttgaaaaaacattttaacagacattatttaatgcagtgctcctaaaatggcaagtctcagttcccaggggatcacaaaatttatttagtgtctcgtgaccagcattaaaaactggattagaatataatagaatagaaatattagtgtccctcaaggagtaaagacaagtggtatttcatgaaattttgtttcagttacatgtgtataagtatgtacgagggatatgagataaaatgtatctaaaaccgtaggttgtggtaaaaaaaaaaatgaaaagagtttgggaaacacgaattaatgaagtagtttcacagcaggtttctcccaatagtccatgaaaaatcagataagcacagagttgagctttaggcccaggctcttggttttctctgaattaaaacatcgattataattaaaacacagtataatgtaaatcatattttaatattttttaaaacagaaattcatcttttaaatttccagcaagaaaaaactcgagtcatttttataataatgataattgtgaacatgtttttggtcatagacttggtagcataccattttgtttaaatgcgatgtttaaaagtgaccgacactgtatttagaaatggaaatgagttggaaggccggggaagcaaattttctatttacttcaatttaaccaacatttaataaacatttactatgtgtcagccattgagttagatgccaggaatataaagaaaagaatatagtctaatattttccctcaaagagttcacagactaatcacaacaatcacaaaagtatacatgtgtatgtggtgtcaggcactatgcagtttccattctttgtcttagttcatctttattacagcctctcatgcaggcactacattctttcagctttgtaaaggaaggaacagaagcttaaagaagttccatgtctttcccaggttcatatacctaacaagttgtgggtgaaatgaatccagatttgtctgctcagagggcactcttaggtagtatctcataccatctcaagttcagcgtggaagataagcctgtaaacaaaagaaatgattgtatgtgcttccaataagtgccataatagaagtgtgtacagaggtaggagaggtgaattccacctgggggaactggggcagacctcccagagtaggtgaccagaagtaggtgatcagctgacaaggcagggagaggcactgacatcacaaaggcctgatgccaggaacagcaaacaactttgcagtaaagccctgccatttagtgaagaaaccatggattaagaaataaaggaaggcaaaaaaaaaaagtgacttttctaggcactgcaattcaacagacattcattaaacatttactatggtcagcattgtgccaggaatgaaaaactggatataaactggaccctttcttaggagcatcagaaactcactgtgagattatgggggagtgccattgtttttatgcaaacctgatttcccatttgggggtacagtggttctggtcccaaactccttagagctgcactggctaatatgccacatgtggctattcaactttaacttagaattaaataaaatttaacagtcagactctaagtatcactagccacattccaagggttcaatatccctatgtggttagtggctaccatattggtaggtacagaacccttctatcacctcagaaagctccctcagatggcactcctttagagaaggtgttgaaacctggagactgtctaaccagaagaattttactttcttttcagggcttctcagactcccctggagtccatccatgtgttctcatttaagaactcgtccctaaacttccatggagaaccgtcacaaaggaatcctaattctcatactctttgataggctaattccaaaataaagattcctaaatctaaattttaatatgtattttcccttttaaattgtatcaaaatagaaataaatttaccttttcagaaagcatactctaaattaaagtcgaactacctctactccctccacatcttattttctgccaatgttgtatttgtttacttgtttacttatttttgtcctaacccttgacatccccacttcccaaaacacacaaacaagagaaaggctgggccttcgtatgtgtcttttcactttcatatgttcagaccctaacacagtgactgctaaatagcaagtgtttataacacacacacacacacacacacacacacacacacacacacagagagagagagagaacatgagcatatgtttataaataataatttgtaatgaaagaactatcctaatacttatatcatcaagacagactgtgttaataattacttattaactatcaattaactatgattaaaatcaggattttgctaggttctttaggaaacatgtcttttaatgacactcaacttaccgaaactgcttctcagcaaccgtattttacactcagaactaccttctgagatagcaacagtcccatttttataggagagattgaaataggaaaagcttagccagttaagatctcatggtcagttaactgtggaagttgttctagtccaaccattttggaatatttggccatgctggttctttggttgtaaagttcctttgtaattacttctctatttgtggagatttaggagacacactatgaaatgctagaagtgaatgtgctttgagaatagaaggttttttttgttttttgagatggagtctcgctctgtcacccaggctggagtgcaatgacatgatcttggctcatcactgcaggctccacctcccaggttcaagtgattctcctgcctcagcctcccgagtggctgggttacacgcacctgccaccacgtccagctaatttttgtatctttagtagagacggggtttcaccatgttggtcaggctggtcttgaactccttacctcaggtgatccactcgcctttgcctcccaaagtgctgggattacaggcattagccactgcacttggccaagaatagaagtattatttaatattattgtgtacggttctcatatttttactgatgttctactgttttagcatgatattatctatatctttgtgaaagctttccattttgatctagattattccagagactgaaagacagggatattattatctgacttgacttgggactcctttgtatttcttgattatgaaaataattgttttgttgaaataatgcttaaagattttagaattgtcatatgaggagaaaaaaagtacacatctccttggatgctacagaatccagattctatcggtttttgatcttgggcaaattacttaaccttactagacctgtggcagagagaaattgggctaagggaggaaggggagttaagggaataagataggttagaggataaaatctaagtgtacgtgaaactaatgcttttaatactttttagtttttttcaattccattcactccagaaattttcatcgtatttggtgatgaaatagatcaggattttgcttctattttatcttttctttttgtgtaataattccatatttttctccttccattttgcggtcataagacaaggcaccatttctaaaatattttgtccatcagacatactcgtttttttgtttgtttattttattttgttttgtttttgtttttgttttttttgagacagagtcttgctctgtctccaggctggagtgcagtggcgcgatctcggctcactacaaccaccacatcccaggttcaagtgattctcctgcctcagcctcccaggtagctgggactacaggtgtgcaccaccaagcccagctaatttttttgtatttttagtagagacggggtttcaccatgttggctaggatggtctcaatcttttgaccttgtgaaccacctgcctcggcctcccaaagtgctgggattacaggcgtgagccactgcacctggcctatgctgtttttatatggataagtcacacagaaggaaaggaaattgatttttgtacagatactgtataccatgtgttctgtcaatcatttcctgggttaatgcagaaagcattattttcaacatgtaatatgtatattctgaaatttggcagtgtagaaaagccctaaattctaatgttcataaactattagtcatatacttatggagacttttagatataaagaagaactagaagattatctagggtggagtcttctctttacagatgaacagagggaggcccaggtagggtaagtaatggtttttaaatggcatgtaactagattcaggaacatgactgccagggacctagaaacctcttctgttgggaagacttcccaagagaagcaatacccacagggaatttagaggtaagtggacattagtgagatgaagccctggaaggggttggctgtgttgagaaccatttcaggctcaggaagcagcaggtgggagaagtcctgagtctggaagcggcaaggcacattcaagaaacagagatgtccgaacatgcaaaatggctggaaaagaaagcaagggtagagtcatgcagaagcttgcaggcccagttataggttatgtgcaagcggaggccgagaagggggtaacaaacacaagtaggaggatgcagagaggggctttgaagatcatgtttttaagtatcacacacctgaaattacccccagagagcagcaattcagtgcatgggctttgagattagactcctagagctcaagtctcatctacttaggtaggtaggagtaaagttgcttaactactatgtgcctcatggtactcatttgtaagtgggggttaataatgttacccacctcatagagttttgtgaggaataaatgagaacatacaagtgcctgctactacgaagaactctataaaagttttctgcaaaatgtggtaatagtaatcataataattatagtaatcgtttcaactatcttttgagcacagcaaagagcattgccaatttgaaatccccaaagccccaaaaaaccacgtttttctaaaagtttggcacacacttttttggtgacagaacctgacctgaatgaatgtgaaactatttatggtctttacttattgcacttgctgtgaatattcatacgtttccctgtggaaaatattgctgtatttgattctgggttctgttccagactgtgctgggagggatatataaatagcactgtattctgttctgaaatcctgaaaattctgacttctaaaacacatacgactgccagggtttcagataaggaactgtgaatctgtatcatctcactcaatcctcagactaactcttgatatcgatattatcatcccaaccttgctgccatgaaaaccaagatttatcaatagtttgaataatttgctcaaaatcccactgttcataagagatggaattggaattttggtctagaattgtctgacaacactttgaagagtcagacacatttgtaaactttcctatctcttatttatgtctattttttcagcatttgcataatttcaattttttattttctaaagagccatagttgatgtttccaggaaatagaagcattttcataacctgatgattttctattacctagaggttttctaaataagggactcctttaataatgatggtagtaagaataattgttattattcctattttaagtcagctataatttatcgagcacttctgtgtgccaaacatttagcaaagcacttggcacacattatctcatataatccttacatcaacccaatgaggtaggtgttattattctctgttttattagaagaagactgcaacttaaagacattaaggaattgccagctgcacacagattgtaagtaacagagcaggaatttgaatccagtagatagattgcaggcactgtattcttttttttaaagctcctcctttgttttataatgattaaaataacacatacatatacacatggcaaaaactacaaacagtaaaaaaaattatgcaatcttctatcccagaatataatgtaaaaatatcacctctcacagtcaccaccacctactttcttctgtatcatgcagaaatttgtctttgcacgtgggcacgtgcgcgcacacacacacacacacacacacacagagttggtgtttaataccgatgtgaatatacacattggtctatagcttacctttttcatatagcaccatattgtagaaaatttccataacagcacatagaaatctaaataattgttttacatctacttaatagtgtatggatgtaacaaatttattgaagcagactcctatggatgaatatttagatcgtttccaatttatggctcttgcgaatgtgctgcaagtgaatatttttacaaaatactttttcatagaggttcaagcatatttctaaaataaattttcaagcagtggaaaatttatgctgggtgaaaaggacattgaagtttaaaaaactggaaaatattgacaaatttccccccaaaaatatttgtttccccaacagtgtgtattattaaactttttaaaccctcacacatttgaagatgaaaactgtaatgttttagtttcaatttaaatttaattattggcaaaggtgagcacatttttctgtttacaaaacacggttatatttctaacattgactattcctttcctttatccctttttccatagcttctcaaatattttcttattggttttcaggagctctttatacattaatgagatgagtctgtcctctatgttgcagatatttttctgaatttttaatttgtcatttaattttatatatatatatatatatatatatatactctaaagaagttgtaaacttttatgtagttaaatgtttcaatcttttcttagagcccacactcctaaccattacgccaaactgcctctctaatttccagaatgatgacattcattccagttttgttgtcacttttgttcaggtgttttaacagaacaagtggcaggtcctctgggacagaacctggaagtggaaccatactcgcaatacagcaatgttcagtttccccaagttcaaccacagatttcctcgtcatcctattattccaacctgggtttctacccccagcagcctgaagagtggtactctcctggaatatatgaactcaggcgtatgccagctgagactctctaccagggagaaactgaggtagcagagatgcctgtaacaaagaagccccgcatgggcgcgtcagcagggaggatcaaaggggatgagctgtgtgttgtttgtggagacagagcctctggataccactataatgcactgacctgtgaggggtgtaaaggtaagcatctttgattggcagttttctccttcaggttttactatattggttgttgaaatcccttgaactaattgcttcccttttcccaggcaacttcccattttctcctcctgtgcgcctacctcctcctacatcctcacctttgttgtgtagtcaaagatctgtaggaaaagactgttagagtatttagcttaatgtttaagactgttagagtatctagcttagagtgtttagctttcttccttttcacaacctcacacgtagctaaagggaacttatgattaaattgaattttttgtaggttttgtttgtttttgttgtttttttaaaaaagaaagaagaaagtgatgaacacatctcttttaaaattaagatctagaagaatacaactttattcaataaatatttaaaaatatttttcatgtactttagttaattgagaaagagagaaagaaagagccaagtaataatagcttatattacaaaaaaatattttaacttggcatggtggctcatgcctgtaatcccagcactttgggaggccgaggcaggcagatcacctgagatcaggagttcaagaccagcctggccaacacggtgaaatctcgtctctactaaaaatacaaaaattagctgggtgtggtggcaggtgcctgtaattccagctactcaggaggctgaggcaggagaatcgcttgaacctgggaggtggaggttgcagtgagccaagatcgcaccattgcactccagcctgggcaacaagagcgaaaatccatctcaaaaaataattttttttttttttatttagcctaggcatggtggctcatgcctgtagttccagcactttgggaggctgaggtgggtggatcgcttgagtccaggagttcgagactagatagagcaacatgggaaaaccccatctctacaaaaaatacaaaaattagtcaggtgtggtggagcacgcatgttgtcccagctacttgggaggcagaggtgggaggatcacctgagcccgggaggttgaggctgcagtgagccgtgatcatgccactgcactccagactgaatgacagagagagaccctgcctcaaaaaatatatattttatttagcagtaatacagttctgttatggatgctatagagaaatcataacaaaattgcaatccatttaagatggataaaatataataaatgaaatataaaaatgacaatgtaggccgggcatggtggctcacgcctgtaatcccagcactttgggagaccaagacgggtggatcatgaggtcaggagaatgagaccatctgactaacacggtgaaaccccgtctctactaaaaatacaaaaaaattagctgggcttggtggtgcatgcctgtagtcccagctactcaggaggctgaggcaggagaatggcgtgaacccgagaggcagaggttgcagtgagccgagatcacgccactgcactccagcctgggcaactgagcgagactccgtctccaaaaaaaaaaaaagacaatgtaaaatcccatgtgattactgtctcaactaaggcacagataatcgtggtatttattcattaaacaaatattttgggaacacctaccatgggtcaggcactctgctaacatctagaacattgaatactgaataaaaaccatctcttgagcagaatctttcggatggtgtgacacactggggttccctgatgttggtggttgccacagaaataaacagaggacccagtcacataagatcggctcaaggacatttcaaacctttgaaagttcaaatgatcagattgtgtaaagccacattagtcacttcttaaaaactgggtatgatattgttagaattttttttaaataaagaagcatttgtacaccaactttacaaactaaagcagatctataaagaaaacttaaaagatcccacttatggccttcagaatgtccttaacctttttgtggagagtcacgtctgaataggtaaatgaacttatacattcgttggaagcatagattaagtcttctctacctatattgctactcatagcacctagcacagtgcctggtacatagtaaatatggaatgtcttttgaatgacacaatgaaaaaccatgttcatcactggtacgtaattaatcagcctctactttgcaaaaacacattaaaatttttttttacaatacttaattctttcccatctccgaatgataaaaagtaaatattaccctcgattcctatatgaagtggcagatctttttgagctggcagagctgtggagatcgagatctgcttatgttaaagattttaaaatggtgtggaataaagcaggaaaacatttctaattggttagaaaaataaaataggccggacgctgtggttcacttatgtaagtcccagcactatgggaggccgaggtggggggatcacctaaggtcaggagttcaagaccagcctggccaacatggtgaaaccccatctctactaaaagtacaaaaattagctgggcatagtggcacgcacctgtagtcccagctacttgggagtctgagacaggagaattcctcgaatccagaaggtggaggttgcagtgagctgagattgtgccattgcactccatcctggatgacagagcgagactccgtcaaagacagaaaggaaggaaggaaggaaggaaggaaggaaggaaggaaggaaggaaggaaggaaggaaggaaggaaggaaaaaataaagtagtttccaaatgacaagccttgaactggaattaaaataaacaaaaataaaacttctacagttaggtttgagaaaccaactgctgatctacaggaaagaaaaagaacaaactttatagtagctctagtcaaaaagtggctggggctcttacactggagggcaaattaggaccaaaagatgaagcttataggatggcatcttttgaggcctaattcaagaattaattttttagcactaacatgaattgtcccaacaatgagattggctttttgccttaggtggtaacgaacttctcattattacaggaattcaaaaagaggttagataaacaggtttgagtacaggagatttgtatgttaggtgggacactgtattagctggcttctgaagtccttccttaaattctgtgaatctgtagtaccatatttataatattctaatctgcctgtttcatcttctaagcaagtttataaatttcataagttaaaaagtgactataattcatgtactccctcctgttgctatgaactgatgaaagggaaagctagaccatggtttttaaaccttgacactattgacattttaggctgaaaaactctgttgtggggggatgtcttgtacatactgtgggatatttagtagtagccctggcttctatccactagatcccagtagcaaccccccacttgtgacaaccaaaagtgtctacagacattgctaaatgtcctctggggttacaatcaccccagttgagaatcactgagagagactattcagtgaaaagtataatatagagcttctcaaacttgagctacacctggagatttcttgagggaagctataatatttcttgggtgcctctaatgttgacttaaattgcttttaatgaattacttatgctatcaagcaattatagcataagctatattatattataatagctatattatattgtgtatcatcttttatacactgaaaaatttctatacacaaaggaacaaacacaaatttacaaaattacatacaaacaaaactacaaaaccaataaaataatgaagtatattagattgtatggttttgttgcccaaaatgttaccaaactcaggttcttttgagtttggtatcactagaccatgtgtcatatgaggcctcaattctccactgcttttctctcttcgaagaattgattcaaccaaacctttgttcatccagagctccatttggccatccctgagctgggtacatctcaggcatatgaagtttgcctttgccattttgtcaaagctttttttttttttttttttttttgagacagagtcttgctctgttgcccaggctggagggcaatggcatgatctccactcactgcaacctctgcctcctgggttcaagtgattctcctgcctcagcctccccgagtagctgggcttacaggcgccctccactatgcccagctaatttttgtatttttagtagagatggagtttcaccatgttggccaggctggtctcaaatccctgacctcaggtgatccacccacctcagcctcccaaagtgctgggattacaggcatgagccactgtgcctggcctgtcatagttcttgacaaacaagtcatatttcttgctgctaatgggcacaaacaaaactgagggtgattagtttgaatatcagtataagatgatcatagatatgatccagagaatgctattattagttttttaaagactggcataaaataaaaatgtaaaaaataaatttaatatgtgtaaaggccttagaaaaaagtgtggcacatagtcaaaactcaatagatgtctattgttattattgttatggtcctagaattgatttacatatcgtgtaatggcaatgtgagtgttttctgcttatattgataaatattgatgctcaaatcatcgtgagttgtttaacaagatttatttgacatagattcagattacctaaagccacttcaacttgtctgtgtagaccagtgctactcaaagcatagtacctggaccagcagtatcagtatcactagagaatttatagaatgtggggttttaccccagacttactgaatcagaatttctgggaaaggggcccaagaatctgtgatttaaccagcactacatgctaaagtttgagaatactggcgtaaaaatcatatccaaaatcttcctaaggccactcatctggccaagcatcttggttttgtgttgtgagtgtgaaacccacaggatgggaaaagagaataggaggaatgctactctccatgaggtcatcaaaagcacaattcagtagaataaaatgtagacttgaaacctggactggaaagacacaaagcctaatctaagtcatgtttcctgctgggagagaaagaagcagaaaagaacacgcataatttattcggaaaatctgattcaaaagaaaaattccaatatacatacttttgaacctacaaatttcagtgctgatgacatgctaattctttttttttttctgaaacggattcttgctctgtcacccaggctggagtgcagtggcgcgatctcagctcacaaactccgcctcccgggttcacgccattctcctgcctcagcctcccgagtagctgggactacaggcacctgccaccacgcccggctaattttttgtatttttagtagagacagggtttcaccatgttagccagaatgatctccatctcctgacctcgtgatccgcccgcctcggcctcccaaagttctgggattacaggcgtgagccaccgtgcccggccgatgacatgctaattcttatggtaggcattttggaaacattctctctgatctttacagcaactatggaaagtaggaattattgtgtctattttaaaatgaggaataagcatatcatttccaaaacaagctaagatatagagatgccagtgctaatagcttgtgtgatgtgtttactatactttagtaatacacttattaattctcatatcttatgtccattttattttattttcttaaatttatgattgacataataattgtacatgtttatggggtacaacatgttttcatacatgtataattgtgtaatgatcaaatcagggtaattagcacatctaacagcttaatttatcatttcttcattatgagaatattaaaaaacctctcttctagttattttgaaatacacagtacattattattaactctagtcatgctgctatgcaatagaacatcagacatattccttctatctaactgtattcttggacccgttgactaatttcactgtccccttctccccccatcctcctcatcctctcataactaccattctactctctatttccatgagaacaacgttttagattctacatataagtgagatcatatggtatttgtctttctgtgcttggcttatttcatttcatgtaatatcctccgggctcatccatgttatcacaaatggcaggatttcattcttttttatggctgaatagtattccattatgtatacataccacattttcttgatccagtcatccattgatgaacgcttaggttgatcccctatcttggccattgtgaataatgctgcaataaacataggagtgcagatatctctttgacatactgatttcatttcctgtggagatataccctgtggtgggattcctggattatatagtagttacatttttaattttgtgaggaaacatcatactgttttccattatgactacacaaatttacactcccaccagcagtaagggttgacttttctctacatccttgccaaaacttgttatcttttgatttattgatagtcattctaaatggagtgaggtgatatctcattgtagttttgcattttcctgatgattagtggtgttgagtgccttatgcccattttatggaagtggaagctgaagcataagttgttaatctatttacccaagttttcatagctaataagagcttcaaaactatagcttataatctaactccagagcctgtatgattgaccactaggctatgatgccttttattggttgtccactaagtgattgttctgctcttcagttgtttgctcaagggtaatattgactaattcaatggcgagaggaagaaaacgaagcagtccgtttagctgttaaagaatcagtagtgtctaagccaagggaatgaatccctaaagtcactaaccttggatagcttacctccttagaagagaatttttctttctgtcttgtgaactgtgcttatgaccaagtgaaacttggtccacctgcgaagagttctggggcatggcagggtaaatagagtgagaccagtgggccaaggacaaccctggaaaacacttaccttaaaggtggtcaggggaagagaagcccacaaaggatatagaatagaagtaatcaagatagaagtctacaaggaagtgcaggatcacagaaggcaaggagatggagaaagtagtcagaagagagccaacctttggggaggtttaggaaggagaagctggatttggacataaatatatttttaagagcagagaaagacaaaatttttccattgattttgatttgagacgttgcccccatggtgtcaggaaaaggacaagcatgcaagggagaggatgggttggaaccaggcagggcccatgttctatgccagggattggcacatttttttctgtaaacatccagacaataacaagttgaggcttcacaccacagcagcctctgttgcaactaatcaactctgctactggagtgcaaaggcagccacatagaaaatgagcatagctatatttcagtaagctatacttacaaaaataggcaggaaaaaaaatgacagtgggctggctgcagtttgctgaacactgttcttgaccaatgacttttttttttttttttttttttgagatggactctcgctctgtcacccaggctggagcgcagtggcaatcttggcccacagcaacctccacctgggttcaagtgattctcctgcctcagcctcccaagtagctgggattacaggcaccagccaccatgcccagctaatttttgtatttttagtagagacggggtttcaccatgttggctagggtggttttgaagtcctgacctcaagtgatccacccgtctcagccttccaaagtgctgcggttgcaggcatgagccaccgtgcctggccttgacccatgactcttaagggttggtgtacgaattaactggaagctgtgtagtgaatgagcacaagattcaactcacagcccctatgtgagagaaatgtaactttattttttaaaattggatttaattcagtctagagctcggtggaaactttatttcattttattcagtatcattccattcacccccgccaaaattcttctggcggtttatctaagtaccaggattaagggagggttgtggagggattgggcactggggagtggggctctggccccacagctgtggggctgggtggggcttggtgccacagctgttgacacagtctgagatctgttggagtgctgttgtatttggtcttcagtcaccagtgggaaaggtctctgtgacaccatcctggggtactgagcacactcttccatcacgtctggccctggctgtctccttcattcagctcaggtgggtgggttctgatgttgcatcagtgctgtgttgggatgcctggcttcccagagaaaccatgctgccatttcatctgctctatgccatgctgggtgcagagaaccctgggggtttctccagttctacccaggaaagggcataagaatcctcgtcttccaggatcccaaatgacgtggagtttctataatctctcaatccacctatcctaggattctgtctggggatagggagttgggagggacagagctcaggaccttctcaggtacctaacatgtcttagctctttgacttcccctttagttgtctgcttcctcccgacttgaataagttttatctggtcttcaggattgggggcttaagctctggcgtctgaaaagccaaaaacaggctcctttatcttccttatgtgttctcctgtgaaaacaaatgaaaattatcctaccttagtgaatggaggaatgaggaagggctgtgaggaaaaccagaggagaaggacagaatagagtggaatgcatatcagaggaccaatgcctcatgcctgcaggtcttgtgagagctgctcagccaacctggtttccccgctgaccccgcagcccacttcccccatgcacatctcttgatatctgcactcagcagatgcaaagcgaattatactctgtaactttccatcaaagggagcacgggctttgcgggctgacaagctcacattgaatctaggctctgcacttcttggctgaataaacaagttacttaatatttactggttagagttcagcaaaataaaacagaaaccaacaattcaagcagaaaagaattaatacagaagttggaagagtcagagtaacaggatctatgctaagtttctgggagatgctcagagccacactgcagaactggcccgccggttgcttttctgccaaaatcaagaagatggggactcaggaagccacctcaggactgttggctccaggaagacaccacctcagctgccatctagggatcaggaagttgccttcactggcaatcactaactccagagacggggcttgcctgccaaatctgcacctgcaaacaatgaataccctgtcccctgcctttcaataccctcaaagctagtgactggaagccagagtgctgccacagcaaaactccacaatcccgcttaccagtagaaacaacggaagaacagcttgcttctcctttccaaaagtcttacaagggcatctctatgggagagcttaaatcatatccaccatgttagctgcgaaggaagtctgggcaaggttatgttctactttcctgcctctctggtaataggatgtgcactagactagaagggaggtgcagaagatataaagctagcgaattcttaagaccgtgcaatatttattcctctgagcctcagatctgcaaaatagggatattatctattttgtgggacatttgtgtggattgtacaagatttatattacattatattatatattagaatttaccagctctcttgctttagtatttcactgaagatttgtcagtcctgtgatacttaaaacaaacaaagaaaacacaagagaatttaaaaaaaaaaagcaaccttagaaacaaaacaaagatcagggttaaatttcctcattacattggtctctttttctggttccactaaaaatattttaatttgtctcagtgttttatttgtcataagtatttatagcatcaatgagagaaatgatggttttcaatttttgtaagtaataacttgggaacacaagcatcacgcagaatgacaatgactgccactttctcaggactagattaaatcaagagctttcttttgccctcagttatcagtgcagcatatggaaatgtgctaatgtctgaatgaattttgattcaaacctcaaacctcaaccaacaaaactgatcagcatctaactgaaaatttcaaatggctgcatttccaaataggtcagtgtctgtcacatttgtttcaatgccaagagagtcttcacacatccgagaatggtagaattcctaaaagatgctgtctgagtaaatgagtgaccctactgcctttctgaatatatttttgtgtaggattgtgaaccagcattagacttaggtctgaagttttaaaaaagcttccaaaagtattgaaactattccagtatagaatagatgtagtgtttccaaaggatcctttgtttatggacatttgtgaaagctgaggagtgctgacctatatataaacttattgacatcctatttaagatcaagcaaggtctgattttatacaatttaataatgatcctaatgaattctagaggtcaaattatcttggagtatgatgcaagatggggttccaaactatttcactgcattggaacccttttgtagtaagtgttatgaaaatcgtgggaagagtaggaccctgaaggcaaacaacatgctttccaatcccagctgattctcttcccaggtgtcctaaattacttaacctttctgatctttagactccccacctgtaagataaggacaacaatgaagatgagataaagatgaggagatgatgatgatgatggtgatgatgataatggtgatggtgatggtgatggtggtggtgataatgatgatgatggtgatggtgatgatgatggtaattatggtaatgttggtgatgtgatgatgatgatagtaataatcatgttgatagataatctatatcaagtgattactatgtgcaggcactgttctgggaggctttatatgtactaatttgtttaatcttcaggacagtcttttgaagcaggtatctgtagattgtcatgaggattaaataaattgatacctgtaaagtacttaacagagttcttcccaatggaaaatcctcaatcattgcctgctattattactattatcattgggttgttgtgaatttaaaaaaatgggatattatttttaaaatatctagctctgtacctggcactctttttaaaaagtttttttttttttagatttcaatagcttttgggggtacagtcgtacaaatggttttttgttacatgaatgacttgtatagtgatgaattctgagattttgttgtacctgtcaccagagtgtatacattttatccaatatgtagttttttatcccacacttttctcccctcctcccttttgagtctctgaagtctattatacactctgtatacctttgcttactgatagcttaggtcccacttgtaagtgggaacacatggcatttggttttccattcctgagttacttcacttagaataatggccttctgctctacccaagttgctgcaaaagacattatttcattcctttttatggctgaatggtattccatggtgtatatataccacagtttctttatccactcattggttgatgggcacttagattggttctatatctttgcaattgtgaattgggttgcaataaacatacatatgcatgtgtctttttatctaattactttttttcctttgggtagacactcactagtgggattgctggatcgaatggtagatctactttcagttctttaagaaatctccataacgttttccatagaggttgtactaatttacattctcaccaacagtgaaaagcattcccctttcactacatccacaccaaaatctattattttttgactttttaaaaatgggcattcttgcaggagtaaggtagtatctcattgtcattttaatttgcatttccccaatgattagtgatactgaacatgttttcatgtgttttttggccatttgtatgtgttcttttgagaaatgtctattcatgtcatttgtccactttttgatgagattacttgatttttcccttgctgatttattgagtttcttatagattctggatactagtactttgtcagatgcatagtttgcaaatattttatcccattctgtgggttgtctgttcactctgatgattatttattttgctgtgtagaatctttttagtttaatcaggtcccatttatttatttgtttgtttttgttgcatttgtttttggggttttagtcttgatgtacctggcactcttacatgctcagtaatcattagatgtgattttgttggtgaattcttatttgttattcctctgttcattcaacctccccagtctgggtcatacactgttttcaaaactctccctcttcctattagttaacccaattctttattcagcaaatattattaagtaccagtttgtatgccggagtctattctaagcataggagatgccttggtgagcaaaccagaccaaattcttgccttcatagtcaccattctaaagcaaaagcagaaaaatagtctacataactcagctaaaatagacaaaaagagaaaacagtcaagcaaacaaaaagattaagaaatataaaatcagtaaaagagtatcgaaaagaatacgtagaaaaatgcaatggtaataaaatgatttccagggaatatgaactgacatttcacataaacatataggtgatgaggcaagacaaactaagatgataaaaactaaatttaaacaagaaaaaatgtttaaagcaaacatataagcaatatgtataagtagtggttaaaagaaacgtcttaaagcataaattactaaatgagaaaagttataaatctacactcaagaaaaaaatggaaataggcatttaagcagcagtttggaggtgaaaggtttaaccccacagagcaaacgaattcacttgggctcaggtagctacgagcagcatcaggcacctcccagtgctggaattcacctattagaaacccagaacacccctaggaacctcagggaagatgctggggaccaggtgccggtcactgtgggccactagcttctgggggtttgcctacctggcactttaaatggtcactgaaggtatccaaagccaaactccagcacagcttggctgtcctcatcataacccctgtcctcatcctctcagcagaaacccagtaggtctgatggtgtcagtgggtttttgctttctactcctttagcctccttcatcacttaataagcattttgtcaaagaaatgagtgcatgtgattccaaagtcaaatggtaagaagggcatatcattagaaaaaagccccactcctaccctcttcaactgctcctagaggcaacccctaagaaccacttcagttttctttgctttttgtattttattgtttctttctttgttgtgtggatagtctttatttatttctgtagtaccatcttccctcccaacaaacatggaagaaaaaaagaaggggctggtgggaagaaatgccctgggggacacacctctccaatctctgcagttttgaagagggagtgttgaggtggaagtcttggggatatggggaagatggccagcccctcctcttgtctcccaggtggctcttggcagccttttaaagcttaaactcatcagttattttggagacgatgcttttaaaagacttggaagtctgggatatatgcttaaatggaaacttcttgagatatctccaaagcaattttcacacctccatcttccactgtactgagttctcttggtcccactgtggctgcatgcacagcagcatgcagttcttgtacagtctctggagtctgaaggagttccattttgtcttatcaatgatctgcacagctacctctttcctagttagggtgtgtcaggccaactgcatggtgaccaagttaccctggttgatggtcgtgatgagccagtagttgccaatatgggtatcctcagcagagatgcctgagaggtcctgcagtacgttggagatagggcttggagtcaaggtgtcccgaggtaggcttaaatttgggaaaagctgattaaaagcttggtccaaatcatgtcaaaagaatataacttccaaaatccacctgatgacctaatctttataatgaaatcaaaacacaatgccagagaaaaataaaaataaacaaaaacaaatgctaacacactaaatttaaaaagaaaaatgagaaaaaattcttacaaagtctttgtatagttttggtattagggtaatgctggcctcataaaataagttagaaagtgttccctctgcttctattttctggaaaagattgtacagaattggtatcatttcttctttaaatgcttgacagaataaaccagtgagaccatctgggcctgttgctttctgttttaggttattcattattgattcaatttctttaatagtataggcctattttgatgaccaatttctccttgttgagttttggtagggtatgtctttccaggaatttcatctaagttagcaaattagcaggcttggagttgttcatatttctttatttttcttttaatgtccatgggattagtaacgatgggcctctccttcatttctgatattggtaatttgtgtcttctctctctcttttttcttggttagccttgctgggcttggttagcctagccttattaattttatagatctattttattgactctattaatttttattgatctatttaaagaaccagcttttggtttcactggtttttctctatcattttcttactttcaatttcattgatctctgctctaattttaagtattttttttttttgcttattttggatttaatttgttcttttctagtttcctaaagtggaagcttagattattgattttagatcttaatcaatatatgcattttaatgctataaatttctctgtaaacactgcttttgtcacatcccataaattttgataaattgtattttcatttccctttagttcattttcacttagttctttaagtagtcacctctatgtcttctatttgcattatgtgtaaccttttagaaacctttgtgatgtaagatatgttatattcctatatttctctaaatcaaagttaatctcttctaagctcacaactctcccggctgatgtgaaattcatctggtctatgtttgagaatactccttcctccaggatcgtgcgcaaacctcaggatcatgttcaactttgaattggtcccttcaaagtgaacaactcagccacagtccagcatggacatcttaccccagggttttcaaggccatggttcttagtatcttcctgtccttgtctcagagctacatcattagagatctgtcactcctctagaagctctttattagtgctggttcaatactcacagaacctcccagactcatcccattcccaattctacaagcattgcccttcacctccaacacctttgagatgatgcaatataaccgtttcaaagagaggtcgaaaacaaaaatcctatgtgagagttatctttatttagagacagaaaaattgcagcttttgtcccagcaagtgaacaagagtttccgccctcttgggatggaaaagaaaatgaaaaagcaatagaagcaagaaaaaagcacacataaataccttgatcagttatcctttcatcttaatgctcctacaattattgcaaaacaatcatttatgaactcaaactggggacggtaacaaatttgttatgggctgggcacttgccatgctgtgtaaaacctgggtagattcatgtctcaagataatttttaaaaatgtaaacttcctactaaaaggacagcataaggcagtggttaagagcacagagtcaggtgggcacagtggctcatgcctgtaatcccaacagtttgggaggttgaggcaggaggattgcttgagcccaggagtgagagacctgcctggacaacatagctagactcagtctctataaaaaattaaaaattattaatagctgggcatggtggggtacacccatagtcccagctactcaggaggctgaggtgagaggatcgcttgagcccaggagtttgaggttgcagtgagctatgattgcaccatgcaatccaccctgggcgacagagcaagaccttgtctaaaaaaataggaaataaaaagagtgtagggtgtgagcttatcaaggttcacatctaaactctaccatttgctctctgcaggaccttgagcaaattaacttctttgtaactcagtctcctctttggtaagaaagagataatagtatgtgatgttccccttcctgtgtgcatgtgttctcattgttcaattcccacctatgagtgagaacatatggtgtttggttttttgtccttgcgatcgtttgctgagaatgatggtttccagcttcatccatgtccctacaaaggacatgaactcatcattttttatggctgtatattatccctaaaacttaaagtataataataaaaaaaaagaaagagataatagtagtatctgcctcattggattgttatgaataggaaatgaattgccatttaccattttagaacagtgcctggcacaaaataagtgctgtataagcggagacagacctagaagctgtctctatttaggtcatcttgaatggaaggatctctagttactcacctctgtgtgtttgctgctattttaaaagcctgtagacccttaaagttttacaacatcaaccaatattttattgattgcaaagtaatgggtggcctactaccagtggctatcagtatcagtcactggagtctggcacgtgcatgtgtatgtacacatatatgtgtatgacttgagaatagggtgtggtatgtggcttctaccagtataaagaagcatgagaagtgcctgaactcaggaagcagaggttgcagtgagctgagatcacgccactgcacttcagcctgggcaacagagtgaggctccatctgggaaagaaaaaaaaaaaagaggcagaaaagcagtgtgcaatattctgcagaatcgaggaatccatgtaaaagtaccatcctatagctattttcttgctaccccagggatcccattggtgctacacattccccagatggcaatgccaaccctgtctacttatcctgtattaccagcaaggctctgttcctcagtgaatttcctttccattcattttcaaatgacttttctgatatgagcattgttgaatatgcacaagaaagaggcagaggtatgtgtatggatagatttgcataagtataaatacagtatatgtacccatatttaaatgatataatgataatattgtgttgctattcagagtgaaagctaattaattcagctattgagatgataatgatttctttttcagttaataccagagtcaaaaaaccctgcagaatggttctacgcactgttcctttgactcatcttggaagaaagacctttattctgttaactattaagctgtctatcagtatctatgacagttttaaaggaaatcattcctgggaggggtagaagattattagtaggaaggctgactcatgtaggctcaagtggacattgaggtcatgatttggtaccaggaaagaaaaagtcctctttttgcttttagtctcttaaaatgcatgctttggtatttgcactctcaatatcaacactgatctgcagcacaaagtctttttttagactttatttggttggatttgacatttagaaaaatgttaagatctttcctactgaaatttacaccagctgaaaaattcacaagcaagtccatgactttcttaaccttgacatctctaacttttccttcagcctctgttttcatatttcatgagttaccaaaacctgatgttctctctgtttcctcctttctcttctgtcccactttagttcaggcattggtagcctctcagttgtattatggcaatagtctcctctctctagtctccaatacgcgttccacctttaccttgctccgaggagcttcccaacatacaggttaggtcatactgtcccctgtcaaagcctttaatggcttccctctttcaacatggtaaagactcaactcctttgcttggcattcaaggacacttaatcacattctgttcctgttacaactgcttacccatctcccactaattctctccatactctacccaaccgccaccaagatggagtatctaccctttcttggaattttcataacaccctgtgtttgctcatttttccgaatgtctttcctccctcatggtccatgtttctaaaaccttacttattcttcaaagcccagatcaaattctatttccttcatggacccctccctgattctggctactcttaattaatcaggttcactcccagtctatacaatgccttttcttcggggcgcttgacttctagcagttgggaaatcctcatattatacttatcttgctagaacaatttttaagtgccttctgctggaaaattgtcataagaaatatgcagctctacatgggtgcagtgtaattgctgcctctcctccttaaatgtggcacaatctttacaagcatatggtgtggacctgcttctacatttcaataatttattccttgtttagctatctcatcactcatattttatattatgctgtaaatttacttctgtttattccaactaagtatgcaactctgaagacaaggaatgtcttattcatcttggtatttcccaggtcagagaatgcagctttcagatagttggtacttaacagtaaactattttactctcttgtaacccaagggtggcaattgcaagatagtaaagagtacaggctttagtgcatgactgcctgggtttgaaccttcctagccaactactaaccatgtgatcatggccaagatacttaaactctctgtacctttttttcttcatctataatatggggacaaataatactatcttcatcataaaattgatataagaattacatcagtaaatggaggtaaagtagctcaaacaatagctactaggtgcttaataaatgttagatattattccaacagtctgttaaaataggaaggactcctctcaattttgacagagacatgaagacactagatgctacattccaaggtgagcccatctggcagaaatttcacagtggatattcaagaaccagttaaacatctcacttattttgagggaatgaagagatcaggagttggaaattatagagaggtcttataaagattttggagcatgtgactagtgtgctgtgtgaatcttacatccctactgcaaaggagaatgttggaaatgggagtgtctgtccctcgggccaccactggaacgtgtagtaactttgtgagaattggaaaatggtgtcccctcatgcccccaaaatgtatactaaagaggtcctgttgccccaagcccaatgaaagagtcttcaagacgatcacttgagtaggttgacatgtatcccctgaagctgacagacatggggactttgtgtctcactttcacccgagaagttgaaaggcaggaagccgggtggctgactgctcatggataaatgggagagatttctctgctccacagagattgttagatcagagaaagccattatggggttatcttaggtccatgtgaagagaaccacatagagtgacctcagtgtaaaaattgtggagtgaatcgccagattcctagatgttgaaggagacacataccatgggctagaatagatatgtatttgccctcatcaaaaaagttcagatgaggctgggcgtggtggctcatgcctgtaatcccagcactttgggaggctgaggcgggcagatcacttaaggtcaggagtttgagaccagcctggccaacatggtgaaaccccatctctactaaaaatacaaaaattagtcggccgcggtgggcggcgcctgtcatcctagctgctccagagggtgaggcaggagaatccattgaacctgggaggcagagactgcatgagctgagattgtgccactgcactccagcctgggcgacagaacaagactctgtctcaaaaaaacaaaaaacaaagttcagatgaaagtatcccgaagatgagaggtctctaaacaacccaacccaatggagaaagagacaactttgaaaacttgctatgcacaaaccagcttacagaaatactaggcgagtaactgccttcctgtcatttcttctcttacctctcacaatcctctcctgaattcaacactgcctccttgactctgaaagtgtcaggaactgtggttagtcagatggaggagaaagcagaaagtggggaaatggagcagcagagttgaagtcggttacctcccttcttcactctaggcatcttacctgttaacaggctgcagctgtgctataccttctcgggggagatggttgcttttagctcaaggttggcatttttattattatgccaggctggcatataaagtactgaattgaaaccttgaatgcgattttctccctgaatgcctggttaacagcaactcactttccaaaacttagctcagtgctcactccctatcctgacctcttcatcccaaactgaggaatctgtgtgtctgctctgccgcagtgcagcttttagagcccaggcaacatgtaatttcacttgtttagttgtttgtgcgtctttgtcctcagccagcctttaaactcttggagcccaggggtgaattgtttgcctttgtaccctctgcacttagtgctcactggcatagaattgtcccccaataaagatctatgaaagtaatttgtcttagaaaacaaattcacatttttcctaagagaggctataattcaaatttgtctttatttctgagagataaattaaaaacaacaggcttctcaacaacacaatgtcacataaagtatttgtcactggtgtgctcaaggatggcctgggtgctctccagcagttggtgagaaaatgtcctggcatctctcaatccaaacctgtttttttcctgagaagctgtgagaggactttttacacttttcagtgtttctcccacaggtttcttcaggagaagcattaccaaaaacgctgtgtacaagtgtaaaaacgggggcaactgtgtgatggatatgtacatgcgaagaaagtgtcaagagtgtcgactaaggaaatgcaaagagatgggaatgttggctgaatgtatgtatacaggtattcacttcaagcaattacatttcactaaaaatctcttaaggaggcagatgtcaggtaactcatcacgagagtgctacttcacatattaaagaaggaacctactaagccatctaagttcttgaaaagggtaatgaaccactgaaattgtccaaactgtcaactaaagagcattttagtcacccgaaagaaatgggttttttttgttgtttttctttgtcgcagtgaactatacatggagcccagtggcattaacataccattcaaataatgtgctttaatgagctacgaatgacatctaaaagtttcctctaaatttgattttaatatacttattatttattgcttaattagcatacaaattcactattgtggaaaaaaatgagaatgctttataaggtataactgcctctgaattgtctaaatagagttctaaaccaagtcattttattaaggatctgtcttctcttagtgcagctttgaaccaatttgtataggtttacacaggaaattaactactcccagttttaatataattttgtctttctatctgataaagagacactgtattaactgctggctttgtgaggaactgtaatcttcatcaaaaattggaatgcatgctagtatataacataattaatttttcattctgcaaattctacagaccactcagattctgagatatgtcctgtttctcctcaaaacacaaatagacaaatgtcaccaaggggatgacagcattcaggcagggaatgccaaatgaaataaaagccttcagaaggtgactccagttctattgttaccaaactgtacgggcaactgggatggacccagggaaataatgcatgcaggttgggggaaaataggtctgtgtaaataatccagctctgggtggatgaaaattttatagtagctgatcacaatctcatcttagcatacatgaaatgagaacctgcaataggggctgctgctggaatccaatcttgcaatggaaacacttactctgacactgcacagctcatatagctcatcacttaaatatgaacttgttccagctggagcgctgaggacattttgcatgaagccacatatagcagtctataatatttatgaacacaaactcatccagtaacagatgcggatatttcatggttctataaaataaattccctgtacaaagaaattcctggaactttgttttattggcattgagaaaagagtaaggacgttaaatgggatgaagggaagattgttttacattatttttaatagctctcttttttttttttttgttgagacggagtctcgctctgtcgcccaggccggactgcggactgcagtggcgcaatctcggctcactgcaagctccgcttcccgggttcacgccattctcctgcctcagcctcccgagtagctgggactacaggcgcccgccactgcgcccggctaattttttgtatttttagtagagacggggtttcaccttgttagccaggatggtctcgatctcctgacctcatccacccgcctcggcctcccaaagtgctgggattacaggcgtgagccaccgcgcccggccttaatagctctctttaagtgtaaatcaatgaggttgattgtatgatcattcaaagacattttaaaagtcaccttgtattatttttatttttaactgtattctcaggaattggcactgttcttaaaattaacaggattttaaaaatttccctaaaggatgttaacatttgtttttctcaataagtttatatgtatttaatgtgaaattcaatatccttcttctggtacagtatgtaaacatggatgaaaataatattaatggcatgttttaaaacaccaattttcacagtcccctagagcaggaacagggagagtgtcattcaccttttcattgactgaatcccttgcatttgtacaatgctttcatatcacaagttctttatataaagctcatttaaaaatgattattgcttttattttgtgtagattattgcttttaatctacacaaaactctatgaggtagatattattcccattttacaaatgaggaaactgagactcacagaggttaaactacttgttcaaggttaagtctcaaaccttggccttccctttctaaaatgcataaaaggctagcgttagttctgtgccattgcataggggatcttctgggccaggtacatatcagtggttttatgaccacacacccaacagtactttctgtgattggtgaagtctctatgcttatttgttttaggcttgttaactgaaattcagtgtaaatctaagcgactgagaaaaaatgtgaagcagcatgcagatcagaccgtgaatgaagacagtgaaggtcgtgacttgcgacaagtgacctcgacaacaaagtcatgcagggtaataatatgcaatggtgtctgccaagactggcaggaactgagtttctaggtacatagtgagctggccaggaggctttcaaattaaagccacaggcacagctgaatttctagtccaattgttcattaaaatggattcctaatacatgctttgatgtaaacattcaaatagtagcaatgcataaactaaaaagtgaaagttttccttctctctgactccattccagtcctactacctagtgtttgccagcagaaatgatttggtgtataaaatggattttttccaactgagtattgatgaccattttttccctctttttgagaagacagtctcaaactgggaagaacatggtctcaatagaggctgtggattaatccttataaatgagtaaaacagggtgaatacacgtatgtggatgaatagagaaaagtcctacccactggggttacaaatttctcaagaaatccattgagcaacttaggacaaaataggggaacagcatccaaggtgtttagacacacacattgtgataatgcacaggacatttgatggaattttattttgccattagctgaaaaaccagtaagctatgattgtccaaaccacacccttctcaatatttattacattattgacaaagaaaactttatccacatttagttttacaaatacgtatttttgtatttatttaagaaaaagtattttatatgaaagcattattttgccatagtgcttcatcagtaacactttggtataagaaaacaaagagttgacataattattcacactcttcaaaagatgctgtagagggagaaagagatgtttggggtctgaattgtccagattgttgactctctattttaggggttgacaaactttttttctttaaagggctttggccacatggtatctacaacagctactcaactctgccattttagtgcaaaagtagcagagacaatacataaacaaatgagtgtgactgtgttccaataaaactttataaaatccaatggatttggtccatgggccacagtttgttgatccctcctccacatgaatactctcagatgacttcaccaggtggaattcatgtagaatagtatatgaatatagtattcatagtagtcatactatatgaaaacctttcattagttataattaaagcttgaactttcagtgaccttcaatatgaatgggctcaatagtcttcatatccagactaccatttattcctaagaaatacacaagtggaatattttgttattcatattttatagataggaaaattcagtgaaatgtgatatggcctgcctgaggacccagagaaagaaattatacactctcttagaactcatagttcctgctgtatttatgcctttttttttttatgatttctgctattaggtccctccagatgaatgcacatatagaaagaaggctttatacacatcttccctaacaccttttattttcttgccagtgtaggagaaaactgaactcaccccagatcaacagactcttctacattttattatggattcatataacaaacagaggatgcctcaggaaataacaaataaaattgtatgtataatatctgaaaatatgtgggtttaaagttaatattttctggagtttttattgccttggaggtataatttatatgtgaatatgttactttgaaatgattagagctgagaattcaagttagacttttaaactctcagcaacattaaacaattcaagagtatgaagtctcccacctatcttgataatggtaattgccctccaaagatctgagaaatagtaagatgggttttcaaattttatcatctaaacctagtttttctttagtctaatggttttatattatcattttcttatctactttttaatcattggtttttttcttaaaatttagttaaaagaagaattcagtgcagaagaaaattttctcattttgacggaaatggcaaccaatcatgtacaggttcttgtagaattcacaaaaaagctaccaggtattttttaaataatcaaagttaatatttattgagagtttaaatatgtgcccacagattagattacctattttacatacggtgttttaattttcaaaacattcctgtgagatcagctctattttcactattactttgccaagtattttcacatgtacttatttcactgctattctctacaatagtcttgtgacattgagaaaggcaggtctgttctttgtaaaatgaaaatcatttaatatctgatttaaagtaactgtcgaactactatagacataagatattagaactagaaaggatatttaaaataatgtataataattctttcaaatcaatagattaaaaattgaaactttgcaaagttgtcattcacccatttattccttcaataagcaattgttgatacctactctatactaagtgcctggctattaccttcagggagagtgatcaaaggtgataataataatgataaatacacatacatacacatacacacgaagtgctgtttgaacacagaggaactggttgctaattgtgtctaggaaagatggagagacttcagggaggatcatatttgagttgagtctaaaagaaaaagaagttttccagttggcatggagaagcagcagcattccaagttgagagatctgcttgtttttttgtttttgttttgttttgtttgagacggagtctcgctctgttgcccaggctggagtgcaatggcatgatcttggctcactgcaacctctgcttcccgagttcaagcaattctcctgcctcagtctcctgagtagctgggactacaggcacacaccaccatgcccagctaatttttgtatttttagtagagatggggtttcaccatattggacaggctgaattcaaactcctgacctcaagtgagctgcccgacttggccaaagtgctgggattacaggcgcaagccaccatgtctggccgagaaatctgcttgttataaggcactgaggcatgaacaagaataggattatttgagataggagagaaaattcagtgtggttatagtatagtgtctgtggtgggctcctaggttagacaataaggtaagttggtaccagactgatgaaggcctaactaaggaatttaatctgtgtaccctggacagtaaagagatttcggtggtttttgtagcagagggaaatgaagtttttgttatacagaaatgacttaatcaggttcatgtaagatgaatttgaatggaaagggtctgggggcagggaagatcaagtagtatgctactgcacaagtccaggcaacagggcttgaaataaagcaatagcagtggggaagagaagaagaaacaaaaagaagagagattcaaaaatcgatagggcttgaggaacagttgtatgtgtaaggtgagggagagggacttacttatccacactcattctgatggtgccagtatagaaactagaatgtgggagtcttcttatatcccagcctcaaattctttttgccacattattaatgctatctaagctaatgggttttagttgtttcagtgtttattaaaatattggtgtattgaaatcccgtagtctagaagagtataataaataccttgtatagcagcataatactataatattaaattatagaagataacttctgacataggattttagttaaacatgttaatttgccttctttttgccagcattatgctattattttattaaatgtgtcacagatagacataagcctacataaaactcataaagtgtgaggagaaatttctcactatcattgaaacactaatatgctctcatttctttattaacaatgaaagaggaacttaatttactatatgctaattaaactgaaggcaagctcaataaaaaactggattatataagagtaaaaactgtggaggaaagaactggaaaaaggagatatttttggttatttatgggaagagattttttaagttcaaatggtcagttggttttgaatcaagaaataattgaagacaaataaaaaccttattcataagaaggtagcttatctgaaagcaatagcaatatcttggcatctcttaattcccagtgcctagcctcgttcctgagggagcaagtacaattagtgtgtgttcaatgagtaaagcagaaggaaaaaatttaaaatatggaaagaaataaaaggcaaaaacccttgagaaggaaaaaaattgacaataatgacagagatagcattattacaagtagtaacaatagggatataataccagtactgaagggatattttgtgaaaaactgaattgaatcattccattcagtattcattgagcacaacctgtgccaggcactgtccaaggtgctggagtccctgagggcaataagacagggcccctttcctcaaagaagctcttagattctctcggatggtggctcaatttttagcgttgctctcttctctatactccctttgctatttagttcttcccaagccatttaggccctgatggtgttatctctattcatgtgagtgtatgtgccagcatgcacatgagcttgtgttttgtttcccattcattcattcaatctgtcaattatccaacaaataattcttaggtacctattatgtgccaggaactggggatacaaaagtaaagaaaaacaaggcctctgcccccaagaaatgtacactccagtagaggtggcagacaattaacaaataagcaaataaatctataatatcatgtcgggtggtgataagttctataaactaaaataaagcaggtagagactagtagtggtggggagtgtattttagattggggaatgctggagcagaggcttgattgcaggaaggagcagggcatggggcatggggttatctgggaagaacattaatctctgaggcaaaaagaggcttgtgtgttcacagcagggccaggtggtcagtgtggctggaacacaaagagtagagggaatgaggagtagaaaatgagttcagagaagctgttgggactgtactatttaagcctggataacaactttgaattttccagggagtgttatattccatcaggttggcaattcttaccatatttttctgattttcccccaccctgtgtgtcgcagtgctgagttcagagcagatacatcaacatgactttggttggctgtttttgggaaatactacccgttctttagcttgactaaagactcatgagttagccaaatattctgggtgcatataaagttttcttctggcttgtagatgcttccaatctgcagagttgaccctgtcacatcaggtgtgactaacataatggctcaaagaaaatctacctgtgtctagtttctgagggtttcttcatctgaatcagtgtatctatgccataatatatgtatctacttggacttgacatctccctttgcccagcttgtttaataaattctgctcaatgaagataaaagcctctattttattggcgagtacaaatggactcaactagactacccaattttaaacaactacagaatcacttgatgtaaatgttttatcaatggcaatgatggtgatcatgaaatattgttactccttgataccaatttgattatcatcattacctaggatttcagactttggaccatgaagaccagattgctttgctgaaagggtctgcggttgaagctatgttccttcgttcagctgagattttcaataagaaacttccgtctgggcattctgacctattggaagaaagaattcgaaatagtggtaagtgatttggctaatggtaaaagagtttgtttctaggagtaaaattggtgtgcttcatgagggtggggctcttgccaatcttatgcaatgttatatgcctgttgtgcctagcatgaagaatggctctaaaaagatatgtgttaaattgataagacttctagaggcttggttcaaatatctctgttgtaataacaaagtagcaaaactacccctttactgcactaagatgaagagccaaaggaagacttttttaaagattggaaaattcatctgattttgaacaactagcacaaaggagctaggattcttcagccaagaaaaagattatttaaaatcttctggtatgtaagactaagtatccagctattatatatctgtatcaaaataaaataagaagacattttaatagcaacatttatatgtcatttactaggtctcagacacttttctttcttttttcttcctttcttttttttttttagacacagtcttgctctttgcccaggctggagtgtagtggtgtgatctcggctcactgcagcctctgtttcccaggttccagcaattcttgtgcctcagcctcccgagtagccaggattataggcatgtactaccacacccagctaattttggtatttttagtagagacagagtttctccatgtttcccgagctggtctcaaactcttggtctcaagcgatcagcctgacttggccttccaaagtgctgagattacaggtgtgagccaccgtgcctgactaaagttaactttttttttcttttctttttttttttttgagacagaatcttgctctgttgcttaggctagagtgcagtggcatgctcttggctcaccagtttcccctgggttcaagtgatttttttgtgcttcagcttcccaagtagctgggactacaggcgcatgccatcacacccagctaatttttgtatttttagtagagacagggtttcaccatgttggccaggctggtcttggactcctggcctcgagtgatccacctacctcggcctcccaaagtgctaggattaaaggcatgagccaccacacccagccggtttcagacacttttctaaatatatgatttcatctaatcttctcaaatattctatgaataaatactattatcattcccatttttcaaatggaaaagctgagacagagaaaggttaaataactttcccaatgacagagaggaagtctgacttcagaagctttgtgtcagcccaatgcagtggctcacgcctataatcccagaactttgggaggcagaggggggtggatcacttgaaatcaggagttcaagaccagcctggccaacatagtgaaactccgtctctactaaaaatacaaaaaattagctgggcatggtagtacgtgcctgtaatcccagttactcaggaagctgaggcaggagaattgcttgaacttgggagatggaggttgcagtgagtcaagatcgtgccaccacactccagcctgggcaacagagtgagactcagtctgaaaaaaaaagaagctttgtgtcttaaccactatgctatagtacctctcaagagacgagataatagcacaagttactcagtgtttaacttattgtggaataacactgtgacagggaagctcaagagacattgagatgaattaccaggaattctgtgcaatttatcttaggagatccttaagataggatgagttcttattttcccgagagatttcatatatgggttgggagtggggaatgaatgagatgacttctcaggatgttttctttctaaagtcttatcattaacaaaagcaaatttaaagacttttaaaaccgatattttaagatagagattagagggaaagttttcaggtagttctgcatctgtgatataagtgaaataattttttaaatggaaaattatttttaaaggcagtttctccatagtcattatgtttttttcctagttaaaaacaaaaagcataattagcatcattggtagatttaaaaaccacacactttaaaaagatgcattattcttaatatattaatttactagtctaacaaatatttaagggcaaggtactatggtagcagtgaagagagaaatcaagcatgttctttcccctaagaagcttacagtctaatgggaagagattaactgtccatgattatgataaaatatggaagagaaaaacagagagatgatgactcctagttgagagagctccgaaaaagttttattggcatttgagctgggacttgaatgagatttgatttggatatccagggtgcaagagagaaggaccagcaggagcaaagagaaagaggcaagaaagctcagggaatgcacacaaagaagggtgagtagctgagctgactgaattgagggttacattaaagggaaatagaaaggaataaaagaatcagatgattgagggccttggatgctgggctaatgattttgttatttcccaagtaataggagagatggaagatttttgagcagaggagggaaaatgtcaaaattaagctttacaaattttctagcagtgttagggtaagccagaacagaagtcacctcttaggaggcaagaagtctcaaagatgtcacgcttgctgccaggagaaatggagagaagagaaaggatctgggagatatatcttcgtggcttatcaacttttgaaagacattatgttgtcaagaaatatggattttggttctggacagattgtgtgtgtgtgtgtgtgtgtgtgtgtgtccaggctaaggggaaaatgttgaatcaggtaacctccaaggcaccattcagttctacaagtcttactgcttttcctctcttaaataattcaattttcctgatgggtggtttagctagtcactaggccagctactgaagtatcctgattttaaagccataatcaataattgacagttcaacttaggaaagaattaaaggacaggctgaattttcacatgtatgggtataattgttgttttagactattgaacatacactggtggttctctctttatgcagaaaactacaatggcttcaacaggttcagcagcttagctttgtcatttatttgattctggcttccatggactgtggcggtgctccctttaagaaaatcccagttggccgggtgcggtggctcacgcctctaatcccagcactttgggaggccaaggcgggtggattacaaggtcaggagatcgagaccatcctggctaacatggtgaaaccccgtctctactaaaaatacaaacaattagtcaggcgtggtggcgggtgcctgtagtcccagctactcgggaggctgaggcaggagaatggcgtgaacccaggaggtggagcttacagtgagccgagatcacgccactgtactccagcctgggggacagagtgagactcggtctcacaaaaaaaaaaaaaaaaaaaaatccatcagtcaaatctaattcttacaaaactaataaaataaaaaggaatgatgactcatgacaaaacttattcattttactgacaggtctctactctagggaatgtgtgtttggtttattcatcaagagacagtggtgattaaggatactgactgtggaatctggattgaatatgggccccactacttattagctacatgtcccatttttttaaagctgttgaaatagacttcataaccaatttgatctctttgaaatcatgtttaactttaatatttattctgcagtcttgcctcaagtttgataataaaatcttgataagacagggttttcttctttttgagtcagtattttatcccaagcacctagcacatgcctggcttggactgggtgctccacaaaattctgtggaataacgaaaaaaatgaatgaaggtttgtccggagctataaaactggtctgtttatttacttttcagatggttgtttccctgaatatcagagttgttaatgtccaaagctaacaagtaaccaacaaaaagttggttaaacattcttctagacattgcctgtagtagttaatttggggaacagatatcttttttgcatttgagtgtaagaaaaggaaaaagacagtttggatatggaagttctgttgtgttctctctcctcctcctcctcaaagatgagtcatttaaagttgattcaggtgccagacaatgaaaaagaggggtgcaatgtctgccatatgaattgaaatgttttgatgagagggcatctgcaggagaattatctggtggttgttctatctttctttctctgtctctttttctctcctggatgctcagcttcctttaaaaaaaaatctttgcctggctccatcagatctcctgggtcctgagccaagtcagatgctgccatttccatgatgaccactgggttagtaccagattccttccccagcctggctgaggtggggaaaatcccttccactgtggttcagctaaaaggggaaaaatagtcttccaaaaaagtttacaaggctactaagaggagaattatgtttatagaaaggcatatataaggctgagcatgctgactcacacctacaatcccagcactttgggaggccaaggcaggaagattgcttgagcccaggaatttgagaccagcctgagccacagagcgagactccatctttacaaaaaagttaaaaaaattagctgggcatggtggcatgagtctgtaatctcagctagttgagaggctgaggtgggagggtctctagagcccaggaggtggaggttgcagtgagctgagattgtgccactgtactccagcctgggtgacagagtgagaccttgtctcaaaaaaaaaaaaaaaaaaaaaaaaaaaaccaaacggggggcatatatgcgtaatgtctggatctattaattacggcaccagaaagataattattcagcacctactgtgtgtcaggctgtattatcagtgtttgtgtgagctttgggtcctacaagaagcagatatcaacatgggactaaatatgtcagaagttaattgggggaaatgcctctgaagaataaagggggaggaagcaggtggagtccaggagactgtacactactatgctgatctgacacctgtgaaagtggagcaggaaggcatgattgggcatgaagagcatcagatcacagcacagtcctgagaaagtctcagctaggccattggagagggacctagtccgagctgcccactgaatggacaagcactaacacacccactatgctcattcaccagttgagacaagactggtgaaagtgtgtcctcagcactcacagggcggcagctggaggctatcagccagccagactccctactgtgggctgtctttaagggtgatctgagtgggtcatctccatggctaacattttgcttcacgaaaaatattgtttgctctttgtagcactttgaggtagatattatcaattctatgccagacctagaccctgttaatcccaataacaaaatatcagtcccaagtatctgttccctctgatattactctctaactttccagcttgccaccttccagtaccctgactctagggattctttgttccaaatcaacgtccattgccgggcgcggtggctcatgcttgtaatcccagcactttgggaggctgaggcaggtggatcacgaggtcaggagtttgagaccagcttggccaacatagtgaaaccttgtctctattaaaaatataaaaaattagcctggcgtggtggcaggcacctgtaatcctagctactcaggaggctgaggcaggagaattgcctgaacccaggaggtggaggcagcagtaagccaagatcgtgccactgcactccagcctgggtgacagagtgagactctgtctcaaaaaacaaacaaacaaacaaacaaacaaaatcaaaaatccatttgttgaccctccatccactaaccctccagccattgactctacttccttttgcctgaccacactttcctcagtacttggcttagagttcgtggttcatcaatatgatcatttccttagatcattcaccagatatcctcaactctttgtctttctttcacctaagaaaaccctctgcctgactgagtacgactcttaacctactctgtgcttgagcctgagaactgaaacagtatgactggcttacccaaagttagtgatcaaacacttcaggtggacctcagtactttccatgtatcccttttctctagccaattcactcttatacttatggaaaattgtcttgtaccttctctttcttcaaatttccaacatctcttcccactcattctcaactataactttgttgagaaaaggtgtctttcaagaacatgccataggagttggagctcaaggatatgtggtcaaaccccagcttcaaggaaatgtaatcaagcttagagaaagatgaactccccgagcttagtcaatatgtcaagacagagattgtcacaagaaacaaagctggagccaagttcctagaattagatgcacacagagctccccagggttttctgagagttgacttcatccacatgatccactatggctccctaccattttggtaacattccagcaagtggggagggcaaaggggaaaaagagtggcacaccttccctttaaaggaataatcctgaagtggtatgcacaacttcacagagttccccagagttttctgagtctgggtcagaattgaaacctgttgaggcaagtggtgtggttctagccgtgaagacacaaaagcttccaaaaccaaagtcaggcagttacaccttggggctcccatgatttctggctgccacatattgctggagcctctctgtcacaaatcagctacctccaacagaagcaattgtcttattcctttgttttatttatttatttatttatttatttattttgagacagagtctcactctgtcgcccaggctggagtgcagtgaccgtgatctcggctcactgcaacctccgcctcctgggttcaagcgattctcctgcctcagcctcccaagtagctgggactaccggggcgtgcccccatgcttggctaattttttgtatttttagtagagacggggttttaccatgttagccaggatggtctcgatctcctgacctcatgattcgcccgccttggcctcccaaagtgctgggattacaggcttgagccaccgcacccggccctgttcctctttttattatattaagcactttataaacacttgttttttgcctgaagaatacttatgagctgagtgcggtggctcacacctgtaatcccagccctttgggaggccgaggcgggtggatcatgaggtcaggagattgagaccatcctggctaacatggtgaaaccccgtctctactaaaaatataaaaaattagccgggcatggtggcacgcacctgtagtcccagctagtcaggaggctgaggctggagaattgcttgaacccggaaggcggaggtttcagtgagccaagattgcaccactgcactccagcctgggcaacagagcaagactccatctcaattaaaaaaaaaaaaaaaagaatacctctgatgatcagttgtagggtagagatgatttgcatcccctaaaccttcagaacaggcaaggctttctgactcatgtcatctctcatcagaatatctcctcatatttctcagggtggtggctcattagcctccctcctctcacttgatgagacacttagcttcgaatcttatcattttcatttgactctgcctgtagggcaactatccggtagcaatggaagatcatttccattaggacctgtatttgtttatttgtttacttttttttaacaagcttttattgagtacttctatgggataggtacactggcggtacaaagatgaataagataaagtcataatcctcaaggacttcatcttctaggggaaatatatttgaaaagaattaatcacaatagatttcatgcataatttaagttagaggtttggctgctgtaacagagacaaaaaataaagagtgcttaaacaagatggaaatgtatttctatcttatactagtctgggcatgaggagaatgggactgatagggaatcttcatagtgtccctctgtgtcatagttctatccatacagatggatgtcatgctcatccatccacagagagttgacttcatcttcttggtccagtatggctccccaccattttggtaaaaacacattccaggccgggcacagtggctcacacctgtaatcccagcacttcgggaggccaacgtgggcagatcacgaggtcacaagattgagaccatcctggctaacacagtgaaaccccatccctactaaaaatacaaaaaattagccgggcatggtggcatgtgccggtagtcccagctactctgaaggctgaggcaggagaatccctggaacctgggaggcagaggttgtaatgagcacagatagtgccactgcactccagcctgggcaacagagtgagactccatctcaaaaacaagcaaacaaacaaaaacacattccagcaagtagggagggcaaaggggaaaaagaatggcacaccttccctgtaagtgaataatcctgaagtgttacacataacttctactggcattccattggcaagaacttaacttcttcatcacaccttgagacaagagacctgtaaagagaactactaatgcaataactgggtgagaaatgatgagggtcttgctggttagaatgcatataatcaaaaagaaaaaaatcttccatgtaatttcataagtttcagaacttgtgatacctcaagtttcagaaaagctaaagaatgaagttttccagaatatgatctgtataaataaatatgcatgtttctagtttataataagatactttctccaaatatcaaccatatattgtgacaataaaaaccatccaaactcacatgctgctgcatattttatctataatgttttcatttattaatatttatgaatttccttctcccagtgggttttcagaacattgcctcttccacacaacacataaaaacctgatctcgcaagatgacctttcagactaactttttattcttatgctaatacaatcattcttatttctattatacatttaattccagagtaacataatgctcaaagttactctgtttatgcctatgcaactctttaaagaatatgatgtgaaatctcttttcttgttcttcaaattcatactcttttgtttgctgttattaaatcccaatcacatacacaaagataactgtctctgagatgcttttaatgagaattagagtatttatgttaattgaggctttagaacgtatatctgatataatttgtgcttgagttgtttctatacaattctagtgcatcattgattttattcctaatgtaccattacttacaaactaggggtttaagttggaattgttaataaaaataggaataatcatagtatataaaatattatagactgaaataggtttgctaacactgaatgagtttatattttgttttgttttgattttttttgagacaaagtttcattcttatcgtccaggctagagtgcaatggcacgatctgggcttactgcaacctccgcctcctgggttcaggcaattctccagcctcagcctcctgagaagctggggttacaggcgacaggcaacatgtccggttaattttttgtatttttagtagagatggagtttcaccatgttggccaggctggtcttaaactcctaagctcaggtgatctttccgcctcagcctcccaaagtgctgggattacaggtgtgagccaccgcgcctggcccaagtttacattttaacattaaggaaattagcaataacctctcagagatcaaagcaacttgttctgtccatttcaaatataaataatccctgacatttatagtagttttgggcctttttccatccccacaagggacataaataaaatattcaattcagtaagaatttaccagtatgacaatatatctcatgttttgcaatgttttgttttcacatgcattatcctgttagtgctgctcccaatggccctcactaggtgagtgttatttataaaatatcctattttatagatgtagaaatgggcttagagaggcaagatgacctgctcaagttcatacagctaatcaaaagagtgcgaggaaattaaggtgggtattctaactcagagcccagcactctttctatatgtggcatctgtcactcaccaatttctaatatttgcccaactatctgctagcagggaatataaagtaaaacatggtttctgcccttcagttgagagataaagtataagcagttgttagcaatttcaaattgctttaagtcagtgatcaaatgaatagacaatgaagtcagagaaaggagataatcttgttagggtgatgaagttgtagcccttaatagtaccatactaaaatatactgtgcttatttttgttatatgatttcactgctttagccttttcagcttgcacaaaatgaaaacagttaccagaactatgttttccaaagatgcaaatctaagctgattatcagttcagatactgtctttgagaggggttagaaatgtaaagaaacaaatgatagactatttataagaagggtaaatgctttagttaaatttagaaatcttaacacctctacttttgcttttgaaagtggtcacatgctaacttttgcatgggcaaatttaggactcaaattataggaagaaaccttccttggattaagaggaaacattaaagaaatacaagtgaggttatttccattgcccctaggcagaatccattgttcctcagctgtatttcccaagctttttgtacttgctcggttttagatattatgtatttatttatgtcaagtcgccccttggtatccacagaggattggttctaagatctctcttggataccagttaatggctgctcaagtccctgatataaaatacaacctttgtatataacctatgtacatcctgttgtatactctaaatcacctccagatgacttataatacctaatacaatgtaagtggtatgtaaataattgcttcactgtattgtttagggaataatgacaagaaaaaagtctgtacacgttcattacagttgcaatacttttcccaaatatttttgatctgtggttggttgaatccatggatacagaacccacagagagttaactgtatctgcttcttccattaacctgttaattgcctgaggacttcatattcccagattcccagcactaatatagtgcctgacacatagcaggaatacaaatattggtgaattttgttgagttgaatctggaacttgacagtccaaactctggtaactcctaagccctggtgagacctaattaggccggatagtttttagccactaggactaatgggaagcatatcatgtattatatattttaaattaaatattttatacttaaagtagttcttttttgaattgctagtttgatggcagctgtttacttaggaccaagagtatggcacaaatgactccctggggaaagtttagcagttgaaatagaggacatagtccaatctcttagcaccacaagaatatgtccattgccttaatggcatcccttgtccccatcacatctcacaactatgtcaccttcatcataaagaactacgaaaacatactactgcctgatttaacatgcatttattaatctcctattatgtcttcagaaggatgctagttattagagatgcagaggtgaataagaaatatctggccagtcacagtggctcactcccataatcccaacatttaaggaggccaaggtggaaggattgcttaagaccaggagttcgagaccggcctagaatacatagcaagtccctgtctctacaaaaaataaaatgtctggatgtggtggtgcatacctgtagtcctagccactcaagagactgaggcaggagaactgcttgagcccccaggaggccaaggctgcagtgggttatgattgtgccactgcactccagcctgggtgacatagccagattctgtcataaaaaaaaaaaaatctatggagcaccctttatgggtcaggcagcatggcagccactggagataacagtaactgattcccactcttcttttttttttgagacggagtctcgctctgtcacccaggctagagtgcagtgcagcgatcttagctcgctgcaacctccgtctctcgggttcaagcaattctcctgcctcagcctcctgagtagctgggactacaggcgcgtgccaccacacctagctaatttgttgtatttttagtagagatggggtttcaccgtgttagccaggatggtcttgatctcttgaccttgtgatccgcccgccttggcctcccaaagtgctgggattacaggtgtgagtcactgcgcccggccgattcccactcttataaaatgtatatggtatttcacactccagtgagaaggagagatatgaattgtgataagttgcaatagaactgaacctagaaaaggaagtaactaattctgcttctctgtgacagggaaagctccatagaggaagcaaaatttgaacttggccttgaaccatggatggggtgccttagtctaacagggatcctgccttgtatttcaggaaaaagcatgaagacataaaaagtgtatcccacttgttaggggagctgtcagaatgctcttggccgatagctacagaaaataaactcattatggcctaaaaaagtaagaaaatgtatgagctcaaacaagaaacccagaggaagggtgacagcagaattggttaatttaggggcagaacccaccatcggaaacacagatccatctcatctttctgctttgctatccttggcgtattgaccttccccacaggctggttctcctcctggtcatctaatggccacagcagtgctaggcactatgtctgggcacaacactggtcaaaggaaaaagaaatgctgtcttcctcagtatggaaatctttcttaggaacttcccagtagactcccctttagtctcatgggcccaaatttcactgctgtccctaactacaccaacctctgatgtgggaaatgagaccaacagtggctggaccttgggctggagctgggatttgcctctaccatagtgtatggccatggggcagggagggggaagggagcctgtgcaggcaacaagctgaatcagctttaggagccttagatgaatcggtgttattagttcctagggaaactattgggctgctgagagattagtttgaaaggaaagcagaaggcagatgtggctttgtgtgccgtgtcagggatttataccttgacctctgtgctatggagtgatgtcatttctagaaaagtttcaagttacatggttttaaggaaatagtatcatttttaaccagatgctcagtccatcttgaggacgtcatcagaataagtcatatagaggtatttaagatactaggatatatgtctagtgtaatatgcatacttgtaaataacacacacacacacacacacacacacacacacctgcttcatttttgttcccaattacgactagaaagctaattaggaaataaaaacttttaacatttaaaacacctaaagcagtatagtgttaattctatcaaatggttattctctcaaagaatatttctgatcattgaacataatttattaatcacagacctctttttaaaaaagggaaaacaaataggaaacaggagcagaaacataacattatttttgcattttcagacttttccatggcaaagtctttggtagttaagttagaaaatagcccccccttgtgaccaaaaatcaggtaattggtcattcaagcgaaaatgaagcaaattttaagcaattctccaggaagaaggaagcaggaaaacaggaaaaggctgtccccttcaggatgatgttagtgttacatctccagtgttagaaattgctggttcacaagccctttgtttatgttggcatggttaactctgattgttgactctaattccaaaagtagatttatatttatctatcttgtaggaaaattattttttaactctcccattatttcttttttacattttctctatattcactcttggcttttacaacatgcacaagatgaaataatcattttaaaaactttaaccttattttccccaaatgttatcaattgtaattagatagctaatggaggcaacatctctggagggtgtgtggggatttagaaaggcaaatgaaataggaaatttggtaatcaaagaaatttctaaaaattttaatattttcaaatcagctgtcttgaatatccctaaatcttcatgtactatttaatttaatggcatagccataaattattattttaggtaaccacaactgaggagtgtagtctctgaatgctgaagaaagcataaagattgacatttttttgaagatgaaaaagaacagccttaccaagaaaatagagaacttagtttagctttaatacctggaaaaatactgaagcaaatcactgatcagccagtttgtatttatccccagtaatttgcagaatttgttggttttttaaaacctacatggctttgtaaagacaaaagttcacacgtttaatctaagacttaagatgaactgaaattaagatggactaatgtgttgattcagttctcctgaataatgataataatagctactattataattatctactctgacatttattgaggatttactatgaacctggaattgtgctaagcactctctatatatctcatataacactactgttatatggagtacacattatattacacgtgacaacatttcacagatgagaaaatgaagtcttaaaaaatttaagtaatgtcccaagaccaagtcgtggagtttggtttcaaactcagagctagcttatgacctcttaaccactaggtttgctggaagccaggactggtattctccaggctcacattctccaatcctctgcactttaagttgtatctagttgggtcatgggtatttagttcattctgtaacagctggataaagggcaatcttccacatgatgtaatccccaaattgctcaacaaagacattgttgttaatagagtccactggggtcaattaaaaaatcaaagtcaaaggggagcagagggtggtattttgaccagagaggaaaacggcaaggatttaatttgggaagactgttttttaaaaaatatttaaacatttattgtgctcaaaatttaaatccaaaaaaattaaataaatcgtataattctctttataggctgggtgcggtggctcatgtctgtaatcccagcactttgagaggctgaggcgggtggatcacctgaggtcgggagttcgagaccagcctgaccaacatggagaaaccccgtatctactaaaaatataaaattagctgggcatggtggtgcatgcctgtaatcccagctactcgggagactgaggcaaaagaattgcttgaacctgggaggcggagtttgcggtgagcctagaccgtgccattgctctccagcctgggcaacaagagtgaaactccgtctcaaagaaaaaaaaaacaaaaaacaaaaaacaactctcttttaaagtacaaaataattcatcaccttcctttattatttacccattatttcatctaaatgtttgtagctaagattttcttaaagcaggttacccatgattacagctgcctgagaggcctgtctcgtggcatgtatatatgtttcaccaaaggcaatttgggaatgtgtgttggatcaagattcagataatgtagacttgggttttccatttattatgccagtaaacttagtcaactcagattacccattctgagccttactttctcaagtctgaaatggggatagtaatactggcttatcagtacttcctgcacaggattgttgtacagaatcaaattcgtttatatatttgaaaaatatctacggaagggatgggtgtaattattgaaaagaagaaatcctagcatacttcgggatcttttactaccatttgcatcactgtaagatagagaaaaatgagagctgtgtccatgcatgttagaagtaatttttttcctttttgtattcattttattttaattttttttacattttattttagattcaggaggtacatgtgcaggtttgttacatggtgcgttagtctgttttgcattgctataaaggaatacctgagactgggtaatttataaaggaaagaggtttatttggttcatggttctgcaggctgtgcaagcatgacaccagcatctgctcagcttctggggaagccccagggagcttttactcatggtggaaggtgaagggggagcaggcatgtcacatggtgagacagggagaaagagagatgctaggctcttttaaacattcatatttcacagtaactaataaagtaagaactcattcattaccatggggagggcaccaagccattcatgaggggtctaccccaatgacccaaacaccttccaccaggccccatctccaacactgaggattacatttcaacatgagatttagaggcaaaaaacatccaaactatttcacatggatatattgtgtaatgatgtgatttggacttctggtgaacgcatccctcatccaaatagtgaacattgtacccaataggtaatctttcaaccctcaccttcatcccaccctcctgccttttggagttgccagtgtctattatttccatttgtatgtccatgtgtatccattgttcagtgaggacatgcggtatttgattttctgcttctgagttatttcacttatgatactcttctaacagtgagaatttaggctttctggtaagtataccttagatgataattgtactctttagcgtctggaatcaaagtttattctggtttgctcagccaaagctctttaactctggatctggtttggaagaaatggagcagtctattctcatctggaccaatcccaggaaacatcctcatctcaattaatccataagtcacatcacaggtttttgtgttggttttgttttgtttttctgtcaccacgattctccatccaatggctcttgtggaataaagcaatgcacagaagtggcactaagaagtctgttttttttgtttttgtttttgtttttagagatagcatcttggcccgggcgtggtggctcacgcctataatcccagcactttgggaggctgaggtgggtggatcacaaggtcagggtttcgagatcagcttggccaatatagtgaaaccctgtctctactaaaaatacaaaaaaaaaaaaaaaaaaatcagccaggtgtggtggcacacacctgtagtcccagctacttgggaggccaagggacggaggttgcagtgagccaagatcacgccactgcactccagcctgggcaacaagagtgagattccatctcaaaaaaaaaaaaaaaaaaaaaaaaaaagagacagcatctcactttgtcacacagactggagtgcagtagcacaatcacagcttactgcagcctcaacctccaggcttaagcgatcctcccacctcagcctcctgagtagctgggaccacaggcatgtgcccactgcacccagctaacttttgtagtttttgtagagatggggttttgccatgttgcccaggctagtctcaaactcctgagctcaagcaatcttccagccttggcctccttaagtgttgggattataggcgtaagccactgcacctggttagaagtcttaaatgacaaagaggagtgagctagataaaagagaaaagggatatttcaagtagagagcacaacatgtacaaaaactgggcaatgtgaattgtttagggaactacaagtggccgaggtggctagaggaaaggcagtgtgatagagtgatagagtgcagcttagccgtagccactgtcaggactttggagcctgccagctttggtttgaaacctagttccacctctctcagccgagtgcctttgggctagttatataacctctctgtatctacctcacggggtttagaactattaaatgaattatggtatattaaatgcttaaaatattgcataatacataatgagtactcctactattactattgttattgtgaatagttagataggcaggggacaggtcctagaggctcctacgttaaaaggaagaaaattaaaactatatgcctaaagccatggggaggtttagaaggtttttgtaagaagtagagagaaagtatgtgatgtgatctgatttttagaaaggtcattccaatgagaggtgacagcgtgctggcagtcctcagagccctcgcttgctctcggcacctcctctgcctgggctcccactttggcagcacttgaggagcccttcagcccaccactgcactgtgggagcccctttcagggctggccaaggctggagcccactcccttagcttgcagggaggtgtggagggagagacgcgagcgggaaccggggctgcgtgcagcgcttgcaggccagctggaattccgggtgggcgtgggcttggcgggcccctcactcggagcagccggccagccctgctggccccgggtaataagggacttagcacccgggccagtggctgcggagggtgtactgggtcccccagcagtgccagcccaccggcgctgcgctggatttctcaccgagccttagctgccttcccgaggggcagggctcgggacctgcagcccgccatgcctgagcctcccacccactccatgggctcctgtgcggcccaagcctccccaacgagcaccaccccctgctccacggcgcccagtcccatcgaccacccaagggctgaggaatgcgagcgcagggcgcatgactggcagacagctccacctgcagccctggtgccggatccactaggtgaagccagctgggctcctgagtctggtggggacgtggagagtctttatatctagctcagggattataaacacaccaatcagcaccctgtgtctagctcaaggtttgtgagtgcaccaatcgacactgtatctagctgctctggtggggccttggagaacctttatgcctagctcagggattgtaaatacaccaatcagcaccctgtgtttagctcaaggtttgtgaatgcaccaatcgacactctgtatctagctgctctggtggggccttggagaacctgtgtgtggaaactctgtatctaactaatctgatggggacgtggagaacctttgtatctagctcagggattgtaaatgtaccaatcagcgccctgacaaaacaggccactgggctctaccaatcagcaggatgtgggtggggccagataagagaataaaagcaggctgcccgagcccgcattggcaacccactcgggtccccttccacactgtggaggctttgttctttcgctctttgcaataactcttgctactgctcactctttgggtccacgctgcttttatgagttgtaacactcactgcgaagatctgcagcttcactcctgaacccagcgagaccacgagcccaccaggaggaataaacaactccagacgtgctgccttaagagctgtaacactcaccgcaaaggtctgcagcttcactcctgagccagcgagaccatgaacccaccagaaggaagaaactccgaacacatctgaacatcagaagggacagactccagatgtgccaccttaagagctgtaacaccgcgagggtccgcggcttcattcttgaagtcagtgagaccaaggacccaccaattccggacacaccaatacgtggatagggatagatcaaagggaatcaaactaaagataggaaggccagtaaagaggcaactgcagtaatccagaggaagagagatggaagcttaaattaagtaaatgccaggtgcaataaagaggagagggagcaccaggtgagagtgaggaggagaagccacaggcctgggtgcctgaatctcagttgtcaggcctgggcagttgagtggtgtggataccactcaccgagaatgggaacgccaggaaagaagtggatttggagaaacgtgggggagcttagttctgtggtgtctttgattttggacatactgggtttgaagagaacagccaattactgatgcttagtaggtaatggcttggtgcttcaggaagagatcagaaccctttgataagaaccctggcctggctgggcgcggtggctcacgcctgtaatcccagcactttgagaggccgaggcgggcggatcacgaggtcaggagatcaagaccatcctggctaacacggtgaaacccagtctctactaaaaaataccaaaaaattagccgggcgcggtggcgggagcctgtagtcccagctactggggaagctgaggcaggagaatggcgggaacccgggaggcggagcttgctgtaagccgagatcacgccactgcactccagcctgggtgacagagcgagactccatctcaaaaaaaataaaataaataaataaataaagaaccctggcccatttagaaatgaagctgtctatacttccagactgaataacaaccactttttgttagttgtttaagatgtgatctctgccttaattatcgatagtcatattcaaaagattcactaaatcccatctggaaaatggagacgtttttgagattcttttggcaattcaagagcattatcattgattattagtagtgactgaaacaaagacactgacaaaattagacatacactcattacactcattgttttggctatattttgagaattttgtcaactgattgtcttcacaatgtccttcctttggacatataataaaaataatatagtcattatttgaatgtgtgcatatagttgcaaaattaccatgtgtttatatgtataatgtgtttctagttttacactgtttagtcactcaaaaattgtattatgattgcaactttcccccacaggtatctctgatgaatatataacacctatgtttagtttttataaaagtattggggaactgaaaatgactcaagaggagtatgctctgcttacagcaattgttatcctgtctccaggtaattccaatgttacattttaatttttatgccatttttttcagtatactagtaataacgtttattgaaaaaaatctggaaaacatagaaatataaagaaaaagtaaagtagcctataattctgctatccaaatagaaccattattaacctttcagtgcacttcttttcagtctttttaaaaaatatcacacttattcatttaataaatgtatattgaacacctactatgtactaaccatgatgctaagcaccggggatgcaacaagacacagctcccatgcagcttgcattctggtaggatgagaaagataataaatgaagaaacaatattttttcagaaggtggtaaatgctacaaaaaatataatgagaatataaagaaagagagtggcacaaaaatggtattttaatttgtggtcacaggaggctttttttaagtgggtggcattggagcagggatctaaatgaaattacatactttttaacataataaggaacttttttctgagtttatatttcttctaaaagtcatttcccaagtcattaaaaaattacattggtaaagttgtaatatgtgctacatattccattgtatgaatatacaatcatttacttaatctttaccacatgtttgtatattcaggatatttccagtttttttgatgttgaaaatgtttcttcaacagttttttttggttgttgaaatgatacctctttccatatttttttctatattttttggttactttaataatttgggtgtcgaatgatgccatgctcatgatttgtagagcataataacaatgttagccttaggccatttttatacattatcttgaggcagaagctagttgttactttgctttaccataaaaattatgacttgtgactaaaaaactattcagcagaaccttctaaagttatgtatggatatgtcctatgacccagtgatttcacttctgagaatatactcaacagaaaggatgctcacgtccaccctacaggttatctttaggggttttgattggaaggggaattgggaggcttctgggaagcattacatgtgttgtatcttgatctcgttataattacgtgtgtgtgcataaaaattcatcaggttgaacacttaattttcacattttgtgtacaacatttaacttacacttcaaaatagttaacgttgctataattatgctgaattaatgcttttccactttttaattttgtcattttattttaaacttcaaaacagatagacaatacataaaggatagagaggcagtagagaagcttcaggagccacttcttgatgtgctacaaaagttgtgtaagattcaccagcctgaaaatcctcaacactttgcctgtctcctgggtcgcctgactgaattacggacattcaatcatcaccacgctgagatgctgatgtcatggagagtaaacgaccacaagtttaccccacttctctgtgaaatctgggacgtgcagtgatggggattacaggggaggggtctagctcctttttctctctcatattaatctgatgtataactttcctttatttcacttgtacccagtttcactcaagaaatcttgatgaatatttatgttgtaattacatgtgtaacttccacaactgtaaatattgggctagatagaacaactttctctacattgtgttttaaaaggctccagggaatcctgcattctaattggcaagccctgtttgcctaattaaattgattgttacttcaattctatctgttgaactagggaaaatctcattttgctcatcttaccatattgcatatattttattaaagagttgtattcaatcttggcaataaagcaaacataatggcaacag

SEQ ID NO: 18 - DNA, 3962 bp, Homo sapiens
tagaattcagggatcggtgaaacaaaagacatcgcatcggcaggtctgtttgcaacttctgggatacaccaggtgttagcggtgatgacttctggatgcttggactgtggatttttaaaatggttttatctgctcatctgtatttctaaattttcaacaatggaacatagattattgtattattattataataccccaaacctatcttcctctcagccctctttccacgagctcttaccctaaatgtctctttttctgtcagtggcattgtgcgtcttccttagtgcatcacctctgatcttcctgtagaattttttttttttttgagatagagtcttgctttgtcacccaggctggagcgcagtggcctgatcttggcttactgcaaactccgcctcctgggttcaagcacgtctccctgcctcagcctcctgagtagctgggatcataggtgcctgccaccatgcctgactaatttttgtatttttagtagagacggggtttcaccatgttggccaggctgttctggaactcctgacctcaagtgatccacctgcctcggcctcccaaagtgctgggattacaggagagcgccacggcgcccagcttacaccagactactttttaaaatgtttttgtaaagtcagggtttcgccatgttgcccaggctgattttgaactcctgggctcaagcaatccttttgccttttgactcccaaagtcctgggattacaggtgtgaacccctgcagctggcctcaatgttaagatcttaaggggcacagcacagaccttgtcttgtctatctccctggcacctctcacagagtacagcttattaacagatgttccagaaactgttactgaacattcggcttgatgctgtgggcttgtctgcatcttgcaactgtcacctggctgagaaatttcttctataaataagcagtttctgtttcagatgtgatatgccctgatatttacaccctgtctcttaccccatccaagactcaaacttagaaacttgaattagatgtggtattcaaatccttagctgccgcgaagacacagacagcccccgtaagaacccacgaagcaggcgaagttcattgttctcaacattctagctgctcttgctgcatttgctctggaattcttgtagagatattacttgtccttccaggctgttctttctgtagctcccttgttttctttttgtgatcatgttgcagatggctgggcagtgctcccaaaatgaatattttgacagtttgttgcatgcttgcataccttgtcaacttcgatgttcttctaatactcctcctctaacatgtcagcgttattgtaatgcaagtaagtaatattgcttgaacgattattcattggtgtgaactattctgtctatatggactgcttattcagagaatcaacataatgggcatgatggtgagttttcttgaatcaaaaagagaaaggaagcaaggcagtgattttaatgtttatggaaacaaagtaattatttggaactgaacttgatatgattcagcactattagcaacatagattttttttaaaaatcagctcttctaattaagtgatatttagaatttaaaagtcaatgttcattaattaaggtgattgaatggaaataatccatacttgattattttgctatcaaaacaatccataattcattattttagcaaaataatcaagtatgacagccgggtgcggtggatggctcacacctgtaatcccagcactttgggaggccgaggtgggtgaatcacctgaggtcggcagtttgaggccagcctggccaacctggtgaaaccctgtctctactaaaaatacaaaaaattagctgggcatggtggcacaggtctgtaatcccagctactcgggaggctgaggcaggagaattgtttgaacttgggaggtggaggttgcagtgagccgagatcgcgccactgcactctagcctgggcaacagagcaagactttgtctcaaaataaataaataaataataacaataaagtatgtgaatattatgttatcagctcattatctgtctgatgttcttttcataaaggtgtgaccaattcagtgaaaggaacgaatgcgattctctggacctgtttgggactgagcttaataatttctttggcagttttcgtgctaatgtttttgctaaggaagataaactctgaaccattaaaggacgagtttaaaaacacaggttggtttgatggtgaatctttgaaatctatttccaggggatggctattgtgagtttcagttccttttctttttttagcgttgactatttcacttcgttacagccctttcgaatgtgttagaacattgttacattaaatgaacttggtagaggtgagccatcttcattctgattttgacaccttggcagattttctacaatgtcagtcttctccaggattcttccactgttaattactctattgaaagtactaaggctttcttgggaaacatcagtctctttgactaaagttagcacatcgattaaatgccacattatcagaaactcctagccaggtctgctactgtcaggaaaagcatatttgtcaagatctatggtcatgtttttatacaaatataggtgttctttgcttgagtgaacattttactactgaaaaatgttagaaatgaataaccagttgctcctgaattatttgaggaatcatctaaaaaataattatttttaagcaatagagaaccagtcccagaaaaatgaatgttctacttaagtgcctcttaagataaaaatacttctgcagcacctttgctcatgattggattcccaagcatgtacagccactgccctatttctgtatgcatttatttatttatttatttatttatttatttatttatttagagatggagtctcgctctgtggcccaggctggagtgcagtggcgtgatctcaactcactgcagcctctgcctcttgggttcaaacaattctcccatctcagcctcctgagtaactgggactataggtatgtgccatcacctccgactaatttttgtactttttggtagagacagggtttcatcatgttggccaggatggtctcaagctcctgaccacaagtgatctgcccgcctcagcttcccaaagtgctgggattacaggcgtgagccacagggcccagcacatactcattcttttttactgaaaagatctgtttcaagctgggtgtggtggcatggagctgtagtcccgactgctctgtaggctaacgtgggaggattgcttgagcccaggagtttgaatgcagcctgggcaacacagtaagaccccacctctaaaaaatgaaaaaatctctctcacattgctttgagtcccgatgtgtactgctaagactctcatgaccacattctctgtgaagtttgggttaatgtttccgtttctacataattaggatcaggtctcctgggcatggctaacattgacctggaaaagagcaggactggtgatgaaattattcttccgagaggcctcgagtacacggtggaagaatgcacctgtgaagactgcatcaagagcaaaccgaaggtcgactctgaccattgctttccactcccagctatggaggaaggcgcaaccattcttgtcaccacgaaaacgaatgactattgcaagagcctgccagctgctttgagtgctacggagatagagaaatcaatttctgctaggtaattaaccatttcgactcgagcagtgccactttaaaaatcttttgtcagaatagatgatgtgtcagatctctttaggatgactgtatttttcagttgccgatacagctttttgtcctctaactgtggaaactctttatgttagatatatttctctaggttactgttgggagcttaatggtagaaacttccttggtttcatgattaaactcttttttttcctga

SEQ ID NO: 19 - DNA, 32892 bp, Homo sapiens
gaatctacatttttaaattttgtatgaataataaatgtatatgtattttgatataaaagcatattttggatcatctggacaaccacattataattgagcatttccactctatttcagtgtttcccttttaactgcttaagattatgctagatataaagggtattcaattaggaaaagaggaagtcaaattgtccctgtttgcagatgacatgattgtatatctagaaaaccccattgtctcagcccaaaatctccttaagctgataagcaacttcagcaaagtctcaggatacaaaatcaatgtacaaaaatcacaagcattcttatacaccaacaacagacaaacagagagccaaatcatgagtgaactcccattcacaattgcttcaaagagaataaaatacctaggaatccaacttacaagggacgtgaaggacctcttcaaggagaactacaaaccactgctcaaggaaataaaagaggatacaaacaaatggaagaacatttcatgctcatggataggaagaatcaatatcgtgaaaatggccatactgcccaaggtaatttacagattcaatgccatctccatcaagctaccaatgcctttcttcacagaattggaaaaaactactttaaagttcatatggacaagatgaaattaatgcttatcaccatctgaagaccaaatgaatttatgaacgaagagatatttcaagtatttcaatacaagaaaatggggggccaatttgaggttccacctgaggtttggcaaattgaaagaatatacacagccactgacagcccataattcatgttcctagggacatttagtttcagcaaaataatttaatgatgttaattggaattttattgactggtaggagctatgcaatagagaaagcagaaatctgatgaggaacttggagtatgctttgcaaagtaagatatacattttatctttactctccattataaaatagtcaataatatctacatcacttgctaatgcttttggtacaaatggatgtggaatataattgaatattttcttgtttaaggggagcatgaagaggtgttgaggttatgtcaaggtaaacaaaaccaccattgtggtaaagaccaccatgagggataactgaatatatggcttacaaaatgtttactgaataagcagaacagtctggattttcctgggcaggagggggttgggggctttgggtgggttggtgtccatggcttggtaaacatttccaagaagtaaacaaacctatcagcggccaagctgcttgtcacctgtgagtgcttccaaggaaccggatgtgggctcccccacccttaccccagcatctggcacagctgaaggcagatggaaatatttacaagtacgcaatttgagactaagatattgttatcattctcctattgaagacaagagcaatagtaaaacacatcaggtcagggggttaaagacctgtgataaaccacttccgataagttggaaacgtgtgtctatattttcatatctgtatatatataatggtaaagaaagacaccttcgtaacccgcattttccaaagagagaaatcacagggagatgtacagcaatggggccatttaagagttctgtgttcatcttgattcttcaccttctagaaggggccctgagtaattcactcattcagctgaacaacaatggctatgaaggcattgtcgttgcaatcgaccccaatgtgccagaagatgaaacactcattcaacaaataaaggtaagttcatagtaattatccatacttttttaaaaatagcataatgttgtgatagagagaacatgagtgccctattccagctgcacgacactggcatgtatttttatgtctaagtctcagtttcttcatctgtaaaatggaaataataacaagttaaccattaggattcttgtgtcagataagataatgaatgcaatgcacataactcagagtgatatactgttggcaactgataaatgataaattgatatgtactgctgtggattatgtcactgaaaattatttagttctatagtaaggcagagtcagctacatttgacagatattgtgagatgcacagatcctttgcctgattttacccttggcacgagtcagactctccttttattctcctaataggaacccccttccctgtgatcctaaaaggagccccagatgcaaatctctgatataagaacaaccctgaccttctgatgggagaaaaccttgcattttatcagtcccaattcaagggatcctttcagagatttcttgctacctcttatgtagcagaagggaaaggaagaagacttcctgtcctggcaggggtatctataccattgaagaaggtcttgtacaacaacaaacagctaaaactaagagggaaatgctttataaaagaccgccctggaatctggctgtaacacatccagaggcagtgctgtactagtaacagtattagtctgtaaaatgggaataataataataaatatctcccttatcagattttgtgaggatcaaagtttaaaatgcatgcatataaagggaagctgggtggagtatgtaagaatacggtgcaatactttgcatgtcttctgttcatctaaatttatctcagaactttaaaaaataactttaaaaatgcatgcatagtgcctggtacatagtaagagctcaataaatggtggatatagtcattggctctctctagatggaaaattaatagaacaagggcccagagggatttccccagagatccactgctctaagcagaggcaaatatagaaagataatgtttggaaagaaaaccatctctacagtgtgtggttagagaattgcagcagtaggggatagggatagggaacagagtggagggtgtcactcaccataaagcttacctacttaacccaaagaggatcaggctgtctgtggtaaaagggagattcagacctcttgaatctctcaatcatctaaaatgttgagtgagtttttgattgtttctaaatttggaagtggcatcagcaaacatgtgaccagtgtgtttcagtctctggctagacagtggggttcagcaatatgccagaaggagaatgtagatgccgtattcatcttcagtgaccgtggtaatttgtatctacagtatatagtgactagagctttcaaagtgcttctacttcattgtccttggaggttttcctcccgagatacgtacttctcgctacaattattaaattgtctttccagtatggatcctaaagttgggggtgagataagttggcttccatcatttccttctctgtaacaagaacactttagtgaatagaatgctcaaagtccctaactccttcctatttgatgttccagatctgcagagttgagggacctcgttgagggcttggccacctttcccaaccattcctccctctactccaacaaccttcttgctgatgagagactctcccctggtgcccctgtggggacagaagcccctaactcagcttttaaaatatttgcttcagcaggacagtccccagatttccccacctacaagagcagttaatcgctctgcaccacttccatccactgcattcttgctaatattagcagggggagtacacgtcacaagatgaggaagggagagtcagagagaaactctctcttcccccgtcaaatatacatacacacacaccacacgcacaagctcgtgtgcacacacacacgcccatgcacacacgcagacatacacgcacacacgcacgtcagaaggtacacagtagggttattttggagtctctgcaatgctcagcaccccaggcactgtgcctgtcttggcagttctataccactttgccatttactaaacccactttatttatccatttgtttgtttattcattcaacaaatatttacagagcatctaaattatgtcaggtactagaagtccagtggtcaatatactgtccctgtcctgaaggaatttctagcccattctataaactgtcacccccaaccttctctcagcctaagagtctaaatatgtattaggatatgaggtcattttctgaaaatctgaaacagatgccaaaacaaagatcccttattattgtttctattacaatgtggaagacaagagcatttcatggtacttattcttcctgggagacattggaaattcacatttcacaagtcaaatggtaaaacaatactctaatatatgaagttttatacctacttttcaagtttttggtgatcttggctcattttttaattttattttttaaagtgacataatattaaactctcctagtgagtgttaaaaatctgggagttttagaaggagaaaatgtaaatcattaagaacacttaaaaaaatagaggcaaccattattatcactatttgaaagggagaaattgaggctcagagaagtaaaataagttctttaagtttaccccttaggaagaggcacagcaggacttacccgtgcactaacacccaagtgctgcttccccataaaatggtgaagcatttctgctcctaacacgacccccactaggcaatggagtctagtcactctggtctgttcccgcaaggactttgctcctgcaatgacccctttttcttttacatttttgttttttttttcattagcatagaaatattttataatataatattaaaacaaacaaaactgtcttgtcctgaagtccacttccagctgctgcctatttctccattcccctttagttcacagaaaaacttctgaacctgttgttgtctgtatttactgtctccactgcctcacctcccactttcttgaaaccactcttacggagctgctgtatttattccactactagggctcaccatgctgccaagtccagtgatcagttcttagtcctcatatgaagtgatggctcagcagtgcttgacaccgatgatcacgccctcctccctatagctctctcatcccacagctcctcatttcctctgcaggcactgactgcccttctgaggcccctgtattggctcctcctctttctacctctgaatgctggggtcccccacattccctgggctcagtcttcagcctcttttttcctctgtctatgctcactttcgaagcaaatggttttcagtcctaacagatacactgccccctttctataacagtatcttctatcactctccctactctctcgtcataacatatcacagggaatctgcagacacatttataatttaacgctgcagctatttcattttagagaagtaaaattaggtgtaatttgaaaatatataattatgctattttcttatatctcttagtaccacactgcacaaaaaataaatacttctatcagcacttggcaaagtttaaaaaaaagaaaaatgaatcaataaataaataataccacaacatttagtattacatttaatttgacttagtatataatcccaaaattattacaggagtcagcaggtgttaaaatcacattcactttttctcttcattactacttgctgtgagaccttgagaattatactaagtctcagtttcaccctcaaagatttgtggattctcaaagaagcaagtgaaacgcatagctaatattttatacttgcttgtgcgaagtaaacactgttcctagcacatcatatgtttcactttgttcctcaccacaaccttatcagccagtcactataatataatattccattttgttaatgggaaaactgaggctcagaattagaaattgccgaatgtcccacaaaaagtggtgcagccaggattagagtctgtctccagagtctgcattgttactgattactcggtgacacagaatatttggtaaatgctctcaaagcttagctattattattaaaaggtatttctatatttcttcttcccatcttaacaaataacaagtttttgaaaatgtgaaatccagatgtgaatttgaatgactgataatttaatttattttcagtcaattgttacgtatgttttctttttcttcccaggacatggtgacccaggcatctctgtatctgcttgaagctacaggaaagcgattttatttcaaaaatgttgccattttgattcctgaaacatggaagacaaaggctgactatgtgagaccaaaacttgagacctacaaaaatgtgagaatatcaagttcttctttaaaattccactttctcctgtaaccaagattttttaaaatcaaaatattctagaatcaaatgtgattgtttgaaacttactccagtacgaatatggttaattcatttgctgaaactttgtgatgatagaaactttttcttaaatttcaggctgatgttctggttgctgagtctactcctccaggtaatgatgaaccctacactgagcagatgggcaactgtggagagaagggtgaaaggatccacctcactcctgatttcattgcaggaaaaaagttagctgaatatggaccacaaggtatgaaatattctaccatacttctcatacaatttaactattttatgttcaaagtgtatcaacactagcattatctttgtgagtaagcatgtataagccaaacaattagagataaaacatcatagcatttttcacttaaaatagaacatgcatttcacttagaatttccagcatttctcagctatgaatttaatttactttagatacatgtataaatacggtattttgaattctcgtaaattattattatagcatcatactataactgtaaaagaatttaatttgtattaagtttctatggatatgtaaggagacaacggaattaaatcttctacctgcaattcatacaatagccaccagatggcgtatatgtgcagtgctctcagacgtgcattcaaattatatatgaatcttgttaaaatgtggattctcctttaggaggccgaggcgggcggatcacgaggtcaggagatcaagaccatcctggctaacacagtgaaaccccgtctctactaaaaatacaaaaaattagccgggcgtggtggcggacgcctgtagtcccagctatttgggaggctgaggcaggagaatggcgtgaacccgggaggcggaggttgtagtgagccaagatcgcgccactgcactccagcctgggcgacagagcgagactccgtatcaaaaaaaaaaaaaggggggggattctcattcattaggtgtgggatgggactcaagaatctgcatttttaacaagctcacaggagatgttgattctaccggtctgtggatcacactttgagtagcagacagaatacctttgcaattcatctctcaaaaacatgtaactaaagaaaaaactccaatgataaataaactttatcatttgtatatgaggtacatataacaattattggaggaaatattaaacaagtaatgacatatatataaaatgtactttccaagaatcaaatgtgactctttactaaataactagcattagatttctttacctcaaaaaagatttggatcccctagaaccagcttgattttttttaacatataaggcacagaaaacaagcaaacaaaagaacgctatccaagccccatccccaaacacactagagcgcttaaagacctggtcaaaaggatgtgtcaagcgtacctctttgttgttctacaacacatttcacctccataacaggaacagaacattctcaatgtatgactcaacaaataagtgttgaattgattgacctgactgcctcatcccactcctgagcccactccagccatcatgatcatatataaaaccattccttaatagtgtttcctttctgtattgtgactccactccaactctctcacaatcatctttaaagagaccaccaatacctacagaataaagtcccaatccttagtgtgggatactgagtttccacagaatgccccacctcacataaccctccaaattcagccttccttggaatttacattccagaaaaactgagctgtacataagtcattcactcaagtttaacaaatatcactgaatgcctgctaagttctagacactatgtgcccagatatgacagtgaagaagtcatattgtctgtcctcatggagacaattttctattgtgggagactggcaagtaagtagcaatgactgtttatcattgtaagtgcctaatgggagatggtgaaatgcaaacgcggagtactgggcctaagatgaggatttcagggcaggcttctaggcacatagaagcttgattttcaaagaagaataagagttatccagacaaagatgggaaggaagtattccaagctaaggaaacataggtaaaaaaagaccagagttgaacaagagcatgatatgacctaggaaaaaaaggagttcaggaattcatcctaattctagagtttgggaagggagtggagaacagcaagaaataaggctgcagagaagagcaggcctgaggcatcagggaccttgtacaccatgttgagaagttggacttaccctgaaggatggagacatggaggccaatctggtgactattgcagcaattcaggagtaagtggcaatgggcctggaaaggtgagaatgaataaaaaagacagagatggagtaagcagaccttgaggtctgatgggataggagccatgagggaggagaattggttgaggatgctgccctggctgctgtaggaatgcctgggctcccatagccgcctttgctgacctctgtcatcatacctgtaccaccaggcattttagcttctaatcacacatgccctccactacaccaggagctatgtgaggatagggcagctgtttgtgtctgaataacggcttggcacttactaggtgcctgattaacatttgataagccaaaataagtatttatattttaagaaaacgtacagttatattagatctaaagaaatcaagtctttaatttaaaaaattaacacagcaaagcataaatattccaaacattgctttcttccagtgtgagaaggtaattttgccattcttattgtaatcagttttttaaaatactttctcacaggtagggcatttgtccatgagtgggctcatctacgatggggagtatttgacgagtacaataatgatgagaaattctacttatccaatggaagaatacaagcagtaaggtatgtatattttgatttaacttgttccaaactattttaaattgcaacctttttttcttgaattgattactttaaaaaatgtgtgtcctggcttattttctaattcaaattcattcttagtgccttctttttcagatttccacaaaactaccattttgtttactttacaagtgcttcagttaattgaattattcactctgcagctagaagtcatttgcctccttttttctttttttttaactgtaccaactataaaaaatctacagttgctgtgtttagtgtctccatcatcccataccagcatcagtgacgtaagcagagctaatgaggctcttcggtgccttcagggcagaataataatatcttctttttttgagaaagggtcttactctgtcacccaggctggagcgcagtgatgcaatcacagctcactccagcctcagcctcccgggctcaagcaatcctcccacctcagccccctgagtagccgggactacaggcacacattaccacatcagactaatttttatattttctgtagagatggagtctcaccatgttgccaggctgatcttaagttttcgtacaggcagggtgtccttatgttgcccaggctagtgttgaactcctggactcaagagatcctcccacttcgacctgccaaagtgctgggactacctctgacatcatggtggcgtgagccaccatgcccggcccagaatggtatctgtgtggactctgtcagtatgaatgggcttgggagggactgtgaaacttatctgaaaaacaatccaaatatcaaagcaaaacagaaactcctcccagtttgaattaaaccttgcgcgatgtcagtagaaatcaagtacaacacttggaaagaacgcttggctgccatgaatttatgggctaattcttgcagccagcagtctcagtgcacaaaaactgctttagtgcaaacagaagtgatagggaacttcctaatttattttaaagagttagtacaactcagatactaaaacctgacaaatggaatgaaaaaattctgtagctacaggctctctaaaaagatagaggcaaagatttcaaataaaaggatagtaaattacatctggcaaaattaagggaaaaacaaacatattaaagccaagtaagaatgtcttccagaaatccaaaaatgttgtaatagtaagtaatgaatatagtatatgaagaaaagaagaaaataaatgattgttccaatagattctcaaaagaaacttgataaaaacgcacacttattcctgcatttaaaaacaacaccatctttttaagtagaagttggtacaacaccctctccatgtctgcttccggtcttgcttgcctgatggccctttaaggagatgcactcggctttgattcctaactgtcttgacctagtacaattttttcaaaaggggctcagaacacagatttggcttccatttctcgcacaggaccattactgctctttacttttctctttctttataacagtcagactctgtacacttggcccatttccattatattatgcctcattgttggatctcttcaggcataaagagacatcaagtgggccgggcatggtggctcacatctgtaatcccagtactttgggaggccgaggcaggatcacctgaggtcaggagttcaagaccagcctggccaacatggaaaactccgtctctactaaaaatacaaaaaaattggccatgtgtgatggcacacacctataatcccagctactcaggaggctgaggcaggagaattgcttgaacccgggaggcggaagttgcagtgagccgagatcacaccactgcactccagcctaggcaacagagcaagactccatccccccgaaaaaaaaaagagagagagagagacatcaagtgcactgctgcctcctagagccatgcacagccttcctgatgccttcggcctgtacactctgcactacatggaccacagcacagaggggcttctctgatgcaatcatacgttgctttgacttttcaaacccagtgggcaccattccaaacctgatatctctttcccagttctctttcctaagcttccagccagttagacaccatatattgccttggcagaaagggtgattagtagtatttccttctagagatattctagaaatgagtacatatacaacacatttttctttcgacagataagacatgatcgccatgtcctctttaaaacttttaatttcaatatattaataatatgtattgctcattatcttccaaatttttaaattatttttaaggcttagaagcaatcacacaaataacagcactgcccaggacaggaggttacttcattcatatgatacagaacatctgttcaaagctaacaatctacctcatatttaatagggaaacactagagacactgccaggactaagaatagccactattatcacaattattcaatcttgcttaggaaattgtggccaatgtaataaaactggggatgtaaaaagatggaaaggaagagagaaaatcattgttatgcagatgatctgtgatccacttagaaaacacaaggaaataaattgaaattaaaattgacaagggaagccaataaggtgaccaaatacaaaataaatattcaaattacttttccatatattagcaataaccagttcaaaaatataatagaacaatacttcaagacagcaatgaaaggtatgataaaagtagaaacaatgctaagaaatgtggaagatgtatttaaagaaaactataaaatccttctcaaggggttaaaagaaaaccaaggtaaattgggaaacattcaattcatggaagatataaacgcaaacaaaattcatatatagggtttatgaaacgctaatcaaaagtacatcaatttttacctcattaaaaaaatctaagagttcgttgagtagatagtagctaagatcattttgggaacaagaaagtaataaagggaattcttacttttcaaattttaaatatgctataaaactacattaattaaaacaatgtgagccagggcacagtggctcacgtctgtaatcccagcactttaggaggccgaggcaggcagatcacaaggtcaggagatcgagaccatcctggctaacacagtgaaaccctgtctctactaaaaatacaaaaaattagccaggcgtggtggcgggtgcctgtagtcccagctacttgggaggctgaggcaggagaatggcatgaacccgggaggcggagcttgcagtgagccgagatcatgccactgcactccagcctgggcaacagagtgagactccatctcaaaaaacaaacaaacaaacaaacaaacaatgtgggcagacattacacatatgataatttagttattataggtagaattacaagtctgtgaagaaagataggatttcttgagatagacaattttttaactgtgtggggaaaaaattaacagactcttttccaattggatggactctttaaagataaaaagcagaatgataatgaaaactagaagaatgttaataagtatcaaatccctagataacaaaactctttcaatgcattcaatcattgaaaaatataactaagagaataataaatgtggctacatataaattaaaaattttgttgcacacaaaccaaacataaactaaataaaaaggaaaaaacagaaaaagatatttgcaaaaacaaaaaagaaagcctttagaagcttagtattgtagcacataaagagcttttgaaaaatcagtaaaacagtaacatccaaatagaaaaatagacaaaggagaagaatagataatttacaaaagaagaaattaaaatgcccaggagtttgagaccagcctgggcaacatggtgaaaccccttctctacaaaaaatacaaaaattggcctggcatggtggcacatgcctgtggtcccagctacttgagaggctgaggtggaaggatcacctgagcctgggggtgaggttgaagctgcagtgagccatgatcacaccactgcattctagcctgggcaacaagagtaagaccctgtctcaagaaaaagaaaattaaagaaatgaaataaaaatgtccaataataaaaatgttcatacttactagtaatgagagatgtaaatttgatagggatgagattcatttattgtctagtaagttattgtcagcaggatgaaagctctcacagatggttgttagaggcataaattcatgcaacttttctggaaagcaatttgggtgacacatatcaaattaaaaaaagtcttgatcctgtgatttcatgtttaaaaatgcattgtaaggaaatgatagagcagctgtatcaacgggctttaaaatgttcaaacttttggatatagtaattactcagggaatcaatcacagggcaaacttggaaatacagtcaaaattggatatgaaattttgtttattcattgatgttttattttagtactgacaaattgggaggggaaactaagttcaacaagttagtctgaatacatatgatagtattaaaagatataaaattattaagatcacattttgaatttttttttctttttttttggagacagtcccaattgtgtctcccaggctggagtgcagtggcgcgatctcagctcactgcaacctctgcctctcaggttcaagcaattctcgtgccttagcttcccgagtagctgggattacaggtgcgcaacaccatgcccacctaattttcattgtatttctggtagagttgggtttcgccatgttgcccaggctggtctcaaatttctggcctcaagcaatccacccgcctcagcctcccaaagtgctgggattacaggtgtgagtcaccacacgcagccacattttgaaaaatattaaataataatattaaaaaattaaatatgctaagttttttttaaagcaggaaacaaagctatctgtgcagtgagtgttatgttgatatatacaaagtgaaaaatgcttcaacttggtaacagtagctcatttctgatggtgagacatgtttttttcttttcttcatgctttttgccattttccaaattttctataccggtcatgcatggttatatacttaaaaaatacaattaaacaataaggtgtagggggaaagcattccaactataatagcaacaaaagtcataaatacctaatacatggaaacatttaaaatacctatgaacataccagaactctacaaaaaccatgtgaaataaactaatcagaaaacaaacaaacaagaaatgtcagcaaatcttttgtgggaaataaaagagggctcttgacctgctagggatgaagggaatagattcaaaggtgcctgaggacttagtctgtattaatgctaacaacagccctaagccagacttggcttttctgctgcgtagaaatacattctgataccatttttgcaatcccctcagatactttctggcaaacagaaatgactctgatgacaatttaacacttttgctatgatgggatgtccttgtttcttggatcatgagaggaaaatcacagaaaggcaatctgtcagaaactgagcatagactctgaccctttgaaatgacgacatcacctaaacatctaaccttcctatattttcagatgttcagcaggtattactggtacaaatgtagtaaagaagtgtcagggaggcagctgttacaccaaaagatgcacattcaataaagtaacaggactctatgaaaaaggatgtgagtttgttctccaatcccgccagacggagaaggcttctataatgtttgcacaacatgttgattctgtaagtaccttgttctcaccccctcccccagattcttatgaatttagtgaggcttttactccaagtgctccaagggagaatcaaagtttagagaaatcatcagtgagcagtggattatctctgggacaagctgggtgtgcaagtcaaggataaagtcctgtcttccttccccttaccctcctcgtgtccacgctttcttctccatcatctccctcccactagtttttagttcaagtgcttaggattactttaaatactcacaaaggcatacaagcacacacattcttacttaaataaggacttaacccagggggattaggcagttccttttattagttaataaagacatgatcagtaggctcttgatttaactttcagagagctcttttcagactgcatgtttgcttttggttgttaactgaaattttctatctttttaagagtgttggttacattagggagtttacacatagtttaaatagctttaaatagttttaaaattcttaatttttttaatgaataactggtcataaaatgaacttggccagttattgatattactgctaaatatataaatcagaaattttgcgcaaaatgagattgaaggcatcagttaactgacttcagtgggaagtctctcttgtcttccagtctcatataaaattacattttccttttggaatagagggtgcaataaattgcaagagtctgttcaacaggaatggagcataagtttttaaaatgtgatgcaccatggctcaccaggcccatcgtccttcaatttggcattgcagtccattcccaggcctattcagaaacttccaggaggaggcccagattatatattttaaattagccacagagttaaatatgatgcctagtcaggtgtggaagcctctgcctggggtttacacaaacgtttttcaggtctgcttcctaaaaagtatccatattgataacataaaaacattaccgaaacacatgacctgaaaaacgcacataaagagaaaaatgttgtacaactaatgattactttctaaattaatagcatcccagatattaggatttgtaattgcatgataatattgtaaagtcactgagaggaggaatcatgttacttttcttttgtatactatgccttaaaaaaaaaatcccccacaggcgagagatataaatactagcaagtgttatatgacataagaaaggtaaaggaaccatcatttattggctgtgttagtattgaccttagtgcatatattctcatttatttcctgcataataactatcactattttgtagatttaataattcaggtgcagagaggttaaggttactcaaaaaataacaaagtcatattgagtttttgttatgtgtcaggcactagggctaaattttgaggaagcaaaatttagtaagcaggtttctgtaatagatggtgtattaattcattttcacacctctataaactatatctaagactggataatttataaatgaaagaggtttcattgactcacagttccacatggctagggaggcctcaggaaacttaccatcatggtggaaggcgaaggagaagcaaggcacaccttacgaggtggcaggagagagagaatgcaagggaaattgccgcttacaaaatcatcagattacgtgggaactcactcaatatcacaagaacagcatggaggaaaccatctcgatgatccaatcacctcccaccagatccctccctcgacacgtggggattacaaatcaagatgagatttgggtgggacacagagccaaaccatatcagatggatttacagtccagtaagtgcactgcaatgttaaaggggccttattgaaatttctacaagatatcgtgaagctataaagggtggaatggaaattctcaggaggaagagtagaaaatggagaaacatttcggaagtgactttttggctgaacatgaaggtagagtttacaacgtagaagacagaggaggagcaatagagatgccaaaggctggcaagtttgggaactgacaggctatagtggggtaaattagagacatggaatacacagccagaatgagaatggagaatgaagcaaagctccaagtcatagagtttgccattggtatatgaagagtggattgtaatgtatgaacaattaaagcagaggagtaagaggaaagactctcaggcagctgtgaggtggaacaaacagagaggaaacaagatggaaaagtcacaaagtaaactgcaatcgtctgagggagggactgtgatggcttgggtgatggatatttcattggagatggagaaaagatgaagaaattgagatatagtgaagtgcactggtcttgggtactttttaggagggaaaaggtaggaaaacttccagtttcctaattttggtgatggggtgcatagtggtgacatcaagttaggaaatacctgaggaggaggagcagatgggagaaaagtgataaggtcaataatgaacatgtggagtttgaggcgcatgtgagacatccaagtggattttggagagagctggaacattgggagttgaaggttagaatatagtgtgttggtaaatgagtgagaagtaaggaagtggagtttggtggtataagggtggagagataagatggttccaagagaggaatgctggagagggtgctatggagagagcagtgatggcttgaaatggtaaatttgaggagtaggaaggaaaccaaaaagaggaggtaaatggattgctgaggagcactaagggtccaatgagattgaaggcctggtttaaggtaggaaatctgcattattactgtgattttccccagcactgttccacagtgattgtgcaattgagccaaggttatgcattagcagagcagacaggtctaacaaattattaaatattctaccacatagtttaccattatctatataatttcattgacaatttcagatagttgaattctgtacagaacaaaaccacaacaaagaagctccaaacaagcaaaatcaaaaatgcaatctccgaagcacatgggaagtgatccgtgattctgaggactttaagaaaaccactcctatgacaacacagccaccaaatcccaccttctcattgctgcagattggacaaagaattgtgtgtttagtccttgacaaatctggaagcatggcggtatgttcaatgagtcttggtcttctggatgctggtcacagatatgcatgttctggaccctgactcggaactagttgcgaataaacataacccgagggccagaatagttataactgtaacattgtcttcagaaatgcccacttcaactttgttcaacaaaggttcagcatcaactatctcatttgccaaattgaattaattttcaatttatgaaccaagatctgatgaattatatgagcttaacatttttaatgtttcactgacaatatataagtctataggtccatagtcttatatattagtctgttctcatactgctataaagaaatacccaagactgagtaatttataaaggaaagaggtttaatcaactcacagttccacacggctggggaggcctcaggaaatttacaatcatggtggaaggggaggcaggcatgtcttacatggcagcaggagagagagagagagagagagagagtgcgcaatgtgggaagagccccttagccccttataaaaccatcagatctcgtcagaactcactcactgtaacgagaacatcctggaagaaaccacctccatgttcctcccacctcccaccaggtccctccctcgacatgtggggattatggggattacaatttgagatgagatttggttgaggacacagagccaaaccgtatcacctgatacagaacttacctagaattattactaatgcattgaactttaatgattatgtaatctgtttttatcttttactatttatactctggccctaaaattctacccaaaggtgctgctaaatataaataagaaatttttccccataggatatgcctcaagtaagcttatggtcatttgctctacattaaggcagccacttccaaattccctatggccttttctgttattagtctttccatctaaacgtaacctgtttttcttttgcttctccatttagactggtaaccgcctcaatcgactgaatcaagcaggccagcttttcctgctgcagacagttgagctggggtcctgggttgggatggtgacatttgacagtgctgcccatgtacaaaatgaactcatacagataaacagtggcagtgacagggacacactcgccaaaagattacctgcagcagcttcaggagggacgtccatctgcagcgggcttcgatcggcatttactgtgagatgtgtttttctattgtagtttggaatgtttgcaatttatgttgcttaacaaacttccatttccagtgtttccatacatgcctagggtccaactggatgagataaccaaggagcaatattccatatttacttggagactgtttagccacatgaaacagaataggaggttgaaaggggctggcaggcataaggtctcagaaccttgcagtgtcttaggcaggtttgccctaagcctgctatttgggcacatcacactcaatagtgctgttccagtttcccatgtggcagcaggaatatgtagtttccagctcacatggcctgatgtggacaatgggcttgaccatttcctcaagtgctttctgtctctctgaccattttggtccactttgaatatcagttccctgaaagtggtttctattgcatacacagtcagctatgaaacacttctccagatgcctgcgtgcatctgtgttttattacccctgtcacccacccaagctttgactaagggagcaaataagggaggaaaacagacaatgaaatcactgatgtgctgtaccaaacccttgctgtgcaagaccctaggggagatgactaatgccagatggcgtggtggtgaagagagaacctctgattctgcatcttccattcagatgagcgagagagagagagtgtgcagtacaccagtggaatttaggatgccccctggggtggagtctgggtgtggggtgggagaagctcatgtggcttcagggtgatgaggcaaaggaccttggatcttatactgtgttcaagatccctgctagtccctgctgcaggccctggtcaggtctgccctgtgctccttgcagtggtgtctgctgtggccatattagtttggcttgttctcttggcttgctcagggcccagtagtcctcctccactgactcagccccaccctggctctccccgttggagcagagccctgagcaccaccctatcctccatccagcctctagccatactgtatactcctcagcctctgtggcaggattatccttctctcacctgccaacacccaactcagctgtcttctgtctcctctttaggatatgtggcaacatttgcctgttttccatgacacacagcagttatggggagtgcgacaagaaaatccaaattgggcctctctggcctgcagcttagtaaggccaaagccgtgatcacagctgacaggcttctgggctctgggctctttgacacagcaacagcaacagtcactgttctgttctcttctagggagtcaaggtagcctcctctaatagctgaaacagtgagtgaggcggaaacctcctctgccctcagctttcccttccaccttcagaggacgccttcttttctgagattctaggcctttggaagatgccttcttatctgagattctaggccacagatgcttaggcttgatttcttgtttcccctaattctgggtctctccttccactccgtttaggggaagagtggactcttgctttctcttcttaaatagatagcattattcttttatctaattttcctcccgtcctaatcttattcaacattggcagaaggagtatcctgtctataccatataaaaaaataaataaataatccaaatataccaggagtagttgagacataggtgtcacagaacaactaggaactgagaattaatggaaatgaaatgttttgctttaatcagaaaggctgttaaaaatattgacaactcatgtgacctaggtaatgaccaatcagaaccaatgccagccagaaatagctggtattgtcagactggtgaatatcatataagttaaagtctgccctgggtctaatatccccccaatataatccccattaaatgagatggtttctgaaggcatcttggaagctctgaaagcctatcaaggagagaccaagtgaaggaaactaggaacaccttctttgctgtttccccagtgctgtccacccctagagttgccctgcatcccacaccgtccctctctgcagcagaccagccaaggggaaagacagcggtcaagttccatgaatgctgctgggttaagattgtatcatttcaagacagacagatatttggtcattcccagacaattttggttattccctctagaatttcttttctcctttcctgtaagcagaattttcataaacactttggccaccctaagtctgataactcgtgccctaaattctgtccttaggtgattaggaagaaatatccaactgatggatctgaaattgtgctgctgacggatggggaagacaacactataagtgggtgctttaacgaggtcaaacaaagtggtgccatcatccacacagtcgctttggggccctctgcagctcaagaactagaggagctgtccaaaatgacaggtgagggatgatttgctgagacccccggtattgtctctcctactggactgtgagctccagtgaactggggagtgggggaaagatgggatggagagagataggataacctaattggctaactagccacccttacccctgaatgactgtttaagtggactctgcccatttattttaaagctttgtgtctaggactaaggcagcctggagaagatggaactagcacagcactctagtgaggactcaggaccttcttcccgggccaggaaccactcctttccagtggcagctggccaagagacctaggggagacagatgacaagccactaactacataacaccatggcataagtgctatattagcaacagaaagtacaataaagcacaaataagggaggctttaactttacctggagaaaaagcattcaagaaacaggagaagtagcagggaagagcaaagggcatgttaaacaaggcaaaagatcactcccaaaatggaatacaatgcagttcctccataaaaccttcacgtattgtgtgtctaactcccatacacagacagatggttaaaatagattccatgtgtcaccagcttctttagcagagtaggtgaacacatatttttcttttttaacttagggataatattgtggatctcaattattatactgagttgccttctgaggccactaaaatgccagagctgtttattcctaatactacctgtcctaggctgggtttcttagaagcagagcctgagacagggatttgggtccatgcaatttataggagagagagctcttaggagaaaaggaaggaggaaaggatagggccagggaaggagctaagcactgatgcagacctagtcggagtctagctgtgcccacaggggactctggaatggaaagtacatcacagacttgtctcaccttgagacaggagggtggccttttgcaccattgtgtctatcagtctttggctgtggactgtcagaacagggcagaggagaggggcatgttatttctctaggtagggtggccccttttggtaagataattccctggaagaggaggcagctataagccaatgcctagagcagctgggaagagatgcacttggctgggtaaggggatgtgcgtggggcatcaacagccttactgaaattatttccttaagttcagatggaattataatagttaaaaagtgctttcacatcaactaacttagtgacacctattctaaatagcccaggactgcctggcctggtgtaaaatcctgtttttataatatactattctgtaagtgtccctttgtccactgttttttcttgctgctgtcacatatgtgcctttcctcatttagaagaaaactctaaagccacgtttgttggaattatgtttcaaataagagtaaatcgatagtcctggagtacggcttaatgacttctctcatgtaaaagtgcaggacctttaatatgtagattttatgacatcaatttatatcataaattaatatcaaatcatatcagagattcatggctgctttgcagatagttgaagtagccaggtgactgagatgttgctgaagctattatttactaagatttaaaaattagtggctgggtgtggtggctcactcctgtaatcccagaattttaggaggccaaggcaggtggattgattgagcccaggagttcaagaccagcctgagtaacatggcaaaacccatctctaaaaaaaaaaaaaaaaaaaaaaatacaaaaattagacatgttggcatatgcttgtaatcccagctacttgggagctgaggtaggaagatcgcttgagcctggaaggtggaggttgcagtgagccaggatcatgccactgtactccaccctgggcaacagagtgagagcctgtcttagaaaaaataaataggttaaaaaaatactatcaaattctgagttaatgtaggcacctatttgatgttgatctatttatactttaataacacaaagggatatttatattgtatgctctctaaacaacagctaaaatgttgcaaatagttgctttctggaaaataatttctgaaaatgtaattgcattttaggaggtttacagacatatgcttcagatcaagttcagaacaatggcctcattgatgcttttggggccctttcatcaggaaatggagctgtctctcagcgctccatccaggttggagttcttaatctttggtttttcatatttacacataatcatagccaagatggagaatttaatggctaaaagttttaagttttccactcttctggtactgaattaaaatgaaaatagaaggtccagcttgatattaaacattattcctaaaatgcaacactactcatttaaacaaggcaattagtgtctacttgtttggaagcaataccaagtgaattcctcacagaagtcagcagataaaatgtcatatgtccaagaattcttttttaacatctctgaacaagcaactagagcaatataattggctcagaattttcttcagagtagatcatctcaattacaaattttctgggacaagtgtccagggattacttgctttatttttccattacatcaaatttctgttgtttgccaagatttacatataatggacagaaagtgctttgtactgtaaaaagccagtggtgtgagtccagacccctggatcttggtcctcggtctgccattaactatgtgacctaggcaaagaacttcacctctgtggaccttcatttctccaccaggtagagacagaaaacttccaatggcccatctggtctaaaatttcaagaaaaccaaattgccttttaaaagtcttgaaactattaagaaaaaagaaaaatgtattttttcaatgctcttttttagtaattgcagaaattattcacattaatttttaaactagagagagtgaacaatcagcattcacactggtgtgaattataatttttatgatgaaagttcagataaagataaaggaaaactgtaatgtcaaagcctaataatgagagattttgaaaccataggctttctggcttaccaatggagcatttattcaatctaggaagacagcaattatacccatctgggttattctggttcagatttagaaaattaaatgcaagggcctgctttggaaaagggaggaatgtctcctagaaaagtaattaaagtgataaaaggacaagttcacatttaggaaatttctgcctatgatttttgtatttaagaaacctaacagagagagagagagagatggagaaatgagcaagactcattcaccagtgtgccacaagaaccagatctaatagcccttcgctttctccacttgccagcttgtgatctacctgtgaaactaggaaatctggctctatgaccagcccactctgtcttctaataggtgctaactctgagacaataactacctaggagataatcctcaaaatcacattttctaaaaaagccttgttaatccttccttacctcactcccactctgcagctccctcattctattccaaacaagctggccttggcttatgtcatttatctccacagggcctgcaatactacctgacttagcaattaggtaattcagacaatccatgcgtgggtaaaaaataagtcacagtgagtccccttaagggttcatagtctaataaataagatgagcttcatataccaataaatatagggcgaagcacaatatgatgaatgtcgaaggattgatagaaataaaatcctataggagatcagaggaaggggagattttttacaactggtaaatgagatggacagcagagaaaccttcatggagaaagtaatatttgaattttgaaggatgggtaaggcttagacaaacagagaagactaagaaggcttagataaatggagaagacaaatgtaaagccttctaggaaaactaaagagtacgataataaagtcaaagagtcagggattcacaaggacctttggggagtggtcttgtttgggtggaggatggaaaattgtggaagctaaggctagaaaggtaacttagaactgcatcataattgctcctaacaccaaatcaaggattcaggcatcactgaagtctttttaatggcgcactggggagacaggggcagaagggaaaagatcatgtgatgggagctgtattctccagaaagtaagagctgtttttcttaacagcttgagagtaagggattaaccctccagaacagccagtggatgaatggcacagtgatcgtggacagcaccgtgggaaaggacactttgtttcttatcacctggacaatgcagcctccccaaatccttctctgggatcccagtggacagaagcaaggtggctttgtagtggacaaaaacaccaaaatggcctacctccaaatcccaggcattgctaaggtatggagtcagctttttttctttctcataattcaacaagataaaataaagtttttacagaataattgtagcattttaaatgttggtggttgctaaaaggagagtcagtattgaatcaaagagagaacgaggaaaaaaaatctccatccaatgaaaatcactcagtatgtcagcaagtaaagacaaaggaaataggtgatattttgtccaggtactaaatggagaacctttaaattacatagtaatcaagatgcaaaatgatcctcgacattttgggatcataaaagttatttcctttatctcagagactcatctcttataaaaccaaggcaacaataagcatatagctttcagacctcaccatccccctcccacccgccgtggaattttcttgacaatgggaatgatatagttagttcaaacacactgaagctccccgtggctgacagagtatcaaacatgcacacctcttcttagatatgcttccaacatgcttatatcagagggttttcccgtacgtgacattgaagtcaggtctgtgtcacctgaagttattcattggaaatgtttacatgtgttttggtcaggttggcacttggaaatacagtctgcaagcaagctcacaaaccttgaccctgactgtcacgtcccgtgcgtccaatgctaccctgcctccaattacagtgacttccaaaacgaacaaggacaccagcaaattccccagccctctggtagtttatgcaaatattcgccaaggagcctccccaattctcagggccagtgtcacagccctgattgaatcagtgaatggaaaaacagttaccttggaactactggataatggagcaggtaatcacccaagaaattggaagatatttatttctttttccaagaagcaaccagggaatgccaagagggcatggtctggtgagggcagttagacaggcaaggcagcacagcactgaggtctggttgggagagttctccatttccccacaattcctacatttcaaaatgctggaaaacatgagggcttctgcaaggcccaaaacacattaacagctcaagctcaatagattcagtctctggggagttgccatagggtattccacaacccccaaaaaaggaaaagaggaaaattaataaccatattgtgttaggtgctttgtatatacacatacatacatacacacatatgagtgtgtgtgtgtatacacaaatacatatatacaaagatgtatataacctttgtttttataatatcttcactgaggctttcacatttagaaagcagcagagatagattcaagcacagtcctatatgattcctgtatctatgcagactctatattagcttgccccaaaagtgaaaattctgcccattattcttgtctttaagaagtctatcagggagagagagaaagagaattctacagtttaaaaaaaaaaaaaaaacatgtctgcttactgtgaagcaagtaaccttaatagaatgaatcctgtgaatgaatttcccacctaaatctaccctggggagaagtgatgaattttattaaataatcatacaacatttttttcttccacatttgcatatagcagtttaatttagttcaacagatacttattgagtagttaccttgtgctacattgggtgtaacacagaaacgataccatcttagatttcaaaaagaaagtcaacaattcaagaagacagaatgtatacataaaaccacacacagtgataaaagaagtaagccttaccctcaacacaccaaaatcttaaggtctcttggagctaatgctgaatttcttgttgctttgaaaattcatagcctacatatgagttggaaatatacaaataccctccccgttacctatttattaattccttcattctttatcaaggtgctgatgctactaaggatgacggtgtctactcaaggtatttcacaacttatgacacgaatggtagatacagtgtaaaagtgcgggctctgggaggagttaacgcagccagacggagagtgataccccagcagagtggagcactgtacatacctggctggattgagaatggtaagtaatttgtaataacatacctggcttgtgcaaaagcattggtttcaagaggaaactattaagcctgtggggcagaatggtgcatgattaaatcagggtttctcaaccttggcattattaagattttgagccagacaatcctttgttgtggagggctatcctgcacattgtggcatgtttagcagcatccttaacctctatccattatttgtcaatagcaattccctagtcatgacaatcaaaaatgtctccatatgtggtccactaacccttaggggggcaaactagcctccagctgaaaatcactggatagaacatagcttttgactgccttacttcaaagcccagccctctatcaaatacagtattttgtgtaatctttttgtacttcactctcctctgttgtaaaataaggataataatggcagctacctcataggatggtcacacagaataaataactaaacacatctaacaaactgttactggtaaatagtgtttaataaaggttttatcattattttaaaaacacttctaatgaagttctttccattgaagcatttctaatttatcctaatgaatctgttccacagaataaaaaagtaataatttagggtttgttatctacatcaatatcattatccaagtccactgtctgtctttcctcttttctcctcctgctcaggccagggagcatagtagatgaatttcatgtgggccagcacactgagcccacgtgtaagcaggtgggaaaattatgtccatgaaacagacagtcccataccacttttggttacaaacacttgccctggactagagaaggaattgagaccaagtttgtgtcccaatgggttccaggactagttttccatcaatctccaccctgtcctgggcaggctttctcctgaggttggtgtgcgggaaggagaagagctcctttgagaaccttcccactgtcatctttacttgggtgtgtgcttagtgaagagaggattcagagacacatggtgtcactcatgcaaaggtgataatagagggaaatgttttaaaagataccactgcattttttttttagacagtcttgctctgtcaccagtctggagtgcagtggcacaatctcagctcactgcaacctccacctcccgggtccaagtgattcccctgcctcagcctcccgagtagctgggactacaggcacgtgccaccatgcccagctaagttttgtatttttagtagagacagggtttcaccatgttggccaggatggtctcgatctcttgaccttgtgatctgcccgcctcggcctcccaaagtgctgggattacaggcgtaagccaccgtgcccagcccatgccactgctttttgagttaggggaaggaggcagaaggggactggtttagtggctaggtctagccttatggcagcattttacttacagtaatatatttcattcttgtaagtatccctttttaaagatggggaaacagaagctagagagcttatgggttcatataactaatagtgttagtgcctggcataacagtagaaggccatgttcttccctctatccctcgataagccttaatggcagtctctactggtgctttcaacatgaaccctgaacctgctagagcattcacttcatctttgccaagaccagattaatgggtatgaagattaaacggtctttaacagataaaaattctataaagaggtagagtttatgagaaaacaaattctaagtaatgccatgttaggatcttatgagatatttttattgaaaagaaaagagaacctgagaactctacagattgaacagaccagggtattttttaaattccaggattacttttatacatgtcttcaacaagaatgtgaatgaaattgggatcactacaagaactagattcccatgcattcactgagaaaatgagaagtctttcaaaagcacaaaattttggaaccctaacataaaacattttattaaaaactgaaatttaataagaaaaatgaaatacaaacatcgagaaagtgaaagaaatatgcataaacaatcaaggcattcttgaaggtccagttgattagttgccaaataaataggaaagataatgaaactcacactattatttaggaggaatacatttcttgaggcagtctgaggtttaaaacacttagtctttaggcccggcacagtggctcactcctgtaatcccagcactttgggaggctgaggcaggtggatcacctgaggttaggagttcgagaccaggctggccaacatggtgaaaccccatgtctactaaaaatacaaaaattagctcggtgtggtggcacatgcctgtaatcccagctactcaggaggctgaggcaggagaatcacctgaacccaggaggcagaggttgtagtgagccaagattgcgccacaccagcctggatgacaagagcgaaactccatctcaaaaacaaaaacaaagaaaggaaggaaggaaggaaggaaggaaggaaggatggaaggaaggaaggaaggaaaaaacagatgtagtatttaaactgaccttgtggaaagacaagatcaggatgggcaaaaagatgggaaaataagcaattttaggacaaatgtcatgaaaataaattccaaaaggttattccactaaatatccaggaaatatctaagagataaaaaaaagaaactgtgattctctgttttctcttttccctctgatgaaaccgtatttgtggtcttgtctccaaatatttaaaattaattctgtgtgtggaaggaaagaagcagaagtggggaacaggaagagggtgatctgataagaaaacagacggaggtgtcaccatttagtgatgttgcttaccatattttgagtatttttttaatgcagatgaaatacaatggaatccaccaagacctgaaattaataaggatgatgttcaacacaagcaagtgtgtttcagcagaacatcctcgggaggctcatttgtggcttctgatgtcccaaatgctcccatacctgatctcttcccacctggccaaatcaccgacctgaaggcggaaattcacgggggcagtctcattaatctgacttggacagctcctggggatgattatgaccatggaacaggtaagctgaacctggtgtggaccctgtaaaagagtttaccagccaagtagaagagcagaagcgggtgaggcaggcagccgtgttctgatacttagggggcagaaggcaggagggatcttgccggtcctttgaaatgagggataaatgtatttaaagaagagagatttaaaacctgaaaaactggtaaactttgggagtaagaggcttcagccaggaagggtaaacctcactttgtttctgaaatcttaccaaactgtcctttgacaaactccattttctgggtagcagtgactcctggggaagaactggaaatggagcatagatgtctgcagagcagagctcttttggaaggaacctcaggtcctaccagactttctctctcaaagtgtggtctgtggactgcagcatgtagataccatgaacacttgttagaaagtgttttcagatctgcattttcagatccctgggtgatttgtacacacattacagtttgagaagcattggtgcaaactgcctctataaataataaaacaataaacagttgttaaacagtctcttctttctgccgggcactatggctagaaatgctgaccaaggctttacgtcatgcccaatccagttttacgcttatcactgtgtcattatatacaaacaagaatgtaaaagagatagtaatccttgtaaacaggaccatcagttcatttatttgggaaccttatggggtgatgatataatttctcatagacttttaaagctttttaaatattttttaaagctctactgcttaagaagtttctttaatatttcagaattaaagtcacattcttcttttttctttttagctcacaagtatatcattcgaataagtacaagtattcttgatctcagagacaagttcaatgaatctcttcaagtgaatactactgctctcatcccaaaggaagccaactctgaggaagtctttttgtttaaaccagaaaacattacttttgaaaatggcacagatcttttcattgctattcaggctgttgataaggtcgatctgaaatcagaaatatccaacattgcacgagtatctttgtttattcctccacagactccgccagagacacctagtcctgatgaaacgtctgctccttgtcctaatattcatatcaacagcaccattcctggcattcacattttaaaaattatgtggaagtggataggagaactgcagctgtcaatagcctagggctgaatttttgtcagataaataaaataaatcattcatccttttttttgattataaaattttctaaaatgtattttagacttcctgtagggggcgatatactaaatgtatatagtacatttatactaaatgtattcctgtagggggcgatatactaaatgtattttagacttcctgtagggggcgataaaataaaatgctaaacaactgggta

SEQ ID NO: 20 - DNA, 11581 bp, Homo sapiens
agcgattctcctgccccagcctcccgcatagctgggattacaggccctcaccatgtccagctcatttttgtatttttagtagagacggggtttcaccatgttggccaggctggtcttgaattcctgaccccaagtgatccacctgcctcggcctcccagagtgcagggtttacaggtgtgaggcactgcgcccagccaagtatctaccagcttctaattccaattccatgtttgagcttataaaataactgaaagtaatcaaaatatattttgtaagatatatacaaaatacagattttgtgagatatatacaaaatacagattttgtgagatatatacaaaatacagattttgtgagatatatacaaaatacagattttgtgagatatatacaaaatacagattttgtgagatatatacaaaatacagattttgtgagatatatacaaaatacagattttgtgagatatatacaaaatacatattttgtgagatatatacaaaatatatatttaaatctggtagcttggttaattaaggactagtataaaaaattaacataagatacacttgggaccttaaaggactttcatttctctccccttccttcatctctcctccttcacttaccttcatttattattctaggcatgacaagtgtcagatgtctgatttgaagactaatatgaatatatctaggtaataaaatggaaaatccctatttcaacattcttaatggaatccttccttgaaattattattagtcttctggtttaaacatttatatagtgtaaatgcaaaataaaaatgattgtatcaaattatggtttttatttggatgctttgcaagaaaatacttaaatgtgagtcatacatttttccagttcagcatttaaacttcagacttcaaccacagttgtgattgtttttagtttgttagctgcctggagtgttattttaagaaagcagaagcaccatcatttgcacactccttatagatcacacaccttaaccctgactttttttgctccagtttttcagaagaagtgaagtcaagatgaagaaccatttgcttttctggggagtcctggcggtttttattaaggctgttcatgtgaaaggtatgtgatatttagaaaatgatcccagatcaaaggaaaaatataggacagatctgtttttcagttttaaacatttatgcctatgctttggttggccagttagccagctactttttcctaacatgctttcatctttctatggcagttgtctttacatagataagactctttttattcttttttctcttatcttacttacttgtttgcctactacaaactagagaataagaaattagctaactacagatagtcctgcttatatgaatgtccatattgaatcttaaaaatctataatccttcccttgagtctcttaaattaatattctggagaaatgaaataataattactgtaagtacaacatggaatgcattgggattttatttccccaaagaggctggtattggttttaacagctttcctggatctgatcccacagatttattatgaccctttaacaatgtttaatgttatacaggttgcctataaattgatgactgaacttttgttattttgtttactgatctttcaaacaacttcagaaaatggaatacattctgaatttagaggtacagtattaaataattttcatttagaaggacacactaaaatttgtctggattgttcctatcactgagtctgtggttcttatttcaagatgaataatgacagaaatgtgattaagaataggccttatatatatattttatactaatttagcattaagaataactttctaatgatttaaaatataaaatattagtaaagcatgtacaatgtaagtatatatacatatctaaaaatatatgatatatataatggggctacttccctataaaccctataaagttgaaagttgaaaatatcatactttcagcttacagtgactttatagggaggtagccccattgtagctgaggagcatactgaatacatatcactttcacagcatcataaagtagaaaaatcataagtagaaccatggtaagttggggaccatctgtatataaaacagctatcacttactgaatatgatattctaggtatcatgctaattcctttacatataatattccatttaattctctcagtaaccatatgagaataaatactattattacttctgacatacagttgagccagttgagacttacagaggtgaagtaacttaccaaagtcatacagcaagcaagagtgtaagcagaacccaggcaatctgaccctatagcccgcactcctactatcctattctgccttgtgtaaggcaatcactttttagtaaactcattatggtcatatctagcatatgttgttaaatctattttcttatttgtttgaagtgaattaaatttaacaaatatttattgaacacctactatgtgtcagatgctcttggaataaagtaaggcacagtccctaataacaggtttgttaggaaaaatactgcctgttggtgagagcaaatgctagactctaagtcttggtgaattgaaagtatttgtaacttttctgacagctatgtatttctgatagatattaggctgcctaatatttttctatattaacttcccaggtttctggtaaggaagtaatcatatgccgtaatagaatatagacattttctatttaagacttaatagtcaagtcactcctcaacaatctatatttttggtcaggcattatgtgctcatttatatttcattgagaaaaaacttttaagagtcatggatacacaagtaggaaagaggacatcatttaagtcattttacctctttcagatgttaatgagttatttcattaccttgaatttactccataatgtttctttccaatattacacagtgtcagaagattcattaggaacttatgaataatggtataataatgcattataaagtacttcaaacaattacaagtacaataacaatggtcttaaaatgtttttgtagtggctcttatcattaagactgaaatactgcattaggtcctctttgctctgggaatcgtctcaggaatagacttccagttaaaattataactattctgatcatttaaactttataacttgaattcgtatactaaatgttttttttttagttgaggcttaatgagaggaattgttaaaggtcacttagctaaaattatatgaataaagcatatttaacatcattgttgtaattattattattattattattttttgagatggagtctcgctctgttgcccaagctggagtggagtggtgcagtcttggctcactgcaacctccacctcccaggttcaagagattcttctgcctcagcctcccgagtagctgggattacaggtgtgtgccaccatgcctggctaatttttgtattgttagtagagatggagtttcaccatattggccaggctggtctggaactcctgaactcatgatccacccgcctcggcctcccaaagtgctgggattacaggcgtgagccactgcacccggccaacatcattgttattattaattagcactcttatttaatagcattacttatgtaaagctattattgaatttttaaaatctggtaatttgccaggcgtggtggctcacgcccataatcccagcactttgggaggccgaggagggtggatcacctgaggtcaggagttcgagaccagcctaaccaacatggtgaaactcggtctctactaaaaatacaaaaattagctgggcatggtggcacatgcctgtaatcccagctacttgggaggttgaggcaggagaatcacttgaacccgggaggtggaggttgcagtgagctgagatcacgccattgcactccagcctgggcaagagtgaaactctgtctcaaaaaataaaattaaaataaaatctgttaattgatccaaacccagatgatacaaaatttcctttgtttattccttgcaatacttatcaaggtcaggtgcggtggctctgtaatcccagcactttgggaggctcgaggcaggtggatcacttgaggtcaggagtttaagaccagcctgggcaacatggtgaaactccatctctgctaaaaaaaaatacaaagatctagccaggtgtgatggtgcacacctgtagtcccagctacttgggaggctgagggaggaaaatcacttgaacccaggaggcagaggttgcagtgagctgagatcgtgccactgcactccagcctggatgacagagtgagacattctggcaaataaacaaacaacttatcagacctctttgtctaatattcagattagacaataaatgttgacattcaaagttaaggctttaatggtcatatgtgtatttattcatttattcatttttttttctgtatacaggcatattcaattgagattgtacctcataatatttctaaattgcttttgcaaatttacagcactttatatctatatatactctatcttttaaaataattctttttttccttttttttttgagatgaagtctcactctgttgcccaagctggagtgcagtggcacgatcttggctcactgcaacctccacctcccaggttcaagtgattctcctgcctcagactcttgagtagctgggactacaggcatgcaccaccatgcccggctaatttttgtgtttttagtagagatggggtttcactatgttggccaggccggtcttgaactcctgaccctgtgatctgcccgcctcggcctcccaaagtcctgggattacaggcatgagccactgcgccctgcttaaaataattcttataagaaatatagcctttttttaaattgaatcatgtactatgataatctgattgttattatgaaaaggcagataattgtggtagagaatatttaaaagtcttacaaaataaggttatcttggatgaaaacatgcctgttcttaactataatacaatttatacaaaaaaaatttaagtacaaatgagagtttaggaaggatgcgaaaatcagaattctttcaacccagattcccatagactggttcaagaaaaaagtgaaaatcccttttagagtacctttggatttcctttactgtgatgtaagattctgcttagagaacaaatggagaaagctgagacaaaccaaccataaaactatttttctgcaggcaagaaagataaaataactcaatacaaaatatataaattgacctttgttttcctttctttttaatacgtttacctttcaagcccaagaagatgaaaggattgttcttgttgacaacaaatgtaagtgtgcccggattacttccaggatcatccgttcttccgaagatcctaatgaggacattgtggagagaaacatccgaattatgtatgtggcattccatattcctttttttcctgttctaagcagagatactttctgacactgagcattgtttgaatgtaacacctgcctctttactcccctttttgctgtgtagcactttacatgagtaaagaattgagtcttatgaatgagcttgaggcaattttattgaaattaggggtaagaatgaaagattacagccaatctaaaatcagtgggctacatcaaattataaacaaaggttgtaatctagtcatcaacatgcactgtttatatggagttatttctattcatttatttttgtttgcttgtttttgagacagggtctcactctgtcacccaggctagagtgcagtggcaagattactgcttactgcagcctcgaactcccaggctcaagtgatcctcctcagtagatgggactacaggcatgcaccaccccacacctggataattttttatttttctttagagacagggtctcactatgttgcccaggctgttctcgaacttctgagctcaagcgatcctcctgccttggcctcccagagtgctaggattacaggcctgaaccaccacgcctggccaagttatttcaatttgaatcagaactttcagttgcctttgatcagttcaaactgaaacttcagataacactaaagccttattttgtaccatatatagataactgagtcttttatactgtaaccagatgtctgcatcgagataaggcagactgatcacattaatttgatttgatctcacttttagattggatttcagatattcatttcatttcacacacagtccagagttatatgctatacagctctttttcaatagcaagaatgctaatactatttgagaaattagatttctattggatccaatcagttataagttttccttgtaaaccactcctaccttaatagtttttccccaatcaaatctcctatagaaagagaacagagcattccattccattcaatcaatggaaaaagtataatgtgtttaagaattttgttttaagttctgtctgggacacttaatagttgtgtgtttttgtatgcaagttactaatctactttgaacttcaactttttcatctttaaatgaggaaaaaaatcatgcttaactcataggattattgtaaaaataaatagagaatattccttttagagcttatatatttctgggacatattaaaaaatatttactattatttattcacctaatctatgtgccaattattgtcaccatcctgcttaaaagtcttgtgatggtttccccaacattgaccttaggatatattacaaatgccttggcctgatctacaaagcttagcataactctcaagatcatccattgccacttttcttttacttcatgtttaaaaattcagcactactggggctgggcacggtggctcatgcctgtaatgccagcactttgggaggccgaggcgggtggatcacctgaggttaggagtttgagacgagcctggccaacatggtgaaaccccgtctctactaaaaatacaaaaattatccgggcgtggtggcaggtgcctgtaatcccagctactcgggaggctgaagcaggagaatcacttgaacccggaaggcggaggttgcagtcagccaagatcatgccattgctgcactccagcctgggggacaagagcgagactttctcaaaaaaaaaaaaaaaaaaaaattcagcactgctgtagtgtctctatttccccacattcacagtgcttttacatctgctagttcctctgtttgaagaactctgtcccacccctcttagcctagttaactccttctcaatgtgcatgtcttagttcagccatcacttcctctaggaggttttctttgaccactcagatcctgcccacatagcttcgtgttagggatagaatagctggagtagtgggtaattggaaagaatggcatacatgacactggcacttaagccatgttgaagagtgtctatcttacgtttaaacctccaggagatttttaaaatctcctccatgatcttctaattcatctttttattttatgaaatgattctttttatattacattgtttactgaaatcagataattcagatatttcatgacactttgcctgatgtgttgatcttctgttctgatttctgaaagtatattgccattgctgtgccattatggtattattattattattcttatcattattttgagatggagtctccctctgtcacccgggttggaatgcagtggtgcgatcttggcttactgcaacctctgcctcctgggttcaaacaattctcctgcctcagcctccccgagtagctgggactacaggcacgcaccaccatgcccagctagtttttttttgtatttttagtagagatgaggtttcaccatgttggccaggctagtctcgaacacttgacctcaggtgatctgcccaccttggcctcccaaagtgctgagactgcaggcatgagccaccgtgcctggctttttttttttttttttttttttttttttttgagacagagtctcactctgttgcccaggctggagtgcagtagcatgatcttggctcactgcaacctctgcctcccaggttcaagcaattcttctgcctcagtctccctagtagctggaactacatatgcactcctcatcgcctggctaatttttgtatttttagtagagacaaggtttcatcatgttggccaagctgggcttgaactcctgacctcaagcaatccacctgcctcagcctcccaaagtgctgggattacaggcgtgagccaccatgccgagcctgccattatggtattattcccaactccattacttactaaaatgatgtgactttgggcaagttacttaactagcctttttcctaaactttaaaaaaagggataattatgcatgtatgaatttatacacatatactttatagggttgtgaggattaaatacaataattcataaaagaacagtgtttggcttatagtagcctctcctttttctgatattactagagtctttacagtcttattaagaatagtttcattcattcattcaacgaatgtttatttagtaactgccaaatattaagggttggtggtggggataaaacagtttatttaaaatatagtccatttcttaaaagaatttatagtctaacaggaaaccgtaaacaattaaaacggcaattacaattctgtattgtaagtgctatgataggaatgggcatgggttgttataggagtactgaggaggggcacccagtccaatcctgggggagaggagaagggtggcagtgggaggcaggaaagggtgcttggaataagtggtgggatggatgatggctgttagctcaataggagtttgctggctaaatgtgtgtggggagtgagagaattaataggtggggcaggtcattccaggaaaaggaaacaggattgctgtgacgattatatgagatcatcacgtaatatgcttagcatagtaccaggcacactgtaaccagtattatatgttagaactgttattgttaagatgggagatgagaaaagcatggtacgtttgtggaattgcaagtgattgtttacagctggcatgcattgtagatggtgacattgtgagagatgaagctggagagttaggggcatattaggatacgtgccttctatgctatttgaggataccctgttatctgtggagagacactagaggttttaagcagagaaggaaattaagcttgcatttttagaaaggatgtttggcaataatgtggccagtggtttgaaggggtcaagacaaaaggaagacattgttacaatctaggagaggatagtggtgtcctgaattaaggcagtaataatgagaagagaggcaagtggatggatttcacacatgaaaataattagaatcaactggactgtgagattgattagatatgtgacaggggaggattcaggtatgatagccaggtttttggcttggatggtatttataaatactgagttaggaaacacaaggtttttgttgttccttttggtagggagggctgcacatgagaaggaatgatgacttagatgaaaaaaatgttaaagttaatgaaatcacctgaactcgttgacaatcatctaatttttcatgggacatcacgatgaaaaagttccagctttgctacttaattgttgtgtgaacttgggtggatcactaacctctcctatttatgatttcctctcctctaaaatctggataataatatctgtctgtccatttcacatatattgaacatattccatatgccacatacctagctaggcactgggaatacataaatgtttttgcctcaaggaacttacatagcccagggaagcaaccactctgtagacaagcaactatgatacggcatttgatataataaatatatatgagcattaatgagactgcagaggaagaagtttgttgaagggtggggataacatcaatataattattacagaggtaaaacgtgagttgagttttaaaggaaaagcaaaaatttgccaagtcagcaaagatagttgacagcggagttgttgtgaggtttattttgaatgagaaatatttaaaatatagcaagttactataaaaatctgagtaacggtattactctagagtgcttatagagtactaaatacaataagtactgttctgatgaaatagtggccgtatactcattaccaaaaataacaatatctgcatttcattgttttaactttgttttctttcttttcttttagtgttcctctgaacaacagggagaatatctctgatcccacctcaccattgagaaccagatttgtgtaccatttgtctgacctgtaagatatatttttttccatagtaatatagatgtggaagttaatagcttttaattttaaccttgttagtaagaatgtttttaaaaatatgttggagtataaacatttacaaacataatctgaacttttgaatacattaattcctatgttaattattaggtatcataaattcataaaactttgtcacagataaaatttagctatacattttttctaaagaaaaaatcattggcattcatagaaaggccaatttctcttaatagttcaataagtggatttgatcttataaaaaggcaggtgtttctttggaaatgacagactccaacatcaatttttttaaaaattctccctttcttgtcactataaataacttgtttagacagatatacagttgggaataagcctaacacagtagaaattgctgtatggtgtagataaaacaatcatattatcatatcattaattatattgcttactttcaactaatatatattaaagattggaaaatcccataagctattctgtattgtagagctgcttatgtctgaaaggagtcatcccttgctgtcatgtcagagctgcaagaactaattgattttggattgaaatgtgtagtcacattttgagacagcatttgaggggattgtctaatacatatatttgcttttcagctgtaaaaaatgtgatcctacagaagtggagctggataatcagatagttactgctacccagagcaatatctgtgatgaagacagtgctacagagacctgctacacttatgacagaaacaagtgctacacagctgtggtcccactcgtatatggtggtgagaccaaaatggtggaaacagccttaaccccagatgcctgctatcctgactaatttaagtcattgctgactgcatagctctttttcttgagaggctctccattttgattcagaaagttagcatatttattaccaatgaatttgaaaccagggcttttttttttttttgggtgatgtaaaaccaactccctgccaccaaaataattaaaatagtcacattgttatctttattaggtaatcacttcttaattatatgttcatactctaagtatcaaaatcttccaattatcatgctcacctgaaagaggtatgctctcttaggaatacagtttctagcattaaacaaataaacaaggggagaaaataaaactcaaggactgaaaatcaggaggtgtaataaaatgttcctcgcattc

SEQ ID NO: 21 - DNA, 22808 bp, Homo sapiens
ttttcttttgagtctcactctgtcacccaggctggagtgcagtggtgcgatctcagctcactgcaatctctgcctcccggattcaagcaattctctgcctcagcctcccaagtagctgggattacagacgcccgccaccacgcccaactaattttttttgtatttttagtagagacggggtttcgccatgttggccaggctggtcttgaactcctaacctcgtgatccacccacctcggccttccaaagtgctaggattacaggcgtgagccaccacgcccagccgggaatgatttttaatcattctactatttggtgtttaatatgttttctcactaaatctgttcaacaaacctgagaggcaaatactgttatttatttatgaggagagaggttcagaagggtaaagttacctgctcaaggtcacagctggaaagaggtgaagccttcagcaaaaaaagcaaaacaactcatttcattttattccgtgagctgataatggaggaaaaagtatttggcaagaagcggcagggaggggaacctggaggaactccctgctcttgaagaatgcaagggaggctgggaccttgtcactgaggagcccctggcatccttccagagatgcaaccaaaggggtgaccccagtgtgttcttaataggagccgggaaccccttctctgtgcacctcccacctcttgcccctgggaagtccttccctgactctaacctcagttctgatgctgttcccaccctctcagctctcaagcagatcaatgcaatgccacctggccgcttgctttgcccactgggcctacagccggaagcctgcccttcagccctcgggcctgatcccaggccgcctgcagcctgtaaccagacactgtttgcttccagcaggcaccccccgagcccagctccacacaccgttcctggatctcctctccccaggcggagcgtgcccctgcccagtccagtgaccttcgcctgttggagccctggttaatttttgcccagtctgcctgttgtggggctcctcccctttggggatataagcccggcctggggctgctccgttctctgcctggcctgaggctccctgagccgcctccccaccatcaccatggccaagggcttctatatttccaagtccctgggcatcctggggatcctcctgggcgtggcagccgtgtgcacaatcatcgcactgtcagtggtgtactcccaggagaagaacaagaacgccaacagctcccccgtggcctccaccaccccgtccgcctcagccaccaccaaccccgcctcggccaccaccttggaccaaagtaaagcgtggaatcgttaccgcctccccaacacgctgaaacccgattcctaccgggtgacgctgagaccgtacctcacccccaatgacaggggcctgtacgtttttaagggctccagcaccgtccgtttcacctgcaaggaggccactgacgtcatcatcatccacagcaagaagctcaactacaccctcagccaggggcacagggtggtcctgcgtggtgtgggaggctcccagccccccgacattgacaagactgagctggtggagcccaccgagtacctggtggtgcacctcaagggctccctggtgaaggacagccagtatgagatggacagcgagttcgagggggagttggcagatgacctggcgggcttctaccgcagcgagtacatggagggcaatgtcagaaagtgagttccggctgggctgcccggtggggtggatccgaggtgctgaggcaaggctggattctgagggccaaggaaggacttagcttgcaggcctttgaaccctgtggagcccgagactggcccattgcttcacctccagctgctggcaaagcagctgcaaatgcaccgaactgggagggcttccccacccctcaccagggagctggggatgagggacagagcgtcccttggacagacaggaaaaccgaggctcagaggagagaaactcacccgaggtccctgagagcctgctggcaccccgaatccagaaggagccccaacccccacgagtcagctggcctggcagggctccggaggctcccggcgaggcgggggtgggagcaggagcaggggttaggctggggcagccttccatgtacccctttccctgcatgcctggtagcatcctcagagcccctcccacacccccagctctggcacaccctctaaccttcctgttggggcagggtggtggccactacacagatgcaggctgcagatgcccggaagtccttcccatgcttcgatgagccggccatgaaggccgagttcaacatcacgcttatccaccccaaggacctgacagccctgtccaacatgcttcccaaaggtgagtgggccctgcctgcggccacagggccagggggcaggcaccctgggctggggtgtggggcaggagggtacgtcctcacacacacatgctccctgcccaggtcccagcaccccacttccagaagaccccaactggaatgtcactgagttccacaccacgcccaagatgtccacgtacttgctggccttcattgtcagtgagttcgactacgtggagaagcaggcatccaatggtgtcttggtatgaggctgggcccatctctccttcacgtgggctggccccggcttgaggggtcttcccgttctcttcatccctgtgccagtttctgaattgttaggccagggttggaatcccacctctgagtgatttcaggcaagtgtcttgttctctggttctccatttctgcacctgaaaaatgaaaacaatggtttctcttcatgaagggagttcctgacccaccggttaccagacagacggtggctatgatgattgttattctccaaaggcccttctctaggacccacagcctccagaccccagtagcgttcccctctgctgaccaggcctctaggtttagcttgattggcctccagccctggcccatcagggatccccccagcccactgggccctgggacccagcccacctgccccaggatcaaacaggagcccctggtctgcttcttcctcacaccttgcagatccggatctgggcccggcccagtgccattgcggcgggccacggcgattatgccctgaacgtgacgggccccatccttaacttctttgctggtcattatgacacaccctacccactcccaaaatcaggtgagtgggggtccttgaggagggaggcagtggatggagctccactcccggagttcatcctgccaatggcatcgcctccccagaccagattggcctgccagacttcaacgccggcgccatggagaactggggactggtgacctaccgggagaactccctgctgttcgaccccctgtcctcctccagcagcaacaaggagcgggtggtcactgtgattgctcatgagctggcccaccaggtagacccccatctcggggagtgcggagaaggaaacaggggctccgagaggagacggcgcaagtccaggctctgccccgggctgctgagaagggaggagggtgccgcctggcagggcagcaggaaggggtcacgatggtgttgaaatccccactgtgcctggcagatggccagccctggggagggtagttctggggattctcagtgcccagcctgggcgtggcttgcccagctgacccctccccccacagtggttcgggaacctggtgaccatagagtggtggaatgacctgtggctgaacgagggcttcgcctcctacgtggagtacctgggtgctgactatgcggagcccacctggaacttggtaagccagctgcccaggggtctggtgcggggggcatggagggagacctgggccaccgctaccaggccagtctcctgatggccctggggaatttgcagaaagacctcatggtgctgaatgatgtgtaccgcgtgatggcagtggatgcactggcctcctcccacccgctgtccacacccgcctcggagatcaacacgccggcccagatcagtgagctgtttgacgccatctcctacagcaaggtgcagcccgctcctcgtggggcacggggaaggaggtggggacttggcctggaggggcctcactgaaggcagggtctgggggcacagggtcctggtggctctgcacagccttctgagcgccccctcacccccaccccagggcgcctcagtcctcaggatgctctccagcttcctgtccgaggacgtattcaagcagggcctggcggtgagtactgcaccctgggccagccatgagggtgggtctccttctgcccctcgcccttgacccgggcctctgcccaccacagagggggagcctggggggctccagctgtgctctcactgtgccccgtctttccacagtcctacctccacacctttgcctaccagaacaccatctacctgaacctgtgggaccacctgcaggaggtcagtagcagccagcccctccacagccatcctgttggggtcttgagatgctgaaggtacctgggggcagcacatgcgtaagagaatgggtccagctccgcggctgaccagccctgcagggtggatggagcctctgttgctcctccctatagtggaagccgggatggctccttgcaagaggtgtctgagtgaggctgtggttgaggtcctggccagcagctgacctcaggctacagcgggcttcttgatgggagctgtagagccccttcctggtggtgaggaaactgccctcatggttcccgcctctgcctggaactctggagcctgacattcaaccttctccccactcctggctgccctgtgccccccgctggcgccacgggcatgtctctgcacacagctccaccaccctcagcaggaactctgccctctgcccctgccccggctcgagttcctctccatcagaccccgcacagcccctgtttgtagggcagatccccagactgccacaccctcctgccttcccccagaggccgccgctcctctccctcccccagggttggagtccacctcctctccatcctgcccccatcatttccgctgacatcatttccctgacagctgccccctaccccttccctgcagctctgcccaatgctagcgtcttaagccagaggacagacatgtcctctcctcaccgacagcccctccagagttccgagcctcaaattcccgtccagcttctaccccactgttgctgctgcacttccagtccaggcctgtctcaccagggaagcgagacccaggatcttgtcacagagtcacagctgaggtccgggtccctgctgggcaatttccaaccccctagaccccaagatgctgctgacaaaatgacactgtcattgcctgggtctcccccactaccttccttgccctgccccaacttcccctttgcgttccctcctaagccaagctctcctccctctcactcctctttcctgagaccctcggccggcagcccccagctggttcctccccacatgctcttctgccctctgtgtggccccgttcttaggtgattcctttcttcagttattaacaaatggggttggctttctgttgtgatgacaaaggcaaggcaggtgcatgagcaaagatccaagaagacaagaagacaacaacagtgcccctgagtcccgccccacaccccagtccgagtgcacttccctcatgcgacccccagggccccgtcccccacccctgcctgtgacacctgaacactggctttctctcatctctgtctcctctttcttgtcctcctcccagtgttgttcaggaagagccatgggcatcctgggcaccccctccctgacatacacacctcagggtggaccacagaatggagggcctcatagatttgctgggaagttctccagctcgtccagcactgagcagccgaggagaggcagagctggacggtaccctggctcccggctcccagcccagtgcccttcccaggcctcccatacaagtggccccccggggtcgaggcgagaatctgcaggagatgccctggatggcagggactggagggtcccactgatggccacgccctctcgctccacccacaggctgtgaacaaccggtccatccaactccccaccaccgtgcgggacatcatgaaccgctggaccctgcagatgggcttcccggtcatcacggtggataccagcacggggaccctttcccaggagcacttcctccttgaccccgattccaatgttacccgcccctcagaattcaagtgagcagatggggtcactgaggcatggtcaggtgggtggggtagagggcagttactaagggaccatagtaggactggcctcctgtggtcccagccccagccactgtagacagaccctccctccagagccaggagttcaggggcactcggtgccagagctgggcagaagctgggagcctgggcagctgctcctcactggcagtgaccacaccgccatctctcaccacctctggatctttaattgcagctacgtgtggattgtgcccatcacatccatcagagatggcagacagcagcaggactactggctgatagatgtaagaggtaatccagccctgccttatgggcagcagcccccaccccatactcctagctcctggcccatgttctgagggctgtgatgggccattccattcaacaaatggacttgacttctttggttccaatctccactttgctgctgcttcgctgtgtgactctgggcaagttaccatcccgctctggtctctagttcctcttctataaaatgaggctaagagcaatactccattagttatgtgaggattaaaggagagaatcctaggccaggcatggtggctcatgcctgtaatcccagcactttgggaggccgaggcgacctggggtcaggagttcgagaccagcctgacaaacatggagaaaccccatttctactaaaaatacaaaattagccaggtgtggtggtgcatgcctgtaatcccagctactctggaggctggggcaggagaattgcttgaacctgggaggcagaggttgcagtgagccaagatcgcaccattgcactccagcctgggcaacaagagcgaaactctgtctcaaaaaaaaaaaaaaaaaaaaaaggagagaatccacataaaatgcttaaagtagtgcctggcacatgttatgagcagccctactcagcaaggcactgaagaagcgaagggcatgacaagtcatcctttgccttggccaaggctacagatgaaggaaggcaagaagttggaggcattctagtgctgtgctgagtgctttcagagtgtatggttggggctagtgaggtatggggacatggagcagggaataagggagattcaagttcatggagaggtcagggagggcttcccggaggaggtgagctgagtcttagaggaagagtaggaatcagacaggctaatgtggcagagaaaagaattccaggcaaagggaatagcaagtgccagggatagaggtaggagagagtgtggggactgagtgtagctagggcagaggtgtgcccaagagataaagctggtccccaagggccccaggggctgcaggagacagtggatggggcaggtgggaaatgagcaacctattggccctgacctctggctgctgaaacaaagtatgagaggagtgagggaggagggggacccacagggaggaaggggcactaagccccagaaagagacagcagcactgggggtctgggtgaatgggaggggaagggagaggaggagctgcctgtggttcccacttgggtgacaggtgtgatggagtgtggaggagggcaaggaggaggaacagcctggattgctgagtgtgagcggcctggcagctggcctggccgtgcagagcctagggaggcagggcaggttctgaggtttggggtggcatgtcatcttcatgggttgatggtctgtgaagccactggcagcccagttcctcatcccttccttccccacccttagcgtctccccagcagcttgagggtgaggtggtgccaggctgcgggggcagctgctcttgcaagaggtccaggggtcagcccatggcctctgagcagccctgcccaggtctcgtccctctccacagcccagaacgatctcttcagcacatcaggcaatgagtgggtcctgctgaacctcaatgtgacgggctattaccgggtgaactacgacgaagagaactggaggaagattcagactcagctgcagagagaccactcggtgagtgtctgccacccctcgccctgccccctgccccaggacaggcaccagactgcaaggcctgccacccacagccaacccatggtcacatgctgtgcttcgcattctaggccatccctgtcatcaatcgggcacagatcattaatgacgccttcaacctggccaggtgagtgctccgctgcctggctcagctgcagaagctcgtgacttcagcaagtctgagtccacaatgagggcccctgctcctcctgctgcccttcccatatgccacgtgctgtgccctgagctcctgtgctccctggacgtccctccctgggtccccacacacccatttcacagatgaagaatgtgacaccttgcccgaagtcacacagtagttcatgacagccagacagaggcttgtccaactccaaagccatcctctactccacagcaccaagctttttgtttttgtttttgtttgtttgtttgtttgtttgtttgttttgagacggagtctcgctctgttgcccaggttggagtacagtggcgcgatctcagctcactgcagcctccacctcccaggttcaagcgattctctgcctcagcctcccgagttgctgggattacaggtgtgcaccaccatgcccagctaatttttgtatttttagtagagatggggtttcaccatgttggtcaggctggtctcgcactcctgaccttgtgatccacccacctcggcttcccaaagtgctgggattacaggcatgagccatggcacctggccatgcccccccgctttttttttttgagatggagtcttgctctgtcacccgggctggagtgcagtggcgtgatcttggctcactacgacctctgcctcctagattcaagcgattctcccttctcggcctcctgagtagctaggattacaggcatgtgccaccatgcccagctgatttttgcatttttagtacagatggggtttcaccatgttgaccaggctggtctcaaactcctgacctcaggtgatccacctgccttgccatcccaaagagctgggattataggtgtgagccaccgtgcccagctgcaccaagcttttcctgaaggctgactatgctgggccactgttctaagtgccaaaaatctgggctggacagggcaggagggatgcagtatggataaacaggtacttattgagcacctactctgtttggggtgaggtactctaagctcttggacatgagtgatgtcacccacagacaaggacatttgtgagctaaatgtgtacagaaggcaggaggaagaaaggcctagagtgcccagaaagtcagaagaggtggtcagagttaagaacacgggcttcttgcccttttaaatctcagctctgtctctcgtgaggtgtgtgaccttgggcaagtcacttcacttctctgagcctcagtttcctcatctgtaaaatggggataataagcaaaggagtggaactgccaatgggtgagggtggggccttgtttgtggcaccacccagcagccatgtagctctttttccatggcaaatgcctgagctggctcagttgggaatctgggacctccggctccaggagtggatacagggggcctaggggtgtggagcatctttgagggcctgggttggggttcccaggctgtggctgggctgggtggaggtgctttacttgggcccctctgtttattcccagtgcccataaggtccctgtcactctggcgctgaacaacaccctcttcctgattgaagagagacagtacatgccctgggaggccgccctgagcagcctgagctacttcaagctcatgtttgaccgctccgaggtctatggccccatgaaggtacggaggtgcatggtagggttcaagaaccagttcgccccagtgcctgaaagtgcactattaggaagttaatagactattgcctactggactcctggtcagggaaccttcaaaagcaaaacaaaaaaccaaaaaaaaagaaagattgccttgtcaggttctctcctgagagcacgcaggtgaaagagcgagccggagggacatggaggtgagtgagcaggcactgaggaggtgagtgaggaggctgcgtggggcaaaacaataaaggtcgcggagacttcagcaacgtttgttgatttgaaatatggggaattaacgctttcagaaggcacagaaaaggccaccatgctgagggccagaagacctgtcttttgccagctgtgtggccttgggcaaccctttctcagacccagttaacttctctgtcagatgggcaggcctctacctgcccggccagcccacctgcgctatgagagagatgtgggtattggctgctttggagtatcttaaggctgagcataggggcctatttgagggctgaggctcccgcttgggagaccaaaaggaaactcgagcttattctggatgaataagctacatccataggatgctcactgcagcagtttataaaagacaaaaagcaaacaaaacacaaatacttaaacgtctaaaggttgaagattggttaaactgtagaatatccatttcagggtgtgatatgtagtcattaaatcatgcttgaagagatcttttttcattaaaaaatgttcaattatcaggccgggtgcagtggggctcatgcctgtaatcccagcactttgggaggccgaggcaggcggatcacgaggtcagcagatcgagaccatcctggctaacacggtgaaacctcgtctctactaaaaaaaaaaaaatacaaaaaattagccaggcgtggtggcgggcacctgtagtcccagctactcgggaggctgaggcaggagaatggcatgaacctgggaggtggagcttgcagtgagccaagatggtgctactgcactccagcctgggcaacagagcaagactccatctcaaaaaaaaagaaaaaaaaaaagttcaattatctgttaatatccattatggtaaatgagagattttggtaaatgaagtttcaaccctcttactgctttccccacattccccatcctcctaatgtagttaaatcataatatttagtcaaatcagtgttaagcatttgctttattgtgattatctaaatagtattctctgctgagccatgtagagcactatgtttatgtttccttttttgtacacagttacaaatgtatcacacaataggtcaagtttttgtttgtttgtttagagacaaggtctcactctcttgcccaagctggagtgcagtggtgcaatcaagcttcactgcagcctcaaatacctaggctcaagggatcctcctgcctcagtctctccattagctgggacctcagatgtgcaccaccatgctcttttgtagagatgcatcttttgtagagatgggatctttctgtattggccaggatggtctggaacacctggcttcaagcaatcctccctccttggcctcccaaagtgttatgattataggcgtgagccactgtgcccagcccagttttgagactggactcctcctggagtcctattctgcctgctctcttccagagctgccacacagctcccatgcttggaggtgcctccctctactgtgtttcctgcatcccatggattctttgattttttcccctctcataggggaatacatcttccaggagtttttgagaaagggttcatgagaggtgacttttctggggtagatcatctgaaatgtctttattccactctcacactggattgagcgttcagctgagtttagaagtttcaaggtgggaaattatttctctgaatgtttaaggtcttgctccactgatgtcaggcttgccatgttgctgatgcgatgcccagagccattcttatttccagttatttgaatgtgaccagttttcctcccttctggaaactttgggagcttctctcggtcctggtgggccttggtttgggcctcgtctccatctaccttttccaatcaggactggcattcacatcatctagtattggaagattttgtattgcttctttaaactttattcccttcactttttccagttatctctttctggaacccctgtaatccagcttatttctcttgctttcatcctctagttttctttttctcttctgttttccagcttgttgactttttattctgccccctgggaggttccctcagctttgcacaccacctcacctagaaattgttttcatttcttctgtcgtatttttaaatttccaagtgttctttctgattccagcatcctatgcaatatcttctcttcactctcagaggatatttattacaggctcttatgaagttttcctttttttttttttttccattgactcgtttcctcttgagttttgtgtttgttttggcctcttttcaagttggaggctgagccacccctttgggtttgagacagacacaaacaaaatgcaagtggaagctccatgggaaggtggagtgtgttgtccgggggatctcattgcgaggtgactgggtggccaagtaactcttcactggggaccctcaaaaattagtccatgggtttgttctctcgagacaaggcagtttttccagagagtaagcctctgtattgtgcaatgaggctggtagtactcccattctaggacacaggagggaagggaactggggtgccacctttcagtatggaaactttcacctctgaccctctttgcaatccagcaaccctcccactgtggtctggtgaccccactttctgagccccctggttcaatctctctcatggggtggtgaggggtgctgccctctacaaggagggaagtggggacttgggggttgaatgactccttctgtagactttgacttcatcttcctgtttgcagtccttacctcccctctgtcccttgctgacttgtccctttaatttttttatttatttttatttatttatttatttttgagacagaatcccactctgtcacccaggctggagcgcagtggcccgatcttggctcacttcaacctccacctcccagattcaagcgattctcctgcctcagcctcctgagtagctgggattacaggcgcctgccaccatgcctggctaatttttgtatttttagtagcttcggggtttcaccacgttggccaggctggtctcaaactcctgacctcaggtgatccgcccgcctcagcctcccaaagtgctgggattacaggcatgtgcccccatacctggccttgtccctttaattctgagtcttgtcacagcaagttcccttgcttctgtctccccttctgcagattctcaattgcaaattctcccactctgccaagcctggtacatctccctttctgcgcgtcccagctgcctaaactatattgaccttgcatccgctgttgcctctcctgttctttgttattgggggtttattccttttacatttggacgtggatccaggtgggcacagaaatcaacctgccatgtcaaaccagagtccacaaaggattttactagcatggggtggggcttacactacaatgttaggagaaaaatgccatgtgaagaatatgctaagtaaaaaagaaaaaactatagaaaaaagaaggtgtaaatgcatcaatgtggaaactgtagttttggtgagctcctgggtgtgttttattttctgcatatacttctctgtgtttcccaaattccctacaataagtcatggaatttttttttttttttttttttgagatggagtctcgctctgttacccaggctggagtgcagtggcgtgatcacagctcactgtaacctctgcctcccgggtttaagcgattctcctgcctcagcctcccaagtagctgggaatacaggtgtgcaccaccacactcggctaatttttttgtggttttagtagagacgtggtttcaccatgttgcccaggctgatctcgaactcctggactcaggggatccacccgcctcagcctctcaaaatgctggaattacaagtgtgagccactgcgcccagcaactcatggaatatttatgattgtgtagggaaaacccaacattttatattaagaaatggtgacccgtagacaaagaatattgcaactgactaaggctttaagcagaaagaaactcagctcagttatttgaactctagacttctatgggcccctttgagcactgtttggcctcaggtgaggccctgacctctgacgtctctgccagcgcctgccccccaacatcagaggctctgtggggctccaggcaggtcaggcatgagtctttgatgagattcatattttcttttccccagaactacctgaagaagcaggtcacacccctcttcattcacttcagaaataataccaacaactggagggagatcccagaaaacctgatggaccagtgagtgggagctctcatgggtttggaagtcctgggcaccccggggagtcaagagcaacatcctggcagtgttctctgccgcagctctcaatgcgggggcaccaggcagggagagacccccacccaggagcagggaggtcctgccctgaggctccatgtggcctgagggcccatcggacctctttatacaaagacccaaactgaaactctagctcaccccactggcttgaggttatacagtttctaggtgttgaaactggggctggagcctgttcctgcccttctgggtcacagggctgctttggggaccaaggaacctcaggcccaaggcacaaagcacatacagcgggggtcagagggccagttaggccacagagccttaggcagggtgccggcctggggttgtgtgtcaagaggtgaatcttggctggagttcgccaggtgtgctaaccgcgtgtcacccctggggcaggtacagcgaggttaatgccatcagcaccgcctgctccaacggagttccagagtgtgaggagatggtctctggccttttcaagcagtggatggagaaccccaataataacccgtgagtgtctcccctgcgcctcctctgccagtcttcatctgcccccaacagccccgtcctcagcagaaccctgtcccaccctccccgctgctgttccacacctgacctccctaccccacaccaggatccaccccaacctgcggtccaccgtctactgcaacgctatcgcccagggcggggaggaggagtgggacttcgcctgggagcagttccgaaatgccacactggtcaatgaggctgacaagctccgggcagccctggcctgcagcaaagagttgtggatcctgaacaggtgagtcttggcgcagggtgggactgcgagagccctctccccacctggagaaccaggcaggcctccacactcctcgccagatccttcacgtgacccccacagacctgttgaggtggaggcagtatttccaaagtaaccggtgcagactggaagctttaataagtgatagagacaagatatggactcaggtctgggtccatgtcctctgttcctagctgctgtggcctcttagcctttacctgacaacaactcgtcttcccttctgtcaaaggctctggtgtagctggacctgggtcttttcaaacatccagctgggcaccccctcaagcccttggatgagggtccccacctcccaccatgtgcctcatatgccattacctggatgcagtaaagaagagccacccttgggcagggtgtggtggctcatacctgtaatcccagcactttggaagactgaggtggatggatcacctgaggtcaggagttcgagaccagcctggccaacatggagaaaccccgtctctactaaaaatactaaaaatacaaaaaaaaaaaaaaaataggcatggtggcacatgcctgtaatcccagctacccgggaggctgaggcaggagaatcacttgaacctggcaggcgaaggttacagtaagcccaaatcgctccactgcactccagcctgggcgacagagtgagactccgtctcgaaagaaaagaaaagagaaaagaaaagaaaagaaaagaagggccaccctcagtgtcaaagacgggagtgaccacccacctggtgccagggcttggggcgctaggactccttccttcattgattcattgtcaaatatttctatgtcaggcatgacactagcttagccagtgaccctgtgaccctgcttaggtgactcagttttccatctatagagggaagaaggaccaaggggtccctcagcccctggcaggccgaggggatgttgagaggatgcaggcataggtgatgtgcgtgggacagtccaagttctctcctgagtcacctgaattagcagtagctgagacagcatctggccctcttaggtacctgagctacaccctgaacccggacttaatccggaagcaggacgccacctctaccatcatcagcattaccaacaacgtcattgggcaaggtctggtctgggactttgtccagagcaactggaagaagctttttaacgagtgagtctgtggaatgggtgtcagggacagcgagcgccgaggctggggccccggggggtggcctgtgcgggtaagacacgccgggggcactaaccagaagtggacaaaaatcagccaagcctgggggctagggtggggcaggaatggaaagacaagctggggtatgggccgtcccttttcccatttggaaggaaaacgtggcgtgtgggcgtattctccagaagagaggggagtgaggaactcggcagtcagacctgtgttcaagctgtgactcccccacatcctagtggggtctcccagggcgtgtcatttcatctcctctataatcatggctccctacccagtaggtgtgaggatgagcctccttagttcccggcctccctcacagttcacctctctccctccctgcagttatggtggtggctcgttctccttctccaacctcatccaggcagtgacacgacgattctccaccgagtatgagctgcagcaggtaagaagtcattccccagacctgggctctgcctacttccttcccaggccaaaggggcactccattcttctcccacgtggccctgagggagcacaggctccacgccgccaggccttcctcatttacagaggaagccgagtagccagactttggaaatgttgataattcaatttaaaaaattcatcttgggatttttgtataggcacaaaagggaagagtggtataatgaacctccatgtacccgttacccaggttcaacaattatcaacattttgccagtactttttccgggcgggcaatttttaagcaaatcactgatcatgtaattttacctctaaataatttagtcatatgaaaaataaacgcattcttttattttttttattttttattttttttttgagatggagtcttgctctgtcacccaggctggagtgcagtggtgcgatctgggctcactgcaagctccgcctcccgggttcacgtcattctcctgcctcagcttcctgagtagctgggactacaagtgcccgccaccgcgcctggctaatttttttgtatttttagtagagatggggtttcaccatggtctcgatctcctgacctcatgatctgcctgcctcggcctcccaaagtgctgggattacaggcgtgagccacggcgtccagcttttttttttttttgagactgagtctcgctctgtcatgcaggctggagtggtgcagtggtatgatctcggctcactgcaacctctgcctctggggttcaatcaattctcctgcctcagcttcccgagtagctgggattacaggcatgcgcccccacacccggctaatttttgtatttttagtagagacgaggtttcaccatgttggccaggctggtctcgaactcctgacctcaagtgatccacccacctcggtctcccaaagtgctgagattacaggtgtgagccactgcgcccagcaataaagggattcttaaaacataatcacactgtccttagcaaacccaggaaaatgattatcttcttactatcatatacccaaggcatattcaaattttctaagttgtttataaaaggtctttttacaattgatatatatgcttgaattagaagcttgacaaagtcaacttggattaagttagtttgtcttttttaaaaattgagatataatttgctgggcgtggtggctcacacctgtagtcccagcactttaggaggctaaggtgggtggatcacctgaggtcgggagttccagaccagcgtggccaacatggtgaaaccctgtctctactaaaaatacaaaaattagctgggtgtggtggggggtgcctgtagtcccagctactcgggaggctgtggcagaataattgcctgaatccaggaggcggaggttgcagtgaaccaagattgtgccactgcactccagcttgggcgacagagtgagactctgtctcaaaaaaaaaaaattgatatataattcatggaccatcaaactcaccattttaagtggttttcagtaaactaacaaggtagggtgggtggggtgcttcatgcctgtaatcccagcactttgggaggccaacgcaggaggatcccttgaacccaggagtttgagaccagcctgggcaatatcataagatctcatctctaaataaataaataaataaataaataaataaataaataagctgggcatggtggtgcatacctgtagtcctagctactcaggagactgaggtgagaggatcgcttgaaccaggaaggcagaggttgcagtgagcggaggtggtgccaccgcattccagcctgggtgacagagcaagaccctgtctcaaaaaaccaaaaccaaaccaaaccaaacaaacaaacagaaaaaaaccatgtggtacaaccatcactactgtctaattccagaacatttttattacgccaaaaaaaaaccttgtactcattagcagtcactccttattcctacctggtcccctcagcccctggcaaccactaatatactttctgtctctatggatttattacctattctggatgtttcataaaatggaatcatatacacacagcctttttgtgtctgtctgccttctttcacttagtgtaatgttttcaagattcatgcatacggtagcagggatcattcttttttatggctgaataatggtccattacatggatgtaccacattttgttttcagctcatcattgatgggcatttgggttgtttcagtcttctggctgtgatgaatatcatggaccttcacgtgcaaattttgtacaaacatgttttaatttatcttgggtatacacctaggagcggaattgctgggtcatttggttactctgtgtttaactttttgagaaactgacaaaatgttttccaaagcaactgtaccattgtccattcctattagcagtgtatcacatgagggttctaattgctccatgtctacacttatctctctttccctctttttttagtatagtcatctagtgggtaggaagtggtatcattatggttttcagttatatctccctaatgagtaatgaatgacatgatgttgaatatttcatgtgcttattggccttatacacatttgtgtatctttggagaaatgggtaaaactgactatttttcttttcgagagagggtcttactatgttgcctaggttgtccttaaattcctgggctcaagcaaccctcccacttcagccttctgagtagcttggattacaggcatgtgccactgtgcccagtcttttgctattttaaaattgggttgtctttttattgtaagagttctttatatattctgaatattagacccttaatcagagatagggtttgcaagtatttctcccattctatggactgtcttttcactcacttaataggtcttttgatacccaaaattttaaatcttgatgaaatcctatttatctgttttttttccctttggttgcttatactttatgtatcatatctaagaaagtattgtctaacccaaggtcatgaagatttatacctatttttttatttcaaaaaaatttttcaaacccacaaaagacctgacgatgttttttctaagagttttattggccaggcatggcggctcacgcctgtaatcccagcactttgggaggccaaggcaggtggatcatgaggtcaggagttcaagaccagcctggccaagatggtgaaaccccgtccctactaaaaaatacgaaaattagctggatgcagtggcgggcgcctgtaatcccagctactcgggaggctgaggcaggagaattgcttgaacccgggaggcggagtttgcagtgagctgagatcgcaccactgcactctagcctggatgacagagcaagactctgcctcaaaaaaaaaaaaaaaaaaaaaaagagttttattatgttttcactcaaacgtaggcatttgatctattttgacttaatatttgtatatgatatgaggttggggtccaacttcattccttttgcatgtggatatccggttgtccaagtcccatttgttgaaaagactgttcttctcccactgaatggtcttggcaacctagttgaaaatcaattgacggtaaatataagggtttgtttttggattctcaattctatttcattcatctatatttgcatccttatgcctgtaccatactgtcctgattactatagttttgtagtgagttttaaaattgggaagtgtgagtcctccaatttgctttttttttttttgagaaagggtctcactctgtcacccaggctggagtacagtggtgagatcacagctcactgcagcctcaacttcccaggctcaggtgatccccccacctcaacctcctgagtagttgggactataggcacatgccaccatgcccggctaatgttctgtatttttctgcagagacagggtttcaccatcttgcccaggctggccaactgtgttctttttcaatattgttttggctattctgggtcccttgcaatttcttatgcattttaggatcactgatcaatttccgcaaaaaaaaaaaaaaaaaagtagttaaaattttgatgggattgaatctctagagcaatatggggactattgccatcttaatgatgctaaatcttccagtccatggacacagatttatttgggtcttttttctttttacttaggtgttctttaatttctttcaaaaatgttttgtagtttttggcattccagtcttgcacttattttgtcaaatttattcctaaatattttattcttgttgatgctatcgtaaatggaattgttttcttaatttcattttcaggtttttcattgctaatgtatgggaatacaattgatatttgtgtattgctcttgtatcctgcaaccttgcagaaatcattagttctaatagattttttaatggattccttaaaatttttatgtatgcaaacatgtcatacacatagttttacttcttcctttctggattcctttcatttcattctcttggctgattgcctggctagaacctccaggactgataactcttctaatttgtaggagtattttttttttaaacccatttatttactgaagcaactggatcatttgtggtatagaaatttccacattttagatttggctggttgcttcattagcccctctctactctcttgattggattgatattataataaaatattacacctgaaggccagaatctccctgagccaggttttgcctgggattgtcattttgcaacctctgtgttcacaaggactttgcccgggagcaaggtggacgtcctgcctatccctggaacagggtgtggtcccatccatggggactctaaagtgggagtggaaagccagaggcctgagagagctcctcctcaaggctgttagggacccagccggactgagaatcttttgtttttctggcagctggagcagttcaagaaggacaacgaggaaacaggcttcggctcaggcacccgggccctggagcaagccctggagaagacgaaagccaacatcaagtgggtgaaggagaacaaggaggtggtgctccagtggttcacagaaaacagcaaatagtccccagcccttgaagtcacccggcccccatgcaaggtgcccacatgtgtccatcccagcggctggtgcagggcctccattcctggagcccgaggcaccagtgtcctcccctcaaggacaaagtctccagcccacgttctctctgcctgtgagccagtctagttcctgatgacccaggctgcctgagcacctcccagcccctgcccctcatgccaaccccgccctaggcctggcatggcacctgtcgcccagtgccctggggctgatctcagggaagcccagctccagggccagatgagcagaagctctcgatggacaatgaacggccttgctgggggccgccctgtaccctctttcacctttccctaaagaccctaaatctgaggaatcaacagggcagcagatctgtatatttttttctaagagaaaatgtaaataaaggatttctagatg

SEQ ID NO: 22 - DNA, 23139 bp, Homo sapiens
tggagagggctggtgttttggctgagacctgagagaccagaagaaatctgatggccagaaccaatgtttaggtccctaaagagaacaagcgtggcgagcaaagggggccagtatgggtggagatcagcgagggaggggggcagagatgagtgcccgaagcacacagtaccttggcatagggagggtttgattttacctacaaatgccattaaacccactaaggattttaacaaaaactacaattacattttaatttacattttatgttttatagagacaaggttcggctatactgcccaggttgatctcgaacccctgggttcaagcgatcctccctactcggtcccccaaagtgctgggattacaagcgtgagccgctgcgcccggccttttaatttacattttagccttccggttactggaatctttgatggggaatgagttatagtgaggcaagagcctctaacattctaggagctcttttcccgttcggggcctcaatttcccgttctacaaaggcgggtgggagggaacggggtcccaagtagtactggataaagaggtggccgatcgcaaacgctgagcacttcaaaactctgggcagagcgcttccgcgcctctcctgctatttcaccctggccacaggctagccgccgaggccggtcatccgctctctccgcggaggagtcaacgccacggaagcagcggcggaacctctctaagaatccttccagcttgtgctcttctgtccagggcagccaatcgcgaggaggagagtagtcagagggcggcaccctccccggtctgggccgagttattggctggtggtagcgtcgctcgcccggcagtaccacgtgacggcctcggccgcgggcgtttacactggctctgcctccggcatctcttcgccggtgcgtcctcgccgcgcccgtaggtcccggcagccgggccccgcctccttcggagtccgagcgatgggcggggaaagggacaggcaggtatagctctgtcggcgccgcggtgtccacctcagtcaggccacggtggaagacgcgtgccgcggcgcctggttgcctgcagcggcccggacccgagaggtgagaagagggaagcggaccagggaagagggagggagcggtgctggccgccaagcggtcagcgggcccctcccagagtcattctgcctgggtccccgcgcggtagaatcccagatcaggggtcgccgccgtggagcggggcgtgcgtcaggttatttcccgggtggtccggggccgggcgagtggcactgcaccctggtgatccgggcctgcccgtctggctggcggctgcccacccgccctccatcccgcgtatctcgccgtatctcgccgggtgccacgcactccgctgcttttccagtcctcgttgatccgtctcgaacctagatatctggaatagggatcgaggagataggagccaccaccacctcggacagatggggaaactgaggccggcacaggcgagacggcttggttatcttggttattaaaaatcacacacccgattaagtacaaaatcaggacctgttctttcggactcacacactaagttggtattatttcactggatggatggaaacactgagaagacagagagggcccagagccttgcctaaaaatacacagcaagtcttttgcagagctaggacttgtacccagctctccaaactcatagactatcagcctgggctccttccttgcacagattggggatcacagtgagttagaaacattcagaacttaaattgccttccggcgcccattctagttaacctgtcttttctccttgtccccaacagttctttatgtgaaatctacaactaatgtgatatgcaatactagattaagcagaactttttgtttttgaaaattgaatcaataagaaatggagggccaaagctgtgggaaaggaatggaccctttaaaatcaggaatctcaaggcaggatatagcaagggacagagactaatagctgtcgtttattgagtaaatgctatgtgccaggcactgtggtaggtagttgtgttagccttacaaaccagcaagttaggtaatgttaccccattttacaggtcagaaattgatgctgagtacagtgaagttttacaaaaccattgccatatgactgctgagcagtatagctgggatctgaacagagatctgtttgacttccagaacacatccagtgattctccaagtgtggtcctaagctcactcgttcagcatcatctagcgtgtggagtcctggatctcatccttggatttgcagggatggtcctaagaagctaacggctctctgtatttgacaattattgtactgtaatgtgctgcctcctaggggaagatctagaggtgaacatactctgggctaggggtaatttttgagggaaaaaaatcacttttttttaatttctgatttgactttttttttttttgagaccaggtcttactctgtcatccgggctaggagtgcaggggcgcgatctaggctcactgcagcattgacctcgtgggttcaagcaaaccttccacctcagcttcctgagtagctggaaccacaggtgcacgctgccatacctggctagtttttgtagtttttgtagagatggtgtttcaccatgttgcccagtcaggtttcaaactcctgagctcaagcaatcctcctgccttggccttccaaagtgctgggattacaggcatgagccactgtgccctgcccacacttttattttttattttcccccatgattgacagaaggataatcacgcttttagtgaatgtaaacccccaggcagatgcttgccaagcttaatttcttgacataagcttggttttggcatgtgggggcggaagagtggggttggagagttaagtgagaatggggaaagtaactcctttttccttatcatatagctgttaaattctaattcactcaacagatacttgctaagcatttattaggtgcaagacatgttcaagacactgagaatacagctttgaacaaaacagagcaagtcagtgccctcatgtgaaagacaattaacaatgtgtggtatggaatggtgagaagagctatggagaaaaataaagggcataggagtgcaaggcagggctgggcccaggaggaagacatggaaatggcagcaatggcagtggtgctatatttatttatttatttatttatttatttatttatttattttttgagatggagtttcactcttgttgcccaggctggagtgcggtggcgccatcttggctcactgcaatctctgcctcctgggttcaagtgattctcctttgtcagcctcccaagtagctgggattacaggcacatgccaccacgcctggctaatttttttttttttctttttttgagacagagtctcactttgtctccaggccggagtgcagtggcgtgatcttggctcactgcaacctctgcctcccaggttcaggtgattctcctgcctcagcctcctgagtagctgggaccacaggcatgtgccaccacgtccggctaatctttttatttttagtagagacggggtttcaccatgttggccaggatggtctcaatttcatgacctcgtgatccgcctgcctccgcctcccaaagtactgggattacaagcgtgagccaccgcgcctggcctaattttttgtattttttagtagagagggggtttcaccatgttggccaggctggtctcgaactcctggcctcaggtgatccacctgccttggccccccaaagtgctaggattacaggcatgagcccctgcacccggcctgctattttgcatatttgtttaacttttttttttttttttttttttttgtggagacaagatcttgctatgttacccaggctggtctcgaactcctggcctcaaagtgatcttcctgccttggcctctcaaagcgctgggattacagacatgaaccactgtgcctggcctctgttttatatattgtatctaggaagggaccgatttatataaggtgtcatttgaggttgggcaatgagcaaaggccccaagggcaaaggctgcttgatattttcatggactggtgattggaacactagtgcataggaggaagcaagacagtggcagttttaggctcatgcatagaagcttataccaatgtttttagaccatatttggtaggagatagggagccagtgcagatttttggggagcatatccaaatggttgacctcatcttgctaatgaatgcttcttttgaagaagaggcatagtgctttaaaaatgtaggttcaggctgggctcttcctttgctcatgcctataatcccagcaatttgggaggccgtggcaggcagatcacttgagctcaggagttcaagaccagcctggacaacacggcgaaaacctgtctctacaaaaaatacaaaaaaatagctgggcatggtggcgtgcacttgtgatcccagctactcaggatcgcttgagcccaggaggtggaggttgcagtgagctgagatcatgccactgcactccagcctgggtaacagagtgagaccccatctcaaaaataaaaataaaaaatagccaggcgtggtggctcacgcctgtaatcctagcactttaggaggccgaggcgggcggatcacgaggtcaggagctcgagaccatcctggctaacacggtgaaactctgtctctactaaaaatacaaaaaattagccaggtgtggtggcgggcacctgtagtcccagctacttgggaggcttaggcaggagaatggcatgaacccaggaggaggagcttgcagtgagccaagattgtgccactgcactccagcctgggcaacagagtgagactctgtctcaaaaataaaaaattaaaaaaaaaatgtaggttcaatattagaggaaactgagtgaccattatacaggaactgtgtactatttttacagcttttctgcaagtccacagttatttcaaaataaaaattttttttaaatgtaggttcaataaagtgtttaaggctgaactatgcctgcaactttcaaatagttgaaaaacaataatgacaaaacccatataagtatggagagagagtgtgttaacatcttatgaactgtaaaattgctaaataggtgaattgttagtatggaagtgttccatgtatcattctttcaacttttctgaagatttaaaaacagcttcaaaataagcaatcaagcgacagtatacgtttgaatcaggcaggcttgttcaagtcatgattcccctacttacaagctgtgtgtggctgggcgcggtggctcacgcctgtaatcccagcactttgggaggccgaggcaggcggatcacaaggtctggagatgagaccatcctggccaacatggtgaaaccctgtctctactaaaaatacaaaaattagccgggcatggtggcaggcgcctgtagtcccagctactcaggtggctgaggcaggagaatcgcttgaacctgggagatggaggttgcagtgagccgagatcacaccactgcatttcagcctgggcaacagagcaagactctgtctcaaaaaaaaaaaaaaaaaaaaaaagctgtgtgaagtattggaaaattatttctaaactacatattctagtctagtttatttttattaaaaatatatttttaattatttttttttcttacactgtagctcttaccagtctagtctgagatttttccatataagagaggagacttactttggttgttgacttgttcacattaatgctgggttaatgttaagacttcaggttttccacaaacttgagatctttaggttgtttttaggtcgactctagttttcctgtaattatctgatgtatatacacttacagagactggcataggcaatctattagaggaaaaaggttaggagtcaggatacttgggttctggatccatctctgcctttaagtagcaaatgatttcactaatctgaacctttatttatttattttattttattttttgagacagagtcttgtctgtcacctaggctagagtgcagtggcgcaatctcaactcactgcaacctctgtctcctgggttcaagtgattcttgtgcctcagcctcccaagtagcagggattataggcatgtgctaccacgcctggctaatttttggatttttagtagagatagaatttcaccatgtgggccaggctggtcttggactcctgagctcaagtgatccgcatgcctcggccttccgaagtgctgagattatagttgtaaaccactggtacccagctgaactcttatttcttaccaaaaaatcatggcggttggatttcttgatctctgtctagctctaaagtcctgtaattcaggaaaactaccacttaatgatttgatcatttagtttgaactgtctcatggttgggacagagggttatgacttgcctggagtccagggctcctgacaacaggttactttttctactgaccctcactgcctatggttttagattgtgttatgtgttaaaagcagttacttaaacacacatacacaaacatgcatatcacaccatatttacaacaggttgtgaagctcagttttaaatggcctagatttcttaggaaaatcccagtacaggttgagtatcccttacctgaaatgcttgggactggcagtgtttccaatttctgaatttttttttttaatatttgttttatacttactagttgagcatctctaatctggaaatccaaattgctccagtgagcatttcttttgagcatcatgttggtgctcaaaagtttcagattttggtgcatttttgattttggatttttgaattagggatactcaacctgtatctgattaatatgtcatcaaatctatccaatgaagctgtcatattttaaaactaaatataactgtttttagaaaaatattacaaaaagaaataaaaccttgcttagatacttcctcccaaagttgtgtgtgtctggggacttaagaaatacatttcccaaggctgcgtatccagagtattggaacattcagtgacgatttcttaggaattgaaatataaactgcaattgaaaacaaaatgacttagctgggcacagcggcgtgtgtccataataccagctaatctggaagctgaagtgggggattgtttgaggccaggagttcaaggctgcagtgaactatgatcatgccactgcactccagtctgagcaacagagtgagactgtgtctcttaaagaaaagaaaaagaaaattatgtaacaggttatattcaagctactcttttccccttcagataagaattagactttatagctttattgtagtataattgacatacaataagctgtacatatttcaaaggtactctctctatatatatacataaaactgtcaccacaatcaagatagtgaacatatccatcaatccccaaaatctcctcatgcccctttgtaatctctctctcctaccccaccttacttcctatcccgaaatagccactgatttactttctgtcactataaattagtataaactttttttctttctttcttttggtggaggtgtcaggaaatgaacttgaggactgattagtttgcattttgtaaagtttttgtccctgaaatctccttcatctaatattaatgtagtgtacaatgcagtggcatgaagtacgtgcacaatggtgtgtaaccattactactatttatttccaaaacttgaaatggaaactctgtaaccagtaacaccacttcccccagtacccagtaaactctattttctttctctatgtatatgcctattctctctctctctgtgtatatatatatttttgttgttgttgttgttattctgtcacctgggctagagtgcagtggcatgatcatagctcacttcaaccttgacctccttggctcaagcaatcctccctcctcagcctcccaaagtgctgggattataagcatgagccaccctgcctggcccattttgccttttctagatattttgtataggtagaatcatacaatacttgtccttttgtgtcctttttttttttttagatccagctctttttttttattttttatttgtttgcatcgtgtctgtcttttgcttaacataagggtgttaagtttcctccatgttgtagatgaagagtatcagaacttaattcctttttaatagtcaaataatattccattttatggttataccatgctttatctgttcatctgttgatggacacttggattgttttcaccttctggctattgtaaatagtgctgttatgaacattagtatacaaatatctgttcgagttacagtttttagtcctttgagtataagcggaattactaggtcatatagcagtgctgtgtttaactttttgaggaaccaccaaactgtttttcacagtgttggcaccattttacatttctaccagcaatgtatcaaatgtatcagctgtttttttttaattttatttatgttattttttagacagagtctcgctctgtcactcaggctggagtgcagtggcgcaatcttggctcactgcaagctccgcctcctgggttcacgccattctcttgcctcagctgcctgagtagctaggactacaggcgcccgccaccatgcctggctaattttttttttttttttgtatttttagtagagatggggtttcaccatgttagccaggatggtcttgatctcctgaccttgtgatccgcctgcctcggcctcccaaagtgctgggattacaggcgtgagctaccgtgcccggcctcaactgtcttttttttgagacggactctcggtctgttgccgcagctggggtgcagtggcgcgatcttggttcactgcaacctccacctcctgggttcaagtgattctttgtgcctcagcttgctgagtagctgtgcctcagcttgctgagttacagctgtgcaggtgtacaccaccacacccagctaatttttgtatttttggtagagacagggttttgccatgttgcccaggctggtctcgaactcctgacctcaagcgattcacccgccttggcctcccaaagtgctgggattacacgtgtgagccactgtgcccggcctcaaatgtcttttaaagaaacaaaaatttttgtccaacaaaagtcaaagctaattcttcttggaaaagtttttgttaaaataactttttaaaataaaaaccattctgtccatcaaaaactttattagatacttcctgtatgtgcctaattctatgctaggtattatgatagtacacaaaaagtgtagaacatcttgaataattttaatctagttaggaagataaagcacatattcaacaaacgtttattgaacatataaatggaattcagcagagaatgaggtactgtagacctttcactctgccccatttatttttccaattttggcttctctcctgtacttgagaaccacatttctaattgcctgctggacacaccatctggacatattataaaaatctcaaatctaaaaaacccaaagtcagattttttgctgcttcctatctttccattttcttctccatcttcctgtatatcatccttccttttgtgtgatccttctcagatttcatcttagatttgtctgtgtatgtcctttaagcaccacctcttacctagttgtaccactgaaatggcaaacctcctgccctttcctgccttggaagttaggcctttggtaactgtagcttagaggatgaactcgtgacttcttggaattgcataaaaactaatccttcactccagccttatctcctacaacttcacccttggaacctagtgtgaccttttcctgggtcttggactatactgtgatctttcacttgcctgagttaccttttccctttctattaacgttgcagcttcctacttcacgttggcctgcagtgtattctccactctcagaatactctaaacctttctgttatggtacctagaatgctgtttaaaactctgtcttaatccactgattttgggtagaaattgggttattactcattttagcaagaatttactgaacctctactgtatgtgctaagcatcgttcttgataatggaaatataataagtacaagaaagactgtaaataatagttttgcttataagtaatataatttcagaagtctgaagtgctatgaagaaaataaagccagataaggatatagggaatgctgggaaggaggtgttattttatttggttgggatggtcaaggaaggtttctgtgaggaggtgacatataaactgaggccaggcatggtggctcacacctgtaatcccagcactttgggaggcagaagtggaagaattgattgagcccaggagttcgagaccagcctgggaaacatagcaagaccctgtctctacaaagaaataaaaacaaattagccaggtatcgtggtgtgtacctgtagtcctagctacttgggaggctgaggtgggaggattgcttgggcctaggagttcaaggctgtagtgagctatgaccatgccactgcactctaacctgagtgacagagtgagatcctgtcactaaaaaagaaaaataaaagctgagacccaaaggatgagaacatacctgtatagatctgggagattattattctaggcaaagacaacttgagcaagtacagtgaccctaagaatggaatcaacttggcatgttccagcaactgcaaaaaagccagtaggaaataagggcaaaaagggaggcagtgttcagatcttgcaggctattagagtattccaggtgagagaggatggtaggacaatagtgagaagggattggattacaaatagtttgggcagtggggagaggataaatatattattcaaggcacaacagacaggatttactgatggattatatatgggagcatggcataggggaaagaaagattgacacctaagtttggggtctaggttctgatgcattgtgtctagcacagtggttagcttatagtaggagcttaaaatatgtgtgtaatttaatgaagaccagtacccaacctctaggagctcacatagaaaagttagccaatccagctggagaaggcttgttgacacttgaggacattaatggagtaagcatgggttgcaggcccatttaacacagatggatctgagttttcctctgatgagttgttgtcttttcctccaaaggatccttttcctctcacagtattaacttctcagtctagggcaagggcctggaaagtagcctgtgccatcctggttgtaggcatcagtgaatgaaatggagaggaatacagaaggctttgctcatccttggcatccctgggcctttatagtgctgtgatcttccctggacttgtctgacaacagtgagttagaggatccgatggtactatatacatggagaatctgtcttggttgtacctgtttatagtttagttttctttttcttttttcttttctttttctgagggtctcattctgtcacccaggctggagtgcagtggtgtgatctcagctcacttcagcctccacctcccaggttcaagcgattctcctgcctcagcctcctgagtagctgggattacaggcgtgcgccaccacgcctggctgacttttctatttttagtagaaatgggttttcatcatgttgcccaggctgatctcgaactcctggcctcaagtaagccacccgcctcagcctcccaaagtgccgggattacaggtgtgagccactgtgcctggcctagttttgtttttctaaaaccaccttcaactattttttatctgtaaaagacaaaaggtaaaatattagttgctttagtggaaaaagaatgaaataatataacatcagaccagaagatatatgattatttgccaaatgagtgatatagtaagtgactttctcaaaatctttcagggcctatgcattgcctgcagattcaagtctagctttcttaacccggcataaagggccctccagaatccccctcaggtacctttgtaagctcctcccactaatcccccataaccattctctgttttaaacataacattctcatttctgattcttttcctccaacattagaactattgctgtttgtgttttcttctcccttacccatattccaagtcttctttcatcctttcaaacctgaactagacttcagagcccaggttagatatgttcctcccttgaaaactttctaaacaaactattcttaaactctttcatatttctcccctgcttagatgccataatcatagtagtcagcagcttctagttttatttagcagtgagtttgtagcatacatacagaggtaaaccaaagcatgattatggaactttgtgggttcatacttgtaggactgtttctgagtgaatacataagtttctaagagctagagatgggaaaggaccatggccatgaatgtagagaaagggagagttgggaacaacattgttgatattattactggatcactttgtgtagcagctaggtgaaactggaatgtgtagagtagctgaattttaaggtgttcagaaatatctgaaattagagaagctaattatagataggtggtaggagtagtaccatattaaaaaaggatctattcttgggatcccaaaatatgcattttattaccttgctctgtcatttataagctgaataaattactaaattgggccagtcctttcacttttaacctatgtatgtctttatatttaaagtgggtttcaagtagacagcatatacttgggtcttattttttaatcctatctgacagtctccatttttaattagcatgtttagaccattcatatttaatacgatatgtttggattaaactctaccatcttactggctgtcttcgtttgttccatctgttttttatgttttatcttccttttctactttctcttgagttgagagtttttttatgattctattttatctctactattattacttatacctttttaaaaatgtagtggttactcttaggtttaaatgtacatgtttaatcagagcctatgttcaaataagataccatttcacatctagtataagaccttacagtttgctgggcatggtggctcatgcctgtagtcccagcactttgggagaccaaagtaggaggatcacttgagcccaggagtttgagaccagcctgggcaacatagtgagacctcatctctatttaaaaaaaataataataatcagaaaattttaaaaagactttaaaattcccaattccccctcccattctgtgtggttgttgtcacacatttattttgcatatgctataaagtacattcccatttttggtttaaacagttatcttttagagcaattaaacattttttaattgaaaaaatgaattttactttatcttcatttgttccatttcctggactttctttgttatgtagaactgaatttctgattggtgtattctttttggctaaagaaccttcctgaaactgtctctctctctctgtgtgtctctctctgtgtttctctctctttccccatctcttcttctccttcccactccctctctgtctctctccctgtctcccctcatctctctctcccgttccccccacatatatatggtgctggtctgctggccttaaatcctctcagtgtttatctgagaaagtttttatttctttttcatattttattttatttaagacagagtctctccctgtcacccaggctaaagtgcagtggtgtgatcatggcttattgcagcctcaacctcttaggctcaagcagtctccctacctcagcctcccaagtagctgggaccataggcacacaccaccatgcctggcctcttatcttttaaaatattttttctaggtaaagaattctatgttaaaagttatatttctggggtcagatgtggtggctcacacctgtaatcctagcactttgggaggccagggtgggaggatcacttgaggccaagagtttgggaaccagcctggggagcttagtagcaagaccttgtctctacaaaaaaaattaaaaaatgagccaggcttggtcgtgcacacctgtaatcctcactactcaggaggctgaggtgggagaatcacttgagcccaggagttcgaggccatggtgagccataattgcatgtcactgcacttcagcctgggcaacagggcaagaccctatttctataaaagatatatatttctttgatacaaagataccactccatcatgttctggcctccatgatttccaataagaagtctgctataattcttatttttgtttctgtataagtaatatatgttttttctttgtcttcaggattttctctttatcttttgttttcagcagcttgaatatcatatgtgtaggtgagggtttttgttttctttttgtttttatatttactcttcttggaattctctaagattcttggagatagattatatattatatatatatgtattttttttttgagacagagttttgctttgtcaccatgctggagtgcagtggcgcgatcttggctcactgcagcctccgcctcccaggttcaagcaattctcctgcctcagcctcctgagtagctgggactacaggagcgcaccaccatgcccagctaatttttgtatttttttagaagagacggggtttcaccatgttggccaggatggtcttgatctcttgaccttgtgatctgcctgccttggcctccggaagtgttggaattacaggtgtgagccactgcacccggccttttttttttttttttttttgagaaggagttttcctcttgctgtccagacaggagtgcaatggcgtgatctcggctcactgcaacctccagttcctgggttccagcgattctcctgcctcggcctcgcgagtagctgggattacaggcgtgtgccaccatgcctgactaattttatatttttagtagagaccctgtttcaccatgttggtcatgctggtcttgaactcctggcctcaggttacttggatctatattttgatgtctcttattaattttggaaatttcttggccattatatcttgaaatatttcttctgcccattctctctcttcttttggtattctaattatgcatatgtttgatactttgatgtgtcccgcagctcttggatgttatgttacattgttgatattgggggttttttgttttgtttcgttatttaaacttttctgcgttttagtttagctaatttctgtttatctgtctttttgagttcatcgattctttctttggctttcaggtctagtaatgatcctatcgaaggcattcatcatctctgttactgtgtttttcacttttagcattccttatttgattttttcttacagtttccatttctttgttttactttctatgtgaatttttatctatattcttcccagatagcagccatactgggcaagatttggattcccttagttttttcttatgtctcttttgcatatcttaggtttggaaaaaccttttcacccagaaatcaccaagagctctccaaaataggacgttggtgcactcaagctagctctagaaagcaggaaatgacaggagagtcacagactggttgcattgtagagcaaagagctgctgggtgtatccatcaacctgattgattttctcagggtcagtggtcacctaagtctattctttctttccttatctacttcagaagaccatcaaaatatttactcatgttaaacctaaacaaaatgaatatgggttacttttacatatcttgtgttcttgaataagtcataggtcctggattttggcagtttggtaacgtaaggtttatagaacttcacaagggcccatttttctgtcagttccaaaacaagaaacttcctgagtccttcatctaaaatatattgtctcggctgggtgcagtggctcgtgcctgttatcccagcactttgggaggctgaggcggatggatcacctgaggttaggacttcgagaccagcctgaccaatatggtgaaaccctgtctctactaaaaatgcaaaaattagccaggcgtggtggcatgcacctgtaatcccagctactcaggaggctgagataagagaattgcttgaacccaggaggtggaggttgtagtgagctgagattgcaccactgcactccagcctgggcgacagagtgaaactctgtctcaaaaaaaaaaaaaaaaatgtctctatctggccacagtcacaaatgtttgttcatttgttcattcattcattcaaatgttttgtaagcctgctatctcagcgttactacattccattcagattacactgatgaacaagatgtctttcctccaggagctagagagattcctacttcactaatacaagagtgtggttagtactctaatggaggtgcaacatgctatgggacacagagggtgtagtatttcatttgggctaggggagattggttagtgctttctggaaaaggtagcattgtaactgggttttaaaaaattattaggatcttgacaggcaaagaggtggatggccattctaagctaagtaaacagcttatgtaaaggcactaattcatgaagcatttggtaaacaatttatgttctattcctttgagagcctggttcattttcttctcttactccggttattagacttactatttgttgttgtcctttctctttttctggctatttttacctcctttgttttcctatagttcctcatggtagatcttatggcattagttttatagtctaggacacagagatgaaggatcacctgtattgcctccaagtggaagtgcagggcaacattatttctctatttaacctgtgtttcagtgtgtgtacttagaatagtaaagtgaatcttgcatgaatgtaggccctgcccacagggcagatgactccatactagaacatagtggaatagacaaaaaccttctacagcatgtatgagacacttggcccatcgaccctcttcatgccctttacattcagcaccctcatattgacttctctctcctctttcctaccaagcaagggagtactgttcaaagacgcaaatgcattctgccctagtttctttttattgctaaaaacatttatctttaccctacaacctacttttctatttattttcaacatttagcaggttgtttaaaaagggaccaaaaaataaaacaggaccatcttccttgtttcagggactggtaggcaggcattaaggttaaggtaggggttaagaccagatcctattttgcagtctgcctgggaggtgaaaaacctgggaagaagaccgctggtagcatatgtatggaaaggagacaggctgcccttacatcttttcaggaggaaaaactgccagggggagccaggcatatatggagaagaatccttaatggtttatactcttgggaagtcctgtacccagccagttatttgctttgacttggctgtttaaggtctggttctggtctttttttttccccctaaccaagacaaatgaggctcaattaaggaaaagggacataagatacctattccaaaactgaattccttttaactctcatgaaatgacaaatagaattgttagtatatgtgagcactgagaattactttattgatgaacactggtattttctctggtgtaggaagctgaaccatctatctccagaaatgtcttcagaaagtaaagagcaacataacgtttcacccagagactcagctgaaggaaatgacagttatccatctgggatccatctggaacttcaaagggaatcaagtactgacttcaagcaatttgagaccaatgatcaatgcagaccttatcataggatccttattgagcgtcaagagaaatcagatacaaacttcaaggagtttgttattaaaaagctgcagaagaattgccagtgcagtccagccaaagccaaaaatatgattttaggtttccttcctgttttgcagtggctcccaaaatacgacctaaagaaaaacattttaggggatgtgatgtcaggcttgattgtgggcatattattggtgccccagtccattgcttattccctgctggctggccaagaacctgtctatggtctgtacacatctttttttgccagcatcatttattttctcttgggtacctcccgtcacatctctgtgggcatttttggagtactgtgccttatgattggtgagacagttgaccgagaactacagaaagctggctatgacaatgcccatagtgctccttccttaggaatggtttcaaatgggagcacattattaaatcatacatcagacaggatatgtgacaaaagttgctatgcaattatggttggcagcactgtaacctttatagctggagtttatcaggtaagcagcaatgaaacaattggttatttctagaaaagtaatctagtacatgaaatctcatatctctaagggatctgaggaatcacaataattaaaggtatcatttattgagagttcaggatatatgaagggtagaggcaaaattcaaaccctaacctgactccacaggtaatataaggctggttcactggacctccaccacccagtacaactccttaattttacatgtcagaaaatcttggctttgcttgagattatttgtggctggttattggcagagtcagcattagcagttaggcaagtgggtaacagaatggagttgagagtgcaggagtttctcactttttttttttttctggagacagggtctcactctgtcacgctggagtgcagtggcactatcttagttcactgcaacgtccgcctccctggctcaagcagtcctcctacctcaacctcctgagtagctaggactacaggcacatgctaccacacctggctaattttattttattttattttattttattttttatttttattttttgtagagacagggttttgccacgttgcccaggctggtttcaaactcctgagctcaagcaatcctcccgtcttggcctcccaaagtgctgggattatagccatgagccaccacacccagcctcaaattctaaatgtctcttaccttccattaaaattgctgatctattgagcaactcttactaaaggtagtggttgtcttggattgttggggagggagggaaaaagttggggaccacagtttcatattatcagccaggagaaaggataagaaatcaaattcttgagtctcccatagaatccactaatctgtcattatcatcatgcccctggcttttggcatccaggagtcagtgccaggattaaaccttctctaatgcaggcatttcaaaccaacaagggaaggggaagagtagctcactttagttggtgctcagatgagtggggagggagagtgaagatggtgtgaagatgagctgtctactcatatataatggtaaataataagtctacttacttatttattatttattcatttatttataaagagacagggtctctctatgaccaaactcctgggctcaagtgatcctcccaatattgcctccccaaatgctgggattacaggcatgagccatcacgcccaaccaacttttgcctttttgttagtatgtcccaccaagaaggaagaaggcataacaattctgaaaacttattagacagaggaaaatataaagaagtaaaaatgcagaatttttattaatatgggagacagtgtggcataagtacatatatactgcatgagaatggtttcttagtatgaggttaaagataatctacaataatttttaaagtgtgattctactttgatgtaaatctaattttttgttttaccaattaaaacttcacttgtacacttgctcttagccaagaggctgagaagccgtaagacttcacttttacagtagtgatttgtaatttaaggaaaatacttggtttcttaactagaataattttttccaatttgaagttttcttgtggatccttgagaatgtttttcttttaaaagaggtctgttctttgtgatgggaagaatgaaaaaaaaaagaggtatgaaccttattcaagtttaagaaacgtatgaaaagaaagaaatccaaagttcctgtctcacctgggttaataagtaacagtgtgaccttgggcaagttgcttagccctttaaacataattttcatctttgtaaaatgagaagattgatatatgattgtgtttattctagctctgacattctgtgatgctctgatgatatgtctccatgcaagaaatgtcaggataatataaaatttagaagttcttttccatttatatttaacacttctatatccttccttccaggtagcgatgggcttctttcaagtgggttttgtttctgtctacctctcagatgccttgctgagtggatttgtcactggtgcctccttcactattcttacatctcaggccaagtatcttcttgggctcaaccttcctcggactaatggtgtgggctcactcatcactacctggatacatgtcttcagaaacatccataagaccaatctctgtgatcttatcaccagccttttgtgccttttggttcttttgccaaccaaagaactcaatgaacacttcaaatccaagcttaaggcaccgattcctattgaacttgttgttgttgtagcagccacattagcctctcattttggaaaactacatgaaaattataattctagtattgctggacatattcccactgggtttatgccacccaaagtaccagaatggaacctaattcctagtgtggctgtagatgcaatagctatttccatcattggttttgctatcactgtatcactttctgagatgtttgccaagaaacatggttacacagtcaaagcaaaccaggaaatgtatgccattggcttttgtaatatcatcccttccttcttccactgttttactactagtgcagctcttgcaaagacattggttaaagaatcaacaggctgccatactcagctttctggtgtggtaacagccctggttcttttgttggtcctcctagtaatagctcctttgttctattcccttcaaaaaagtgtccttggtgtgatcacaattgtaaatctacggggagcccttcgtaaatttagggatcttcccaaaatgtggagtattagtagaatggatacagttatctggtttgttactatgctgtcctctgcactgctaagtactgaaataggcctacttgttggggtttgtttttctatattttgtgtcatcctccgcactcagaagccaaagagttcactgcttggcttggtggaagagtctgaggtctttgaatctgtgtctgcttacaagaaccttcagattaagccaggcatcaagattttccgctttgtagcccctctctactacataaacaaagaatgctttaaatctgctttatacaaacaaactgtcaacccaatcttaataaaggtggcttggaagaaggcagcaaagagaaagatcaaagaaaaagtagtgactcttggtggaatccaggatgaaatgtcagtgcaactttcccatgatcccttggagctgcatactatagtgattgactgcagtgcaattcaatttttagatacagcagggatccacacactgaaagaagttcgcagagattatgaagccattggaatccaggttctgctggctcagtgcaatcccactgtgagggattccctaaccaacggagaatattgcaaaaaggaagaagaaaaccttctcttctatagtgtgtatgaagcgatggcttttgcagaagtatctaaaaatcagaaaggagtatgtgttcccaatggtctgagtcttagtagtgattaattgagaaggtagatagaagaatgtctagccaataggttaaaatttcaagtgtccaacatttcccagttccacagtgggaaattttgcacacttgaaattttaaccaagtggctagatattattcctcctttgaagctaatggcatttgtatatacacactgcagcagagcttgtagctggacagagtcaaaaagaagaaaatacggtttcaggctttcttgcagatatgaagtattcttggaatgcaataagtatgtattgaactgtactgtaaagtagctccaaaacttaattactctcctgttttaggggttatacatttggactgtgcattctccaagagatgaagcggtgaagttgggatttacattggaagtgctgtagacttctttatgtggctcagtggagagagggaaagaatgttgcacctgctctagtaccataggtcaagaggcttctggatcacaaagtcataactagacaggtttgttcttgtagttttctatccccagtctttgctccccagatggcagtagtttttagtaggaaagtgccattcctgtccttaaggcacagtctcatcagaagtctaatacctgggcaggtttataacatcctgagagccagcctgacattagacagaataccctttgtaatacattggaaatttttactcatgcctttttgtttaggataaataggtaagcacaaagagctcttcaaaatcagaaaaaacaataggagtccttccttgtcttttctgtgatctctgtccttgtttctgagactttctctaccattaagctctattttagctttcagttattctagtttgtttcccatggaatctgtcctaaactggtgtttttgtcagtgacagtcttgccagtcagcaatttctaacagcattttaaatgagtttgatgtacagtaaatattgatgacaatgacagcttttaactcttcaagtcacctaaagctattatgcaggaggatttagaagtcacattcataaaacccaagtgctatgggtgtattattcatgatagctggcccacaggtcatgaattgaggaggaatttgctttcaaaaagcaagaatgtccaacactgaaagtttatagttttatatttggaccttgaaaggtaagaaaaaaccaggttctccaaagttaggaatagggaactaatttatgaaacagccatctt

SEQ ID NO: 23 - DNA, 2320 bp, Homo sapiens
ctggtgtagactcaatgtcatgcaatagtcaggtatactgaagagaaacaactgcatgtcttgttttttaattttattattttagagatgctgacttgctatgtggactaggcagaactcgaactcctgggctcaggtgatcctcccgcctcagcctcctaagtagctgggactacagcttcccgcgacctcacccatcttgctttttaatttaaagcagagtctgcatatcatctgaagtcatctctctttggggacatcccacaggtccagaactgccagacggtagtggggtggccggctaggctgtggggagcatggagatttatctgcaaaggaggacctggacaaatgttcccccacatcctctcaggcgaagagaatggacgggagagagaggccgaccagtgttccccgtgttgctgtgtacggaggagccagtccgagggaccgcggtgtggacagggacaggcaaggcggggaaggaggagaaacgaaagccacattggtggcgggtgctctgcacacgactcgctccctaccacacgccccccgctccgcacacgaccgatccggggactggagcaggagggctgcaccgggactccgggacaggcccagttgaaaacggcggggcgagggggtggggtggagacgcccgcgacgccaaggctggggtcccggaaagcgcggggaggagggtggaaggcaaaggcaacttcggggaaactgggaaaggcggccgggacctcggggacactgcgtaccacccggcgcacagcccctcccgcgcaaacccgagccaaaggggcggtcgagcggcgcactcggagcggagctcaggggatggtgcgcccggcacttatgctgggctcagcccagcccagcccaggaccgctggcggtgcgaacccagccgggcgggtgcaagcgcggggcagggcctctgcgcccggccccctcccctgagtagaaaagcagccgcaggctgtggcgctccaccacgccgtccgggtgggcctagcagtcgctccatttatcgcttgagatctccagccttaccgcggctcgaaatggaccccaactgctcctgcaccactggtaagagaagccgaccctgcgccctaggaatcccatttcccagccccagtactgagggtctctgggtttgaggaggtcgcatttaagttctgagcggaagggaattcctttacttccttaggtgctttcttcctgatctcccctctgagagcactgccctccctcctgggcctctgggtcagagttaaggatactgagggtcaaggcagtcccgctccacatcacccagttggttagggtcctgctggctgggccccagtgttctcctccaggctctgagcaatcagggtggactgggggctggagacatttgagtcttcagggttcagcacagaaggttctggctggcaatctcagtattcctgggttgggtgtgcccctgggaccttcctggtagggtaaaacaggagggtgcttgcccttcccagcgttagtggagaggacaggggctttccctgagtgggaaaggagctctgagggctggccctgcacaaaggagggggcactggagactcattgacccattgctgtaccttcttcatctcactcactgcccactgcgtttttctcttccttgcaggtgtctcctgcgcctgcaccggctcctgcacgtgcaaagagtgcaaatgcacctcctgcaagaagagtgagtgcggggccatctccaggaatctggggctgtggctgagattgggagggaacccaaggctggccctgagtgcatccttctggggaactgggctttctttgccctcattgcccgtgtcattccctctccaggctttctgccctaaattcagatggggcaggacagcatttttctcttgggacacaaatcccaactgtagcatctatggtttcagaacagagctgtgccagacgtaaaaagcttcctctgggtctgggttctgagctccagccaggcttgctattggggcagggcggtgcccggtcaagtctactgctacctctctctccccttcttccccaggctgctgctcctgctgccccgtgggctgtgccaagtgtgcccacggctgtgtctgcaaagggacgttggagaactgcagctgctgtgcctgatgtgggaacagctcttctcccagatgttaatagaacaagctgcacaacctggattttttttcaatacgatactgagccatttgctgcatttctttttatattaaatatgtgagtgacaataaaacaattttgacttg

SEQ ID NO: 24 - DNA, 30753 bp, Homo sapiens
gcattatttttgttcagcactttagggattctagattatttttacacacattaactcatctaatcccacaatgacccccagagctcagtatcattttccatttgcattttacaatgtagtgaattgggtagaagtgagacagcaaccagctctcagttacacagacagataatgaaaatagtttactttttgctcaatatgagtttagcaaaggctttcacgtaaaccgtttcactccaaccttatggggtatataaaatcaggcactttacactcattttctcttttcatcctcatgcaacgctgggcactaaatatcgtatgctgtcattttattgatgaggaaactgacgctcgaagtagttaaatcctttgccaaagatcacacagctgcagcctgccccttattaagtgcacacttcgtgatgccatgcaccctgttcagtaatttacaggcgttattatctccccaacagtcacagaatatcggtattcttattatcccatttactgatgagaaaagtgggttcagagagggtgagtgactggtccaagaccacacagccagcaggtggctgaggcaggactcaaagggctagcaaaggagcaagtctggaactcaaacccagttctgactccagctctgtgctgcttctctcgcaccccgaccctgggtgggggcctcgctccccacccagctgaaacaatcaacgaccctctggtagaccaggacctctcttcatcgaagtcttaggtagccacgcttgccaggagaaggcctttcttccttcaccctccctggacagatccgggtcaactggaggtggcgggcgagaggaccgatccgcagggcggtggcgggcgcagggcgaggctgtgcagcgaacggaagaggctccgggaccgcctcgcgttccagcagcggcgcggggtgggtggggcgggagtgccgggcctccgccccctccgcctgcctttccttcctccctccctcggtccccggggccggcggacccgcgggcaggcactgcccgggctggacgacgtctggccggctcccggcgaagggcagcggaggagcggcccagagcgcgcagctagggcactggcgaaaccccgggacagtccctctccgtgcgggggcggcgcagagcagtcccatccccggggtcccgggcgcggctgactgccggctggttccctgcgcgcagtagctccccgagccgggctgcaccggaggcggcgagatggtcgcgcgcgtcggcctcctgctgcgcgccctgcagctgctactgtggggccacctggacgcccagcccgcggagcgcggaggccaggagctgcgcaaggaggcggaggtacgccgtgtgtacctggcggagagcggtgcgtgtgcttgagacctgtcagaactcggcagtcaggccacccggcagtcccctgtgagcagacaatctgcgttaccctacccctgtcctccgcccccttcgcacttgaacataaagagccgggcagttttttccccgtgccaggctggaaccacacaggcacgcggatccgcactgatgggctggggtgggtgcagagacgagaccggacagacgggcaagagcccagaggggacatcctaccctagtttggcacggggccactctccctcaccacctaggctggggagaatgaggttcattcgtcggatgcccccgaaccgtgtggaagcctcagtttggtgctgtggagagggtaccgctggctggccgggacgcgggacacagcgctggcttcctggccggggaccgccgctgacctgcttgggcaagccatttaaactgctcagaactagtttttctgtctgtaaaatgggcaagagtagtatactctcaagagttgcttctaaggagctttaaacggggcttcaggactgaacttaagggggcaggaaggtgaaccttagagagctccctttccattttcttgctttggactcaacttgcttgttgtaggttgcgcaaggggaatttttttgtgaggtaggggtggggatcaatataaggcatctattttctagataaaagtgtaggccggacgcggtggctcacgcctgtaatcccagcactttgggaggctgaggcgggcggataaccttaggtcaggagttcgagaccagcctgcctaaaatggtgaaaccccgtctttattaaaaatacaaaaattagccagacgtagtggcaggcgcctgtaatcccagctactcgggaggctgagataggagaatcacttgaacccgggaggcagaggttgcagtgagccgagatcctgccattgcactgcaacctgggcgacagagtgagactctgtctcaaaaaaaaaaaaaaaaaagtggttgtaataacacaacagtatcttttctttcctcccccaaagaagcatgtctgcttgtgttcttacttcttctcaagaatacggccagggtctccactattttaaggagaagggatatgaacaggttttgttttgtttttgttttgagacagagtctcgctctgttgcccgggatggagtgcaatggctagatctcggctcactgcagcctctacctcccgggttcaagcgattctcctgcctcagcctcccaagtagctgggattataggcatgcacgatcatgccaggctaatttttgtatttttagtaaagacggggtttcaccatattggccaggctggcctcgaactcctgaccttaagtgatccgcctgccttggcttcccaaaatgcttggattacaggcgtgagccactgcatccagctggaatatgaacaggttctgaattactgagcccaatgctctgccctgagactcttgctcctctaagagcttctttcctgccctcaaactgcccgttgagagcttctcagtatcctccctactccccttccctcgaagggcaagctgaatttggggaaactgcagaatgaagagggccctctccgaatgcctcatccttccatcacccagctcccatcactactggggaatatttggaaatgaccctgcttcaacaagggatcatctctcattgccttccacccctccccttcctagcactgggctcttgctctgtgctctctggtttctctgcatattcagagaagcactttgtttctctgaattgagactcttacaacatcaagtacagagtctttgcagccccaggagaaggcttctgtctgccaagccaagtcttgttaagagtcccaccccacctccctgcaagtgcgggtcccaggcaatccctcgcaagggaacagaggcatatctctgctgcccatgcctgtggtggccccagatggagagaatttcatcttggggtatgcttgggaaacttaatatccagcagattgagtttctttcagtctatttaacataaatttggggaaggggatttttaactctgagaacaagaaaatattttaaaagcataaaaactctggaaatgtgtaatgggtgtgtacgtgtctctatatgcctatgcaagcacacgtgtgtgtgtatatatacatatattacatatatacacacacaactggggatgtgtctatgtctatatgtgtttttgtatgtggttaattgcatgagcttcagtgccagacaaacccatacgtaaaccatggataactcatttaacctctataaacctcagttttcttctccatacaatgggggttaataatgcctatttcacaagattgttgtatggtttcattgaaataacatatgtacaatgcctaacacagctcataggacatagaaagcagtctataaaaggaagttgctctcagtgttgttattacctttatcattactttagagaactgagcttcggcttaaagtctgggtttgaagactagctcccccacaacaataatacaggacaaaatatgtaaggcaactattttcagcattggacaacagacagcacagagctgcaattcctaaagagagtattttagttactatgactacattacaaattacccccaaaacttagtgaagtaaaacaaccatttattaagttcacagataactgtgagtcgaaatttcaaatagggcacatcagtgcagcttgtctccattctacagtgtctggggctggcatcatctgaagtgtgtttagatatttggcagtcgatgctggctgttggctggtggcctcagttatttttcacatggacctatccacatggtctgtccgtgtgggctagtttgggcttccttataacatggtgtctgggtcctggggatgagtgttgggagcggggagaagagagaggaactatatcctttttatgacctactattgcttctactgcactccattggctagagcagtcacagctgcctcccaggttcaaggggagggaacatagaccccacgattgctgagaggagtgttaaagtcacatcgtgagaagaacgtgggaatgggagatactgttgtgtcgtttagggaacaaccatccacagaaggaaaacccagaaagtgagccccacagttgccccagttctttgcttggagacaattcctgactgcagtgcggggaactagacctcaagcagaacacagcagtcctgctgtgctgagtgacaaagctcagcgttcagggctgttgaagtagctggaatctgtggaggggtgcgtcacagaggagggagctatactgaagggggttcccataagtctgtatggggttcactgcaagtccttccctggggactgtgctagcacgtgtagggtgagactgtgtgatgcttaccagagaacagctgctatgtgattgagaacaggaaaaaagactggagaagttgagcagttctggaagatattggcagtctgggccagccaaaatggaaaaaactctttaacaccctgggcatctatgtaaaacaccagcaatgccatgctttaggtgtaagcaccatgaactagagtaagacctactctaacaaagcttggaaatgagtaaacataaaacacttatttcccttgtcataatttctgtaaaagacaactggctgcttaaagcaaaataataacatcataaattggactttatttttattttttgagacagccatggctcactgcggcctcaatctcctgggctcaagtgatcctcctgcttcagcctcctgagtacctggaactacagacacgcaccaccatgcccaactaattctaaaatatttttgtagagatgaggtctccccatgttgcccaggctggtctcaaacccctggacttaagcaatcctcctgcctcggccttccaaagtgctgggattaaggctggaattctactattctacaatagtagaattttatttgcccacccctgcttcccttggccaggtgctgtgccactgtcataactacttcttttacatgtgttttaaagtccaacttaatggccatgcccccttatggccataagttggactttaaaacacatgtaaaagtagcagttatgacaatggcacaaggcaagcgggggcaggtaaatggaattctactattgtaagattagtacatttgtggctgggcacagtgactcatacctgtaatcccagcactttgggaggccggggctggaggattgcttgagccgaggagtttgagagcagcctgggcaacatagagagaccctgtctctacacatttaaaaaaaaaaaaaacattaatacatttgtgaattggaatgtcagtgtgaagtgggaaatgggatgtgtcaagtgggaagtgagagatggaggtttcactatgttggccaggctggtttcgaactcctgacctcaaatgatctgcctgccttgggctcccaaattgctgggattacagacttgaaccaccatactcagcctctacagactaatttctgtgtatatatatttggatatcctggacatttcatataaatgggatcatattatatgtggccttttggaactggatagttggaaactttaacaccactctcccaataatgaatagaaaaaatagacaaaaaaaatcagtcaggatgtagcagacttgaacaatactgtaaaccttcttgacctaattgatgttgatagaaaactacacttgagaactccagatacacattcttttcaggtgcatatcaataatttaccaactgagaccataggctgggccataaaataagtctcagttcatttaaaaaatttaaattttgcaaaagcctgggtgtgatggctcatgcctgtaatcccagcactttgggaggccaaggcaggaggatcatttgaggtcaagagttggagaccagcctgaccaacatggtgaaacctcatctctactgaaaatagtaaaaattagccaggtgtagtggcaaacgcctgtaatctcagctagtcaggaggctgaggcagaattgcttgaacccaggaggcggaggttgcagtgagccgagatcacgcagttgcacttcagcctgggcaacagagcgagactctgtctcaaaaaaaaaaaaaaaaaaaaaaaagccaggtgcggtggctcatgcttgtaatcccagcactttgggaggctgaggcaggtggatcacctgagatcaggaattcgagactagcctggccaacattgtgaaaccccgtctctactaaaaatacaaaaattagccaggcatggtggtgtgtgcctgtaattccagctactcaggaggcagagacaggagaattgcttgaaaccaggaggcggaggttgcagtgagccgagatcgcgccactgcactccagcttgagcagagcgagactccgtcttaaaaaaaaaaaaaaaaattaaatgttgcaaattatgttttcttaccaaaacagaactaattttaaaatcagtaacaataagacatctagcagagccccagatatttggaaattaaacaacacactcctaaattacccatgagttgattcagaaatcatcagagcaatgaaactaaataataatgaaaatacaacatttcatatcaatatttgtgggatgcagctaaagtagtgctttaaatgaaattcacagctttaaattcctatagtaagaaagaagaaaagttttaggtcaatgatttaagcttccactttaagaatctgaagaaagaacaaattaaaccaaaacggcacaggaaagaaagaaataataaaaaacaactgtgtgatcatagagttccttcacttggctgcggtttcctctcctgtaaaataagagggctaaatttcttaaatgacttctaagattctctctagctctaacactgtttggctttggtgtgcttgtatgcttgtgcctctatatatgtgtgtgcctgtgtgtgtatatacatcatcttcctctgtgtccatgtctgtctgtctggatgtgcctgtgttctcaagtctctgtgtgtattcctgtaccctgtgtacatggctctgtgtcccctctgtgcacacaatgtaacaaagttgaggcctttccagagtgggctttgccagggaggagattaagtgcttacaaagctgtgttgtgaacaaacaagttcattgttgcaacttaggaacaagttcagtgggcaacttaggaaaactagagctgctcacagcactagtaagtaggaagagcatgctctgctgagttgcaagattgagaattaacagatgacatcatcaccctgtcccccactcccattccaagccagacactgtcctgtgcttgggtaacacagattcccaagggctctatctatcatttgctttgcttggaccttctttagaacagccaggcaggagtttcaggacctgccttccactgggtggtctagctatatctgtatagctactcccagtgtgccagtaccaggagctggatagtttgtttctccagggagacactggagcttctgtggagtatccacccccagatgcagtgtctgtttctcataccccagagccattcgtttgactttttgtgagtcagaaacccagaagcctgggtgtggaagccgttcccaagaacttagctcagtgactcatgggtatagggtgaatagaagtgcagaagaggctctgaagggtcctagaggaccacagttggtggaaaagcacttgtctagccaattaccaggatttgggtagtggaagcatgaccctaatagcagggagacatggttggacaatatctccctaaacccacccttgatcaaggcattattttgtgccctaaacttagtcccacaagtctagtgagaaccatgagtccatacggtatagttatttggcattagagaaagagtacaagatgtggtctggataaagactaactggctagtgttttccatcttccttaagggcagaaaatgaaaggagggctggccacaatggctcatgatggctgtaatcccagcactttgggaggccaaggtagaaggatcatttgaggccaggagtttgagaccagtctgggcaacatagagagacccccatctctacaaaaattaaaaaattagccaggcacgatggcacatgcctgtagtccgagctactcaggaggctgaggtacaaggatcacttgagcccaggaagtcaaggtttgtagtgagctgtgatcatgccactgcatttcagccagggcgacgagcaagaccgtatctcaaaaaaaaaaaaaaaaaaaaaaaagggaaagaaaaaaagagtgagagagagagaaagaaggagcagggattatagcaagaggtatctaggttacacctagacagaactttgtgactataagactaaggacaaaggggctgggtgcagtggctcacacctgtaatcccagcactttgggaggccaagttaggtggatcacttgaggtcaggagtttgagaccagcctggccagcatggcaaagccccatctttactaaaaatacgaaattagccgggcatggtgtgtacgcctgtaatcccagatagtcgggagactgaggcaggagaatcgcttgtgcccaggaggcggagattgcagtgagctgaagtcatgccactgcactccagcctgggcaacagaacaagactctgactaaaaacaaacaaacaaacaaacaaacaaaaaactgaaggacaaaagaaagaaggagaaaaagaaagggagtcaggcagagggaaggggaagcctttacccaaaataaaggaaaggagctgagttaaccccactgccctgaagtcttcactagctcccaggagccagagggtgaaagcagagcattctggtagcagatgtttatctttacgcaggaacatgcttcagtcctgtcgaatgcctctggcctgttagacgacctgttcttgctgtgatggaaaacaggatcccagcccctatttgaaagccagagcccactgcctgagcaacttctttcctctgctctaaccctgaactttcttgtaaagcagataagagaaatccagccagaaacaccccagtttgacctttttcttaattgagagtcagctccccagtagagagagcagcttggcccttgcccctttagttttaaagcctctgagtcacttgtttaaatgtaaaataaaacatcctagggtagatgtcagaggatcagattagagtactggttctgtcacacactagatcactttggtaagacactacactcccctgagacttaatttcctcatctttaaaatgggaatagcaacacctgtcctgtctatattcttgcaagatcattgtgagattcaaagaaggtgtgatatctttaaaaagctctacagttgcctgggcttattgtgctcctgactaccagaaaatattttcatatgtagaacacatcaaggcagaataccagctatcattcatcttttttttttttttttgtagagacaggatctcactatgaggctggtctcgaaatcctggcctcaagaaatcttcctgccccagccttccaaagtgctaggattgcagacgtgagccactatgccttgccatcctttgcatcttgacttggctaataatgccaaagatacacttgaatgataagcacaatctcaaatagtcactatgggaactaaaataataataaaatgtaacatgagatggagtatatcataggtaaagtgacagtttctgcatgcatttggcaatttttaaattcttaatttcatttctgctgctgaaattctgtgatatggaggatgtctaagaaggtgagtcctggctgggcatggtggctcacgcctgtaatctcagcactttgggaggccaaggtgggcagatcacctgaggtcaggagtttgagaccagcctggctaacatggtgaaaccccgtttctactaaaaatacaaaaaattacccaggcgtagtggcgcacgcctgtaatcccagctactcgagaggctgaggcaagagaatcacttgaacccaggaggcagaggttgcagtgagctgagatcgtgccattgcactccagcttgggcaacaagaagcgaaactccgtgtcaaaaaaaaaaaaaaaacaagaaggtgagtactacacgctcacctaccaaatgtcccttccagcaataaagctccatgaacatagaggtaaaaataacattgttaatggggcaactgtcataaagctttcccagaccatcttcttagatgttgatgatgctcctgcgagaaaggtaaaacagtattctttctcccattttatacattggggcacagaaaggttaagtaactttgtcttagcttacacagctagtcagttgcagaagcagggatagaataacggatagagctggaatatatattagagctctaataatctaatctcctggctgggcgcggtggctcaagcctgtaatcccagcactttgggaggccgaggtgggcggatcacgaggtcaagagatcgagaccatgctgcctgaaacggtgaaaccccatctctactaaaaatgcaaaaaattagccgggcatggtggtgggcgcctgtagtcccagctactcgggaggttgaggcaggagaatggtgtgaactcgggaggcggagcttgtagtgaactgagatctcgccactgcactccagcctgggtgacagagtgagactctgtctcaataataataataatccaacctcctaattttatagaagaggaaactgaagctcagagaggcacaggacttacctaaggacatacaagttagccatagtaccaggaataaaactcaagactctcagtccagtgcccttgccctgccagttcaatgatgcagacttcctgactcaggccttgggttcattttgctgcacctcatcactggtcctgccctgcgcagaaatggccaaaatttcccttccctcaggcactaaataggctaggctatatgcaccctcccaggacaagtcaggactgatgcaggcctagaatccctagcactgtgtgattccaccaagctggctgggtcccaggagaactagttccattttacccagactccacagccactcccagggactttcagaagtgactccccaggaaagtggtcccagccctaaccaagggggtaaggcatgttggcacaagcttttaggccagagtagggtgagtcacctaaggggcacagccttccagcttcctctccattcagctcaagccttgggctccctaagagagaggacgggtggaaaatagagaagagagaaaacctggtccttgaacttcaaggccaggaggagtggtctagactctgcctccttgaagtggggcaggaatggtgccaggtagaactcagagagtccttaagagaaccattgaacaagcccccaggacaatggaagcctagaaggaaaatggcccccaagagggtttgtggtcaagctggggtaagaactggagctccacctcccagttttgtgtcttctcctgggatccctttgtcatgctgccactcctccaccctgaccccacacccctgctccttctactgtgcagagtagaccatttctcttacctttgcaggaggaaactgaggcatgaaaaatgcctcacagaagagggttagggacacctccaggagcagagggagtttcaaccccaccacctcctcacccgggaagttggatctgcctccactccacagaatgtgagagcacccagccctgacagcattaaggagccccttcctgtatgtgttttaaatttttttgaatatacacatgttaagcataaaagtataagggagcccataaatcctgataatccctgttataatacttcagtgctttttttttttttggaaatggagtcttgctcttgttgcccaggctggagtgcagtgttgtgatctgggctcactgcaacctccacctcccgggttccagcgattctcctgcctcagcctcccgagtagctgagattacaggcactggccaccatgcctagctaattttttgtgtttttagtagagacggggtttcaccgtgttagccaggctggccttgaactcctgccctcaagtgatccacctgcctcggcctcccaaagtgctggtattacaggcatgactacgcacagccacttcagtgcttttatagaaatacaaaatgtcaaattcttaaaatttctttttctcattctttcagtggctctgcttggctcgtgtcccgggcacatgctcattctgcttactgagattttaactctgccttgctacctacagggtcccagaggcgagttaggaagaaaggcccaggacttcccctctgagggacccctgaaaaaggccctcacccccaacccccatcctgccctccaccccgtcttgcctgccagagtactaggcacagcagcccagccaggaaacaagagacgctgccagttaatttcccctccctcccactctgtccaaggcttcagagttccagaaccggagccaactccctgataagggctgggtgtgtttgtggagagaggcacaagggagtgccagccatgccgacctgtgacctggtctctcccaagtcactcacctagcaaaactgcctctaaggagacattaattccctggctacctttagaaagtcctctgtccatcctccccaaaggaaagggaggggacaaggaagagaaccaggcatccagctgaggtcaggcaagtctgagacagaagcacctgaattgagaacagaggtgtaactgccatgttcaaagcagttccctttttacagatggattgcattccaaaagtctgttgttaacgttccctctaaggtaaatcaaccagatcaattgtttattgagtatttactttgtaccaggcactatgctaaatgtgcattcttttatttagtccttctgagaacgctgaataagatcaagaataaattgaacttattctcactttgtggataaagaaagaggggcttagagagattaaataatttgtccccagctggctggatgtggtggctcacgcctgtagtcccagcactttgggaggctgaggcggggggatcacaaggtcaggagatcaagaccatcctgggtaacacggtgaaaccctgtctctactaaaaatacaaaaaattagccgggcatcgtggcaggtgcctgtagtcccagctactcgggaggctgaggcaggagaatggcgtgaaccctggaggcagagcttgcagtgagctgagatggcgccactgcactccagcctgggtgacagagcgagactccgtctcaaaaaataaaaattaaaaaaaaaaataatttgtccccagccatctggcagagtcagggttgggaatagattttcattcccaaacctggtggctataccgtgatgccacacgattttgagcaggaaatagcttcccaaattaagccaccagaacactttcaatccattatgcatccaaaaatagtgtacatttgcaaagggaaaaaaggaaacaatagttctgaaatactaatgaattaatgcagaaaaacaatgaaatggactaggaaagttacgtagaatgaggagtctatgaaaagttactttattgagaagaggatgtggaggttgctgaaaatgaatgtgaattaaatccacaaggggaagctggatacttgcaaagatttaggggtttgctggtcttagtatctagcttcattcccaacttgtgcattttccttgagacagcagctatgattggaattattttgagttaagaaatacagcatggtggctgggcgcggtggctcacgcctgtaatcccagcactttggtaggctgaggcgggcggatcatgaggtcaggagattgagaccatcctggctaacatggtgaaaccccgtctgtactaaaaatacaaaaacaaaattagctgggtgtggtggtgggcacctgtagtcccagttactcgggaggctgaggcaggagagtggcatgaacccaggagatgaagcttgcagtgagccaagatcacgccactgtacaccagcctgggcgacagagcgagactctgtctcaaaaaaaaaaaaaaaaaagagagaaatacaacatggtaggcaaggtggcatgcagcacctgtagtcctagctattcaagaggctataggagggtcacctgagtccaggagtttgaggctgtggtgagcaatgatcatgccagtgaatagccactgcactccagccagggcaacatagtgagacccccatctctaaaacataaaacataaaaaaggaaaagaaaagaaaaaagaaatacagcaaagaaaataggggtaagagaagaagacagaaaattatttctgtataggtaacacaacaaggaggggtaaaaattgaggctatgtaggtagaagaattctccttgtagaagaattatgcagctgaggcaacattcttttttatccaaggtgacatttatgtaactttatcagtgagaagggcaatcagggagccaagtgcatcgtctgcccaaagggtagaactggtgataggtgagaataatagtcacacttttctctccactggcctcaaataacttgattactgagagaacagcttccaggtgtgttagggtaggcagagtcaaaggtacctggaccctgagatgttctcaattataccaatttccccagaggagctcgtcctggtccacagctttatatcacctacatgctgaaatattcaggctgctgctttgagctctaggatcatacagccagtgccactttgaaatctccaaggtaatcttaaacccacgcacccccatctgtacctcctgcaggcttcctcatacattaaatagcatcaccttccaagccaaaaacttaggagcatcctggatttctgtctttcattccccaccaattaatccatcagcaggactaaaacaaacctacacttcttatcctggctgacagccctgcctctctctctgacttcatctcacgctctgtttcttcacacttgctgtgctccagccttccttctgttccttaaacatgtcactgtcattcttagcctagggcttttggatttgctgtttcctctgtctggaacaccctttcccacctcattgcatggcaagcttctcattctttaggactcagattacgtatcagctcctcagagactcaactccttcctgaccttccgatgtgaagtttctttaaattattctcagtcatatcacttggtttcttttcttcatagtaccaatttatgtcctttatttacttttttttttttttcttttcgagacagggtcttgctctgtcgcccaggctggagtgcagctgcgtgatctcggctcactacaacctctgcctcccaggttcaagtgattctcatgcctcagcctccagagtagttgggacaacaggtacccaccaccacgcccagctaatttttgtgtttttagtagagatgaggtttcgccatgttggccaggctggtctcgaactcctgacctcaggtgatgtgcccacctcggcctctcaaggtgctgggattacaggcgtgagccactgtgcctggtttagggatgtcttattttttattgtacctagcagggtacctagtacattgcattaattaacgaatgaataaaagaagctttctaattcaaaaaatacatcttttagagagtcaagtttttatatcaattataaggttagtggtaagtgcatttgttgttctaggacctttaatatagctacatttgggctgggcacggtggcttacgcctgtaatcccagcactttgggaggctgaggtgggtggaccgcctgaggtcaggagttcaagactagcctagccaacatggtgaaaccccatctctactaaatacaagaaattacccaggcgtggtggtgcatgcctgtaatcccagctacttggaaggctgaggcaggagaattgcttgaacccaggaggcggaggttgcagtgagccgagattgtaccattgcactccagcctgggcaacaagagcaaaactccatctcagaaaaaaataaataaaataaataaataaataaatatatctacatcggtggggaagataactgtttttttaaaaatccagaattagacaattcacaacccagccatggcagagctagcacctgataagctcctaatcaataccaaaagatattctagagaatgtagttgtttcaggatgcatatgaatagtgtatatgcacgtaacgcataacacatattataatagccactctgtatggagtccctcctatgtaataggcactgtgctaagtgctttataaacactcttgcgattagtcctcacacacacaaaaaaacccctgtaaggtaagtactagtattaagcccactttacagttgagaaaactgtggtttagagaagtatcttactagttggaattcaaacctaggtggatctgactccagagcctgttactgtactgcctagcatgtgctgctagattcctactgatgccgtaagatatgggtaggtactactggcccagttttaggcataaggaagcaaaggttcagaaatattgagtgacttgcctgagatcatcagctagtcagtggtgacctggaattgagtccaggtccttttgactttaatcccagaactcattctgctatagcttatagaccctcttgggcaaaagacaagaggtgagactgggcaggatgtatgtgccctgggcccttggggaccaagggaggggaaaggatgctatggaaaaagcagatattcctctctcccgcaggcattcctagagaagtacggatacctcaatgaacaggtccccaaagctcccacctccactcgattcagcgatgccatcaggtagggtggagggatgtggaggacttggggtaggggtgctaggatgccaagctctgaccatttcctccctcctcctggaagcctggctggctacaccccagggaggcagacttccctgccctcacccttaccactcaccctccccttgcggtcctttcctcctgacagagcgtttcagtgggtgtcccagctacctgtcagcggcgtgttggaccgcgccaccctgcgccagatgactcgtccccgctgcggggttacagataccaacagttatgcggcctgggctgagaggatcagtgacttgtttgctagacaccggaccaaaatgaggcgtaagaaacgctttgcaaagcaaggtgagcactgttaaaatccggctaggccaagatttcccaatgtcttgaagccaatggctaggaaaacagctgagcctgggactggactttgtcagtaacctctcttccctagggcacgggaggagtgggtgaataggacctcttggcttgaggaccatgattgtgaatacagacatttaattcagaatgacacctacattgatgaattttcattgtacaagtgtttttccagatcaaacacaaaacccatgtaattccttgataaattttcaatgcagggcagataaactgttgctaacatttttcatttatatttactgaagttattttcatcagaattcattctttttcataagttattaaacaaatgtgtgatctattgatttactttgtccatagcatatttttaaccactttattgagatgtagttcacatcccatacaatttacccatttaaagtgtacaattcagtggtttttaggatatttgcggaattgtgcaaccattaccacaatctaattccagaacatttcatcaccctgaaaagaaaccccatgcccattagcagtcattcccccttctccccctcccctagcctctggcaaccgctaatccacttctgtctcaatggatttgcctcttctgaacatttcatcatagcacagtttacacattacagtttctgctgtcatgattttcctcttgtaactttattttgtttctttcttttcttctcctccttcttttagccaaatttaatattccaggggttaaatggtacagatctaagatttatgaagatttgattcttttgtcagtttttcacaaataacaagtttcactatgcataattttttttaaagacagagtcttgttccatcacacaggctggagtcagtggcgcaatctcagctcactgcaacctccgcctcctgggttcaagcgattctcctgcctcagcctcacaagtagctgggactacaggcacatgccaccacgcccagctaatttctgtatttttagtagagacagggttttgccatgttggccaggctggtctcgaacccgccttggcctcccaaagggctgggattgtaggcgtgagccaccgcacctggcctaccgtgcataatattaacaacctgattgttttaactaagtctaattttctctgctcaatttttgcagctttcaagatttctaacaagatgggggtttttaaccaggttttcatctatcattaattttactgtgaacactttgggccattgccacttttaatttgtgttgactacttttactgatagtattcattaggaacaggacagaaggcacatagtttgttctcatttcttagctaacctgtaaggaaattgtgggcagttccccttcactgttggagggtggctgtttccaggtgtttgccaaaccaattctgcttcacctatatgcccagccactctgggtcctcagtactgactgcttgctttcctggtaaagcaaggagtcagcaatggggtccggctccggagtcaggatgcccttggtgtcaacatgttctgtgtcccaccgtgtttctgggcaatggagaggaagagtgaagtagaagagcagagagctacgagttcaagaggcactggtagaacagagagcagcatccctggagccagaggccctgggttcaagtctcagctgtgtggcctgggccaggtcacttttctcactgaggctccgttccttcatccgagacataggcccttccaggttgcaaaggagagatggtccttgattaccaggtggaaggggcttgttgtgagaatgcagtggaaagtggggcagccccagaaacagttcagcagctgtactttgacctgagctccggggctgcttccttctggctgtatctcaccttctcatgccccaaaggaaggatctaatagagttcatctgtcactatacaatttcgagcatctctctctctctctttcttttttttttgagatggagccttgctctgtcactcatgctggagtgcaatggcgcaatctcaggtgactgcaacctccacctcttgggttcaagcaattcttctgccccagcctcctgaatagctaggattacaggtgcacgccaccatgccagggtaatttttttttgtatttttagtagaaacgggtttcaccatgttgtccgggctggtctcaagctcctgaccttaggtgatcgcccacctcggcctctcaaagtgctgggattacaggcgcaagccaccgtgcccagccagagcatctctttttgatagaggatagtattactcagttgccacataaaatataggatgcccagttaaatttgaatttcagatgaacaacagatagttttttaaagttaaaaaaagaaacttatctggcagctgggcacagtggctcacatctttaatcccagcgatttgggaggctgaggcgggaggatcacctgaggtcaggagtttgagaccagcctggccaacatgataaaaccccgtctctactaaaaatacaaaaagtaattagcctggtgtggtggcacgcacctgtaatcccagatactcgggagactgaggcaggagaattccttgaacccgggaggtagaggttgcagtgagccaaaatcgcgccactgcactctagcctgggtgacagagtgagactctgtctcaaaaaaaaaagaaaaagcctgggcgcggtggctcacacctgtaatcccagcactttgggaggacgaggcgggcagatcatgaggtcaggagatcgagaccatcctggctaacacggtgaaaccccatctctactaaaagtacaaaaaattagccaggcgtggtggggggtgcctgtagtcccagctacttgggaggctgaggcaggagaatggtgtgaacccggggaggcagagcttgcagtgagcccggatggcaccactgcactccagcctgggtgacagagcaagactccgtctcaaaaaaagaaaaaagaaacttatctggcaacctcattgcaggtacctgctcctcctgcctgcctgcaggcttcctgttccttcactaagctggcggaggttgggggcaccagggtgtatccggggtggaaaaggaaggaagaggggaatgtatatttattgagtatgcactacacgcccagcagctccacattgctgtctcatttaagcctcacatcttaccatgggaaaagtcttatcaaccccattttgcacatagggaaacaggcttggagagattccataatttgttatgtaagtttgcaagtagaggtactgggattctaacccatgttctttccacagtgtcagttccctgctgggagtcggaactccagggttctgcccaggcaaagcttttagttctcctcccccttcccatactttttccttcccccttcctttttgaactttggagcaagggtgtcagggagtacaatgccaggtgctgctagggcctgggggtcaccacaaaaaccagccctccctggccaggagtttgggtcagggcctgaagcggctagctttctccatgggagcaaatctggagggagacaggggcaagggctcagactgctggcccccagccaggtcctttcttcctggcaggcacaccagcgacaccccctcccctggtcctctcaggaaaacagtcgttttctctcaattcccattcctattcatcctccctattcttcccccaaacacacacatgcacatactcagagtttcctacaggattttattctgagacctgtcaccttcactggcggcctagaatgagaaaactgcccgccaccccctcttctgcctgtgaagtgagggaccccactagctgcaaagaggcagaaggagccatctcacactatgctaatggattagaggtttgtgaggggaaagaaagagcctgggagaccgtcccccacagcaagggcgtgaaagagcccagcgcccattgaagactcacagtgtgcccagcagaagcatgactggtacatcacaaaccctcagccgcacctctggaccccaggtcttccctctgccttctttgtctccctcccttccttagagtcattccctctctcctcgttaagggttggtcactggctgggaggcagaggttgggtggctgccaggccaaacaggcccagggaggcggcattgccttgaatggagcttggctcaggggtgggagaagggatgtacccctcccccacttgcattggtgaggagaagagagtccagctcctctgctctccaagaccctcccttacatctggagaatcttagttcatgctttgaccggcaggaatgatgtttgggcagatttataagcctggcgtcctggcaaatgtgcctgcctgtctatgtggaataatggaagagccctggattaggtgtcagggcctgcctcagctacttactcattccgggaccctgggcaggccccttgtcctggggtctcaggtctcagttaccacacccttggcccaagagtcctgcctccaagccgcgagtcttccacttgaggttacaatcccagcccctgagtttgcagggctcagaaatagcccacaagaaactcgggatctggcccttccggccatgctgctgccgggtgcacgctgagctgcagttgggcccagactcagttgacgggggctggggtaagaggccagagtctcagccctcagggaggagttgcaatttggggcaaagggagagaaacccttaacaaagcagagatggaaaactttctctcagtcagtgacaaaacacacgctttgttcttatttgttttcacctcagagctctccagagtccctgaggaagcgaggaggagaggggcaggaaagaaactcaaatgaatgagtcttgtggttgttggctggccataggccccaggccctggaaagggcagagtgaagtgtctagaggtggcaggagggtgtgaggcctgaagagagatggtggggggcagggggagtcacagctgtggcctctgtggccccacctctcctccactctgacgctgcagggaggggctgggatttgctggtagcaacagacacagaactgttttcagactcagcccaggctgtggggaagaataagaccctagaccaagggttcagacagacttcttcagattgggggcttctcctgggcagaggctgcttcccctccaacacactgggacctccacagtccaagccactgtactggggactgtccagggtaaggggagtcctctcagtctgagggctgccctcagccaggcagtatcgccccagtcaaagggggagctgcccagggcaaaaactgtgtcttccccgtcagacgaggggctgctgggggagggcctacccctcgccatcctactgggtctgtggggaccagactcgggctctgcagcaggtgtgactgacgtgggctttctgggtggcaggtaacaaatggtacaagcagcacctctcctaccgcctggtgaactggcctgagcatctccggagccggcagttcggggcgccgtgcgcgccgccttccagttgtggagcaacgtctcagcgctggagttctgggaggccccagccacaggccccgctgacatccggctcaccttcttccaaggggaccacaacgatgggctgggcaatgcctttgatggcccaggtgctggcacaaagcctccctcccgcacagcaggaggggaacccaacttggagaagcagtttgggggtggcaatgaagcattcaccctccctgtggccttggctgaggcacatctccctgcagagaaccctcagtctcctcatcctaaaatgggaacagtggtccctgccctattatgtgtcacatgtctgaagggacagtcagatgaagctctgcaagggaagtgctttgcaaattctcaagagtattatgcattctgggagaatctcccgaggttccatcatccatcctctgcctctagacaggcctgtgcttctcttgttctccagagtggatgttcactccagagccctaaaaaacatccactgcccaccactgctcccccacccccaactaccagagccgctgccacagggcaagaggcaccctactcccgacagccctgacagggaagtgcttcatatacctacgccacagatagttctgtttgtccccaacctgaagactctggctgcagtttaaaccgctcttttccccttctgcctaacgctagccttcagaacctgaatataggctgtttgcacatttcccctcctaatgaagaaaggaaacctaatcagaccccttcaagctggggacttaagcccttgtatggcctgggaacttgagcccccacctccctcgcaccctcctgctttcagtcaagcccacctacagcaaagcccacatccaggccctactgctgagacctgggttaggaccaggaggaatctaggctttgcaagaatccacatgtagtgcacacatgcacttatttgtaactgacttcatccatgtgatctacctgacatggttctatccatacctagttaagacagcactgcactgggagtaaggacatcaggatccccaagcagccctctgatttgggacagatactttgtctttttgaatagtggtcttctctcccaaacctgcccatccgtctcccagtgagagttgaatagagtgaacaatgcttgaaacagctggagacatattcaaaataggcatgtattcctcctacatgcggctgactttccatgcccccaggaggatctccttttagtctagcacccccatctttgccagtcacagttggcctggggtccaagaaggcaaagctggagggaccctcgacaagcttctaggcaaactttatcatagtgcagttttctgactcctgtgtcagggtcacctgccgctgtggaaggggaattgttaggggtggtaccctggcacctgcacatctaataagctccatctggggcacactaaaagcttgaaaatcactgatccagcccaactacctctgctcattcctattagaagtagagagaggccccccagaggtgccctggcagaggagggcaagaacacaattttatatatatatatatatatatatatatatatatatatatatatattcacttctatatgtatgtatattttctttaacaaaagtatatataaaataataaaaataaaaattatactttttattaaataaaatacacatacatatagaagtgaaccatctcaagtttagcctgatgaactttcatacactgaatgctcccagcacccaaatcaagaaacagaaggtcccatcatgcctccttttaggggtaactatactctacctactcctagatctttttgaaagtaattctttttttttttttttttttttgagacagagtctcgctttgtcacccaggctggagtgcaatggcgtgatctcagctcactgcaagctctgcttcccgggttcacaccattctcctgcctcagcctcccgagtagctgggactacagacacccgccaccacgcctggctactttttgcatttttagtagagacagggtttcaccgtgttagccaggatggtctcaatctcttgacctcgtgatccacccgcctcggcctcccaaagtgctgggattacaggcgtgagccaccgcacccagcctgaaagtaattcttaagtggcccttattacgtgctaggcactgttccaaggatcacttttttgttgttgttgtttcgtggttgttgttgttgttgtttgagacagggtcttactctgtcacccaggctggagtgtagtggcgcaatcacagctcaccgcagccttgacctcctgggactcaagagagcctcccacctcagcttcccaagtagctggggctacaggtgcacaccatcacgcctagctaatgtttttgttttttagtggagatgaggtcttgctttgtttccccaggctggtctcgaactcctgggctcaaatgttcctcccacatcagcctcccaaagtgctgagattataggcgtgagctaccacaccctgctgcatcatttgtaatacacatgtacacacacacacacacacacacacacacacatttattattcagaacaactctgtgaggaagaagctcaccatcatcattcccatttgcagatcaggaagttaagacatagagaggttaagctaaatgctgaaggtcatacagctagtagattgtaaaagtaggaatggcacccaaattggtgggcccatgccatatctacaccacagtgcctcttaggcgtccacagcctactcatcgtccactgcactactcacctgaagtagtgcagagcctactgttcacctctgcacacttcaggttctgccagattttaggagggaaactatacagcagagaacagccacacacaccccagtggcatttgcgctgggccgcgagtacctgggggcgtcgtgggccgtggcaccccctgaccttctgccccacctgcagggggcgccctggcgcacgccttcctgccccgccgcggcgaagcgcacttcgaccaagatgagcgctggtccctgagccgccgccgcgggcgcaacctgttcgtggtgctggcgcacgagatcggtcacacgcttggcctcacccactcgcccgcgccgcgcgcgctcatggcgccctactacaagaggctgggccgcgacgcgctgctcagctgggacgacgtgctggccgtgcagagcctgtatggtgaggccccgggacatgccccgctcttggtcccactcctgcccccaaggcctcctgtccttgaacgccggctctgcaaataggatttcccatcctaagctcatagatctggcctccctgtcgccgattcgtcccaattctaaagccctatgcccctcctcaaatctgaaaaacctcggattcttgctcccccgagtccatggccctcatctctccatcagtcccaactaattcctgtgcacagtacccccaaccccgccccttgcgttccacttactggatttctgcccaacccccagcccccgcagctcccgctcacaccatgtgcccgccccatcacccatacccaatccttgggcccacctcttcccccatcccggaccccaaagccttcattcctgccccagccactagctctccccgagcctttctctcaccacgatgctgatgccccctatccccaaagcctgcccacctctgcctggtggtgggctcagaccaggtcttcttccccagggtgggccagtgctactgccctgggatctatctcagcccagggctgtctccctcagagtgccatgggcagagccaggaggcctgggttcaagtcaccttccatccctgattagcagatgctcttgggcattttccctctgtgaaccctcagttttaccttctgtgaaaagagataacaactgaggtcctgcttacctgacagggctgttgtgctactgggtatgagcatgctttgtagcctgagaaacttataccctgtaatactaacagctactatttcatgagtacctactgtgggccaggcacttgacatgcaacacacccatgaagtatgcatctttttgtccacagatcaagataatggggctcagagaggttaggtaacttgctcagggtcatgcagctaggaaattgcagactgggattcaggtgatggtaccaaataataagcttgttggactctgcttccctcctctcataagtgaaggatagtgatgtaattattataattgctgtagttatcacagcctgggtctctggactctgccctcatgacacctgtgttgcccaggaatcagagaagaggactccctgacccgcttagttcccttgcttgataccccactccaattttatctcaggaggttcctctgtcccaggatgttgggtagaagaagattcctgagtttagtttgatggttagcaccaacaaccaggaacaactcttttttttttctttttgagacggagtctcgctctgtcacccaggctagcgtgcagtggcatgatctcagctcactgcaacctccacctctcggattcaagcggttctcctgcctcagcctcccaagtagctgggactacacgtgtgcaccaccatgcctggttaatttttgtatttttagtacagacagggtttcaccattggcaaggctggtctcaaactcctaacctcaagtgaactgcctgcctcggtctcccaaagtactgggattacaggtgtgaaccaccattcctggcccaggaacaactcttaacccccactcccactctccttccttgcccctcatattagataatcatgaaagtaaccaagggaaggtcttgagtgcacagcataccctctaccctatgtgtgttctctctctctcttatttccttactcacaaagggaagcccctagggggctcagtggccgtccagctcccaggaaagctgttcactgactttgagacctgggactcctacagcccccaaggaaggcgccctgaaacgcagggccctaaatactgccactcttccttcgatgccatcactgtaggtaagaaggtcccactggtgctttgcttctttctctccttccatatctcttagtgtctccagagctgcagtacaagttggggggatggactgtaaaagccagaaatcccaagccacaagcacgctgcaggtagcaaccccacacccagcaaaacaccgcttcttcctgcccactttcccctctgcgccaactgtacacaccataccctatgcttgtccatttgggaaactggcttccaggacagcatctttcctggaaagacagcaggaagctgatggtcactcctcaactctctcttgtctctgggcagacaggcaacagcaactgtacatttttaaagggagccatttctgggaggtggcagctgatggcaacgtctcagagccccgtccactgcaggaaagatgggtcgggctgccccccaacattgaggctgcggcagtgtcattgaatgatggagatttctacttcttcaaaggtactggctctggggcagcggggaaaactgagccctagagagggaaggtgtcctgcccaaggtcaaaagaggacaaaagaggggaagactctcacacgagtccatggtggagtctccattccaatctgaacctgtgaccccagggaagactctatcagaagatacctttcagggatggattagggagcagcaagtgtcaaagtcccagggagagtttcagagaggagtctagagggaagcagaggactgctctggagttctgcaactgagcagaaagctggatcttccttggaatcctagctgtgtggggttggacgtgtcgcttaacttttggagtgtgcatttctcgaatggggaaaacaatacctcacacttgctggggaaggagtgtgaaaagagaatattgcctgaagagtgtgcaatatcttactagatacatgttaatacttaggtaaatagtattcattcatttgttcattcattcaaccaatattgagtgccttgtatgcactagacgtggttggatatgttagggatacagcagtgaatgaaacaaaaatccttgccctcatagaattattagtaatgatggcagtggagaaagctctgggccttcctttcggggctatctgccctctgctgacacctgctgggagtctagacaataaataataggagttgctactaccaccctgctatttataactaatttgtagtgcaatccgtttgattgatatgaataccaaccatcgtgggctccagcttaaaggagagcagaggtatgggggacagaagtggggtagagggccaatgggtgacagcctccagctcaccctggctctcccaattccccacagggggtcgatgctggaggttccggggccccaagccagtgtggggtctcccacagctgtgccgggcagggggcctgccccgccatcctgacgccgccctcttcttccctcctctgcgccgcctcatcctcttcaagggtgcccgctactacgtgctggcccgagggggactgcaagtggagccctactacccccgaagtctgcaggactggggaggcatccctgaggaggtcagcggcgccctgccgaggcccgatggctccatcatcttcttccgagatgaccgctactggcgcctcgaccaggccaaactgcaggcaaccacctcgggccgctgggccaccgagctgccctggatgggctgctggcatgccaactcggggagcgccctgttctgaaggcacctcctcacctcagaaactggtggtgctctcagggcaaaatcatgttccccacccccggggcagaacccctcttagaagcctctgagtccctctgcagaagaccgggcagcaaagcctccatctggaagtctgtctgcctttgttccttgaagaatgcagcattgtctttgtctgtccccaccacatggaggtgggggtgggatcaatcttaggaaaagcaaaaaagggtcccagatcccttggccctttcctccgaggacttctatcctccccaggcctttgtttcttcggctaaaggtacagttcctttcaagaggtaacagcactgggatccaagcagggggatgaaaaactcagcagagaaattcgagaccattttgcaagactgtgcccttctcctcaggaccccctggctcagttcttgaaaaacggtgtcatatttagtcagaggccccacccccaggaagcatggatggggatgaaggcacaggcgtctccaacctcagaggccctttgtggggtcaggacacagagtgggagggagactgatgcaggcctaccagtccctggctttttgtctggggctggaataaagaggtgccttcagctggtgggccgagaggcaggaagcagcctt

SEQ ID NO: 25 - DNA, 22556 bp, Homo sapiens
gaaatatacacaaccaaacattacatggacactcaacacacacatatgtagaaaatatgatattctaaaatcactaaaattatgtcttaatattcaatgtcatgagaatgcttatgtcatagtgccatggaaaaaaaaataagtttcttaaaccctttgcccaataaggttagctttccttttctgcataagaagatgaaaataaattgtaaaaacgttaacagaagttatttcttgatgtcggatcattggcagtcaacttttttctcataataaacttgtgatattataatcatgaaaatctaccatatttgtcagagaaacattgttattgtataaggtagaactcagaaagtacacctcgaacatacttcatatgttgtatagttcggttaaggccagcactgtcaaggttatttaaatttcttgtacatttcttatacatgcacatttctttacaattttacatgcatgtgcatatgtgtgtgtgcaaatgcatatgaattttataagaatcttgaggcagttaaaattatcagcatcccctgttgactcattaggagactgaatgttagagagattttcagtatcttggtttgtaggactttacctggtgctttttagattctgtgttcactgtgacagtatctcaaaatatgtacagaatactgatatatgtcctaaatatgtggatttatttctataaggatactgaacaacaatcgtaatggtccagtttggtgagtatgtagatatgcacgcgaccacctcagtctcagttcacacattcccactgcttataggagcaccaggggcaaacagtgtccagatgtgagtcctcaatgagctataaccacagccataaatatctctcaaagatgaggaacattctcatgatgttgacactgcaattttttgacaatttcccaacactcttaagaaacattccccaatctcacacgaaaagtgggggttttaattttcttgttcaacttctaaagagaaattggagaagataaaactggacactggggagaccacaacttcatgctgcgtgggatctcccagctacctgcagtggccaccatgtcttgggtcctgctgcctgtactttggctcattgttcaaactcaaggtacgtaccatcacaccagcattttacataaaagtcaaattatttgatgaatgtttaaagtgccttttgaaaaaaaatggcatatgtttttatggtcgaaagaccattaccatttgcattttggtagattttctacctctctgcaaaagcgaactatatatacataagtatgtgtatctttttgagtgaggatattttaaaccactatatgaaacatggattctaaaatttgtcctatttcctccaattgttatatattttaacaaattttatgtttgcacaatattttccaaaatagaggaaaaaaaagctacatattgttccattcattatgtcttttctctactaaataaaattttattaacatcttcatgaatcatggctgtttaaaaaatctgcactttgggatatttccttgagaaaaattcttaaaagcagaatgacagggtcaaaatgactagttctggaaaaggaaccctttttgtctttgagattgattattgatattattgatagatgaaccattttgatgacacactatacacaccctacaaataattttcaagtcactggttattttactagtgatcacataataagcatgttaaaagccaagctgtaaacctacgtatttccatgtataaacacatttgtgctaaaccctatattgaaacaggtaaagtacatagctgaggagttatccaagctccccacaaaattcccacttgcctaaaagttgccgtgcaaaagctgcacacatacggctggctctagccttcatattcttttacatttcctcattgtgcatcaccaatactatacccaaaagaaggataaaatggagtaattattataccaataattatgcgatatatacacacagcttactgaagtcttcaaattcaattatttgatccatataaacatataaagacaggcttatagtcaacactttgtaatttgcataatgatttagtaaggatgtctctggaactgtatttcttatttaataactctactagatctattttcttttctaaaacacaccatcccaatgacaacacagaactaacttcctggccaaaaatcaaatccatgtatttaagacaacttccgaatcatagctctgctaggatgaaagacagagaagagtttaaaatagaatgagggctaaatcatatataactgcattattaaacaaaaatcagatgtaatacattataattgcattattaaacaaaagaaaacattaattgaccaactgaacaactgtgcctgtgctgtcggatgagaattaattgtacctaaagagaagtcaaacaacatgtaatgaaatagaacttgattgaaataaaaaaaaaaatctacatatcttttttccccccattcctcagaggtctcaaaatactcatagatacatttctagaaaagtgaaacttgtttctattaatattgttctcacaatattctgctgaaaaagtcactgaaatacttctgaatttgatgatagtctatgatgcccatagtgcccaagtagccctacatttttaaacattcctccctattactttagataacccaatagttaacaatgaaagctattattttggaagatattcattaggttgcagttaactatataattttatacctggtaatgttcttatgtttacccatacacaatcttatctggtaaattattcttctttcaatctcacaactttctggaacttccataaaatcttaccatcatttttaacagtgcatgaaacaatcattttcaaacaaacttgtactcactgaactgctaagcaaaatgaacttcagcattacatttgtattgctttatgtgtataaaaccacgccagaagtttctgggggaaatgggagggattgcaagaaggttttacttggcgttctgccatattcaccaatctactgctccttgtccctatatgatcagccttaccttctgctcctctatctgacctatctgtgctggcttaacacctccatttgtcttctagatcttatcccttctcatacaaggacattgacctaacattttccctccttcctactgtatctattccatattctctatggaatcattcccatcagcatataaaaattatcccaacttaaaatgaatatcctttttctttctcttctgccaattaacatcctaaattttctctctcctgccgggtctgtcccgcagaccctggctgaccgatgaagtgagtactcagacacaggtatgcagtgtaagagcagctagctagagctgcctggccctagtggccagagagcagctgttatgttttgccaggccaattgattctggttggcttgttgttcccacaactcatcatattctgttcaccagagggggtatttactggtctctaaagttgttttagctagcactgaccagtcccatggggtcatatggaagttgtctgctatggcctcagttaatcctttcataaatgggctagtggctctgttttctctaatgctttttcttatttctttagaagtgttgaaagcaatgagttcacgtacctgattgtcttgttgatcttgcatcactgggcaggtcaagagctcccttctaattccacttgactaagacagggtcccataacagtagtgtatcccttgtattttttccaatatattgggagagagggctcagggaaaatatttgtctcctctgtggcacctttactcggtaacggcggggctgagggagaaggaggaggtggtaaggtagatgatggttcttcctcccttccctttttaggctcttctgtgtagagtggggacaaagcagccctgactaaggcccataacgttaaagatgttactgggacccgttgcccttgtgcatgatgttaagatttctccccacttgttcccagagctctaggtttggcaagccttcttctgggaaccatgggttatagaaaacaacagtttgcataaggtcccttaattgcacctctgagacacaggctctgctagctttaagcagctgtttcaatacttttatatactgttgctgttgagctgttaactgttgtcccatgacaaaaccctagcttgaaaatcccctcaaacttggaaatccccagcaggcaccaattacttactgcgcagtcacttcactttcattctcgagggttttgtcacaatctgttgcagcattcctcacacagggcaccacctgctggctctgtcctgcagacgctggcagatggatgaaatgaccattcagacacaggtatgcactgtaagagcagctaggtgactgcctggctctggtgtccaaagagcagcccggagaagctggagctgcttgcttttattcagtgcaagcacaatgccaaaaacctggagcaaaaacaaactgtaggtaattaacatttattgttcccctttcagggaacgtcaggtgtgcggatgatcaaaggtcagttccaggtcaacataagtagatgagcctgtttaagataaattcccctacactccctggtacctacttcttgccctctgcctcagggttatagaatagctgccttcagttattcttccccgaggctctgcagaaccttgagaactttcagtaggtttgcgtcctttccctatagtttttcccaccactctgaccaatccccagcattcccttttgcataaaaaaatcttcaaacgtactgtctatacactttctctctagttagtctcatcccattctcttctatcctacttctacagagttttcatctccaacactccaccaagactgctcttacggcttcaaggatgttaaatccagtggtcattttgggggcatcatattctcatgtttttcctctctttctttctctgccttcctctctctttccttttccatggcatgaaacacaccatttcatttggtgaactcctacctcacactggcctcctttactggttcctcctcttctcaatttcctaatgttggaatagcccagggctcagtgcttgatactcttttcttttgtagcagcattcagttatttggtgatttatctaatctttagctttaagtaccatccacaagaggacaactcccatctttttgcttccacactaaaatgtacactttatttccaacaaatccacttagatgctgtttcatggtgggcaggtctacgcaaatctgccccaaagcccaaggaagctgagatgccaaagaaagaggctaaaagatccagtttcttagaaagcaagttttaataaggacttacaaagagaagccatgtctatgtcctgagtggtgacaagacaagacagatggtggatccctattccattactctccagatccagggcctttatactgtaggtgaggggtggttcagaagggatgtacgggacaattgaggtatgatagcattacagttgtttgacccaagggcaagatttatgagaagtacctgctcttacacaaggaaaaatggatacactggaaatcttagagggatcccagaacagggattaatcagaagccaacttgccagattagcatccaagatggagttgctttggcctctacagatgcctagtagacatctcaaaacaatatacccagaacctttcccacatatctgttcttccttcacctttcctcaagtctgtcaatggcaattctgtttgctcaaggcaaaaatatctagtcatccttgattcctctctttctctcatgttctatatccaatccttcaccaattctattgatttcaccttcaaaatatatccaatatttgaccacacctcactgcttccactgataccactttcatctaagtcaccaccacctctgtcttacattactgcaatatcctcctaaatgagctctctgattctacacttgcctctctgcaggatactcttgacagatcagacagggcaatcttattaaacaaaagtcagattatgttacttctctactccgaactctccagtggcccccatttcacacagagtaaaagccaaattttctatcaggtcttgcacaatctattcatttccataaccaacctacttgcatattctattattcactcttctcattccattccagctagatccctgtggtttcttaaatgcactctctatccaggatctcacattaaaaccttattactagctgtttcctctatccggaactctttgttcctaaagaacaatatggttcagtcccgcatcttcctgaagtcttggcttaaaagtgatcatcttgatgtgactatcattacttccctattgaaaattgcaacactcacctctaatccagcattcacaatctcctttactctgatatatttcatcaccatagtacttatcatcttccaacctgtaaataatttttcataatgtatgcttcatatgtataaacatacataatataatatcatttcccaatagaatgtaaattttataagagcatggatcaatgtctattctattattttatttaacctgacagcctcaaactgtgcgtggcctaaagtcagcattcaataaatatttgtgaaatgaatatttcagttttcacataaaagaaatatcagagaaggtaagttgcttactgtctagaaaagaatgtaatacgtttacattattttttcttctatgtgaaaaatcaaatgtagtgatttgagacatcatagttaaaataagagtataatattgacccaatgtctccatttttaaaatacatttttgagtattaagaggttgaaatttcactcaaccttgtttgactatcattttgatagtcattaaaaagacactgttgggatgggcacaatggctcatgcctgtaatcccagcactttaggaggctgacgcagtggatcacaagttcaggagttcgagaccagcctgaccaacatggtgaaatcctgtctctactaaaaatacaaaaattagccaggtgtggtggtacgcaactgtaatcccagctactcaggaggttgaggcaggagaatcgtttgaacctgggaggcagaggttgcagtgagtcaagatcgggccactgtactccagcctgggtgacagagcgagactctgtctcaaaacaaaacaaaacaaaacaaaacaaaacaacaataacaaaaacaacactgttggatttggttttattttttttttatttgttttttactttatatatcttgcgaaggtttttggctaaatcacattgtaatctactcttataaagtttccccaaagccaaataaggtagacagaacaagaagtgaggtaggaaaacagatattttgagggctcttccaaaattgcatgattagtgctaacgttgggactagacattattaaaattcattctcattccaagcgcatggctttttccactaatggactcatattctcttttaataaaagatcatttactcatacatttctagatttcctgttttagtatgtgatgaatccttctcaggacagcattacagcagaactttgggagctgactaggagggaattcttgctttgtaatttcctttcattttccgtatcagccaggtataaaatctcctgttttccctaagatcactctgtcatactgagtggaaaactgtctctaagcacagatacttatgtatgaaaatgtgagcattcagaaataagactgaccttgtatgaatgattgaataattaaaagaaaaaatagaaaaagtatgctgccatcttcctaatagggtactaaataattttatatattttatcttattcaagttttacactaacctataccttagataataatctggtacaaagctgaagttacttctacgaggttatttagctagggcataagaccacatcttttggctccaagataatttcttttctactatttgtaaacaatgaaaatctgtctatgcaatgtaatttcaagtacatcaagaacattgtgtccataaacaatcttcctacttcctctctgaggctttaaaactttcaaagagaggccaacaaaaactttatttctttgaaatctaaagtcttgggggaaaatgctgagaaaaagcatcatggcttattgacacactgaggaataaaattactgctagtagagtctttcctaaaagtaaatgattatacacaaatgaaaaactttatctttagagtatataatcaggggttgtgcttcagagggaaaagggtataaaaaagaaaaagtcttggagggcatagagagaaaaattcacaatttttaagaagactctaaagcaataaggaaatggattactacaggtagaattctaggctcacacaacccctgttcttaatccataacctgtcctttctgggcatggtggtccagagtttgcatacactgagagatcatctaaagaattgttttataatcttcatgtcttttcagaatagtgggagggagagcaaaaaaaaaaaatccttgtcatcaaagctgaagaacgacaattaacttgttattcataatgtttgctctctacataggaatgtagtcttcactgctctttcagcaacccaagaaatgaaaacaaaacacaacacgactaaaaccaaaacctttaaatcttttatgtgaatattatttctctttctctagcaatagccataaagcaaacacctgaattaacgctccatgaaatagtttgtcctaaaaaacttcacattttacacaaaagagagatcaagaacaaccagacagaaaagcatggcaaagaggtaagcaaggtgaatgaccgtggtagatgttacaatcatccaaagagacaataaaaagccttttcactaacagaagtgatgttacagttactatgtaatagtttcatattgaagcccatgtatacaactcccctttgttcaggagacagctcacaatttctcagaatgctgctatggttaagcagcagagagtcaacagcctcacttgataagaaaggataaagctgcttagacatttctcttaagtttgagagtgaggagagaagcccgggaaggtcggccatctttaacggagatgttgttcctggcaagcctcaccaccccttttctccagtgaattgtctttttcctcagccattttgtcaatagtgaaaaattaaattttatatcagtagttaacataatattttattactgattaaagataccaattctttgactattacattgttgcaagtatttccctcattttgtaattgttacctaattcttagtgggttgagaggttttttttttttttttttttttttttagtatttaatttaatgtatttagtttggttttaaagtaagaaaaatacacaccttgttttgattccctggctgatcctgagacagtatactgtacattagggcaaatgagaagtccctatctcacatattaaagctagtttaatctataagtgttattatcacataattgtactttttggaagtccatgttagtgcataatttgttttgtcttacatattttaaaaacacaaaagaattgcttttatcctatatgcatttgtaattgttcttctaatacatactacatatataattattttagttatgctcagaaatataaattgcttgatgtaattaaatgttttcaggaaaggtatgaacctgaagttcaatatcagatgatcttaaatggagaagaaatcattctctccctacaaaaaaccaagtaagttgtacctcctaaaagtctaatcactggattaggttatgaaattggggagcaatctttttgaggctccatttagtgtggtttgacatagaagacatgaggcattttgagctttagatgatactagtttgtgctaaaaaggctgatttcctaggaaattatatacaaaatgtaaaacaaaaggaatggcatatataaatgactttcttccttgacctgggaacttagtgaacttctttttctactcagataaactcaagactttgatgcagctttccattcttttatgagaatatgtgtccaaggctgattcaaaatgcatggcctagagatagattccaggggatggggttcctcctagttctatagcagttaataaacttctccctgaatgcaatgggcctataagcatatttgtgacccagcacccttcaaaggttctgtggaggttgtgtccttggtgcaagaaatctcaaaattactaatttgaagatagggatctgcagatgggaagaagatgaggggacttcctccctcggatttaataggaagaaccaactctctgatttgcttcagcaacagagctccaatgttggaagaggattagtaggtcagaaccttagctatttatcattgtagacactatcactattttagtgctgaagttcaggaagttctgcctttcttaccatcctgagtggtccatgcagctctctgctctctacaggcacctcctggggccagactacactgaaacattgtactcacccagaggagaggaaattaccacgaaacctgagaacatggtagggtccgaatactttgtgggtctcttttgagttttagatgttattagtttgtgctaatgttaactaagatctccaaagggctcaattattttataaaattcataggtccatgaacagcttcaaaaaataatcaaaggacttgaaagcaagttgcttatctatgatcaatgagacaacagtttggaaaatcacattcagcttttaaaacataggagcagcagaaagcttccaagtgtcacatttttggaagcaaccaaaagtccacttctccctagaccattttatccataggttagaaaagttcttctctatacgtacttaaaacctcttgtcactatttactattttttggagatacatgcatttatcctgaggtcagcaatgaaatatcaataattaatatttttatatctgattaaatcatcatcccgtagacaataccagggccaaatgtcagacattaagaatcatggcatagaatatcatgaagagaatacaataaatctcaatcaagagatgttcatgttcccaggctaagacagcttctcagagccatcctacaaggtaccctaaacctgcatttctctatataaaaaaaaagacttctgccacagaatggttctttgttccccatgctcattaaaacttatttcatgaacatctgaatttttgctaacactatcttcagcggacagtgtctgataaattaatttatgctcaattgttaatagctgatgatacattaatgaggaatcttctcaagtcttctatgagaaaatgtttatgttgacgatatctcttccaaaaagggagaaaagaccatagatggaatttcataacctgaggcaggtcaatttattttgcactggagttttttcactaccttttttagatcactccacgtaagtggccccttaactttgctgatgtgggccaacaatcatgtctgaatctctaattgtagacaaataattttgtgtctttgaggctgataaagggattccactaacagaccaattaaaacagtgattaaatcagttagtctgaggagctcaggagtgatagtgtgaaatatctgggattccccagtctagaaaaatagatgtctcattttacttatttgtaatgcacagtgcctttggcactcagcacagtgaagccaaattcttgagcactgacccccaaacctgaggacccactgggagtactgtacatcccaagaggactggctacttctcagagaaagcatccactttcactatgagcccacctaggtttaacttccctggactcctccttagtgtaaattaatgtcagaaaaacagttcagccaccaaatatagagagtttccagtgaagcaattctgaaaacctctgaggttcttgctgtttgtgtttctgaggattggtctggccacagtcactacttgaagaatttttacatattcaagatggtagctttcctcacaactgtgatacatgtattctcatagtttatacattacacacacactcacatacacacacacacacacatttctgaagcataatttcttttttccactccaggaacactgttactataaaggaaacatcctaaatgaaaagaattctgttgccagcatcagtacttgtgacgggttgaggtaagaactaccatcaaaattactcaagatcaagaagctttttgttacacagaattaagggctactagatattgtcttcttactattttggtaaatttttcattgctgaaatgctgaatatatgtggttaaagtgaagaacaaagtattaccctgacaatcatttcataatctgctgctctaggagaagtcaggcctagcaatgtaaaacaagaatgctacactctggaccttgatgatatctggatccacttctgtgtttatccaacctactctctgaaacagttacttcctgttttctaaaacattcttccctgcaatggtcacagttgaacttaattttagaattatatgtgtttctgtttacgtagataattattgccaatgagagaaagtttggaaagtaagaaaaagcacaaataagaaaataacaggccgggtgcggtggctcacgcctgtaatcccagcactttgggagggcgaggcgggcagatcaggaggtcagaagattgagaccatcctggctaacacggtgaaaccccatctctactaaaaatacaaaaaaaaatagccgagtgtggtggctggcgcctgtagtcccagctactccggaggctgaggcaggagaatggcatgaacccaggaggcggagcttgcaatgagccaagatagctccactgcactctagcttgggcgacagagcgagactccgtctcaaaacaaaaaaaaagaaaaagaaggtaacaactaccacaaaagttgacctctgagtaatcactgttattaacattttgtcatgtttgcacccttatgtgcacatatagacaaatgtatctttcacagcattgaaataaaaaaaaaaccacattgttcttccaacatggctgataacacacacgacaagttcttcacatatcataaaataccttcagggatataattttgaacagttaagttggattgtaatattttattatatggattcaccttctatttatgaactaattatcatactattgtgattatagaaagagggattctttaagctacttctaatcccaacgtgttactctggttggcctgctgatcattcatgttcccctctggggttcttgctatctaaacattcccttactccattttccattatagtcctaggatctgccatgaaatatttgttaaatgaatcaataaactatggaaaaatatttaccacggtgcaaattccaaattctttggggttgcttcatctttataattcttgttcagaattctcttggtaaataagttaggcttcattttatatcgacaaatagtgattctaacttacattaccagaagttagctgaaaggtctatgaatgacaaggctatgtgtgaaattgggatggaggggcagacatcaatccattcttggaagcaaatatgacactgtgtgtcaggaatcctgaaatataagtctctatatctcccagaggatacttcacacatcatcaccaaagataccagataaaacctctgaaaagcacagacgagaaagaacatgccgtctttacatctaaccaggaggaacaagacccagctaaccacacatgtggtgtgaagagcactgacgggaaacaaggcccaattcgaatctctagatcactcaaaagcccagaggtgaatacaattcccttacctcatcatttacttcaattgtctcagcaaagataggcaatatactactattcttagaaatgagtagtatgtgtatgtgtcaagcctataatttatttacttatttttctatttatcttctattttaggaaaacaagtctccttttaagctttggaatcttttaggataaagataatgattaacaatgttcttttattctttgtaaagaaagaagactttcttcgggcacagaaatacattgatctctatttggtgctggataatgcctttgtgagtatgaaacacacggccctctcggccagttcagtcaccctttaagtttacttatcaagcaaaagcaagcaataaactattttagctaatcatggggcatttgtccacctgggtgtcttggctgtttacatgccttgccagcaatagttatctcctcataccctttaatatccatctgccaccaaaatatttagtattggcaatatacttaataccagatagctacaggcaatcaaccaaaaaagaaaaataaaaggaacgcattattaaaatattgcaatactttatatcttaatataaaattaaatatatttaatataaatattatatcaatataaaatcaacacaaaactctatataacttagaaactatattgatagatacagaggaaaatactagaatctacatttctatctagtaaatattgttttgtaatcaaattttaatcacatgattcggtttaaaaacctaaaaattgttaatttgatgtattcaactttaaaatgaagaacactaaaattttacatgaatgtctaacttttatcaaaaaactcctaacatttgaaatagaatttgccacaatgcagtcttacattatttaattatggaatgaatagatgttaattgtagtgaaattcataatttttcttaaaatgtgaaatcttgtatgccatcagctttctcagtgtaatctgctatttcactatactttgtgttttgtattttacagtataagaactataatgagaatctaactctgataagaagctttgtgtttgatgtgatgaacctactcaatgtggtaagacattagtcatgtaaacctcatgtttctgcatagggaagttctgcctggaacttccctaagatttcaccaacaagaagttaaaaagatcccaaatgtcttaagttaaatagttcagggaaattttagcagaacaagcatcaacatcaaggtgaaatcacatgcatggcaacaaagacaacttttaaaatttttactttcaaaatggaaattcattacttgtagtccatcactttatctattacttgtggtcaacaaaagctctcagacacgaaaggaatcctgaacatttttatgaagataaatgctctttccacagatatataacaccatagatgttcaagtggccttggtaggtatggaaatctggtctgatggggataagataaaggtggtgcccagcgcaagcaccacgtttgacaacttcctgagatggcacagttctaacctggggaaaaagatccacgaccatgctcagcttctcaggtgagcacatgctggccaggtgaatgtaggcagaatggatagctatccccagggttccttagcagggatttccactctgtaatatttccctgatcaactgtcagagtgcttgacattttaccactagcaattcacctgtgacattattggatcaataatcagatgatagaatgagctcttggatataagataaccatctgtggtcataacactaaggaatagtagaagttttttggggcctagtgaatataaaaaggctagggcagcgaggcaattcgttaatgtaattaacaaaagctaatggttacaaagactcagattgtgacagtagtatctgtaacttttcatacagcgggattagcttcaacaatcgacgtgtgggactggcagcttcaaattccttgtgttccccatcttcggttgctgttattgaggtttgtaaatttgtagtaaggctctctgtggttctgtatcctctatgaaggccagcataacaccttatatagaatgagcaaaatgaacatttgctgaatcaatgaatcaaggaagaaatgaaactactggtaggtcattgcactgaagatcccttgggttatgcgacagaacatttccttacatcagccttgctagaacgtgccatatcattctttagttcatgttagaaaatcagagtaggaatattggagcagaaagggcatccagtaccctctgtggcctgggctaatactagtcatccccagtatctatggccagagaggccagacaaggaagaagggtgcatgcaggtgtcatatggccaagaactccagtgtcataggtatcatagcaataggttttggagacctccgatatggtgcctatgagtacttcctatgaagaatgtaattaattcaaccatgatttactggtaacttagtatccattagttcaacaaatatttattgaataaaatgtaagtattcataggacccaaccactttaaatgctctttcaacgttttgcaatacacagtgacagggaaaggagctaacaattcactagttttcatctcttaagccatttttaaagtactgcacattggcaacaattaaataaaaaaagaataaataaatatatctactttttccaggctaaaaaaaagaataatgtggctcttgtaggagtgatgtcacatgagctgggccatgtccttggtatgcctgatgttccattcaacaccaagtgtccctctggcagttgtgtgatgaatcagtatctgaggtgagaccttgtcatcctaaaaggagagagatattttccaaatcttttttttttctgaagacacatattattctctattgtttaattaaatattagatcttgtgttgttccaaaacagattttaaaattgtttataaaatacatactaatcaacaggatagattgaaagtgttacccaaaaaacaatcttaaaacgtgtagggtaacatattacattcttaacctagtcttggattacagtaatctgctgatatatgtttcataaagacatcaaaagtgctattttacaagtaaattatgtttagggacacttgcaatgaatgtttcttttcatatatatatatatatatattatactttaagttctagggtacatgtgcacaacctgcaggtttgttacatatgtatacatgtgccatgttggtgtgctgcacccattaactagtcatttagcattaggtatatctcctaatgctatccctccccctccccccacccacaacaggccccagtgtgtgatgttccccttcctgtgtccaagtgttctcattgttcaattcccacctatgagtaagaaaatgcggtgtttggttttttgtcctcacgatagtttgctcagattgatggtttccagcttcatccatgtccctacaaaggacatgaactcatcatttttttatggctgcatagtattccatggtgtatatatgccacattttcttaatccagtctatcattgttggacatttgggttggttccaagtctttgctattatgagtagttttccaaatctttaagaattcggaagcagtctacagatgttgaatggacatatcttttcccaagggttgtgtatcccattaattcaacttccagtctcttgatgcacaaattttaaaaactaccagggctcattctttaagatttccaaatatgccaagatagagcttgcacgtatgatgaccttataattttaacttaaaataattccaactgaaaatgaacccatagtttctaaaaatattaatctcattatgttgatgacaggatcttcttatattcccatcatcaatcaaccaatcaatctgtttttgcatatttatgaattacctgtgaatgccaggcactttgcaaagactttgggatagaaaaataaataaaacatactttgttcttgaaatgctcacaaagaaggagagaaatatttccataaagcccagaagcctgcaactacttcccttcactggttcattattattatctcttgcccctcaattctcaatgcaaaatgagtggataattacaaatggtgatggctgtcactgctgtcctttagaacaacattaaatggccacatggaaattgaaatccttccagctctgtgacttaggctctaggaagaaaaatgtccaaataccatagtatgcatgctctaccacccaccacatttaatacagggcagtcctaaatggttgccaaatttggaatttccattgagctcggtaatacagttagataaatcagagtctcgtgtttctttatctttattctgtgtttcacgcagaaggcaccacactgtatatcatattatttgagttttcttctgattacagttcaaaattcccaaaggatttcagtacatcttgccgtgcacattttgaaagataccttttatctcagaaaccaaagtgcctgctgcaagcacctattcctacaaatataatgacaacaccagtgtgtgggaaccaccttctagaagtgggagaagactgtgattgtggctctcctaaggtattatttattagaattattggggcagaagaattatgcagttttctttttgttttccaatattcttttggaaattctttctaaagacaaacttggcatcgtagttaaaaaggagatttgtgcttgtgtttttgctactgaatttagtaatcctttgaaaggcatttcaaaaactaggacttgattttgacataattatatgaagttaaatgtaaaaaagtaaattgttaactataacatgtcacttgcaatctttccaaaacgtgtattagtcagaaatccctagacgacataatgtcacagttgatcatctgttgaacagtaacaattagagatctagaagtaagttctactcagagggagagttggtcttttctcatcaagccagtgtataaaccaggttgtaaacagagaagaaagaggaaaagaaaaaataatcacaaaaatctgtagaaaataggctattaacatagaacatccagaataagcactatgattctgctaatttatataaattagactccttcaaggcatttatgtactctaaagaatgctgatcactagcaatcccattgccttctaaaagatattctgttgctccactggtgaagcaggatgcagtccaagaagtatccattacttaagatggctctgtgacaatgaacatggcgtctaaactctctatgcttcagtttatgtattcagaaattttagctggttagattagatcagaagactacacagcctaacttagtcatttgtgaagaatattgtaaactttctgttaattataaagaggcatggaattttacaaaagatttgacattttatagcaaattagagttacgtttatctcgttcttacttgcttacattcatctatggtttcttgggtggaagacaattgaagatactcaaaaccctaggtacttctggtttcagcaagtaaatggtatgtatttacagagaagaaagggggaaaggatgaaggaagaggccaagagaggaccattgtatacacaatatgtaacatctaaaattcttgaattatgtcagtcaactcttgtattattttcatatcttgttgatttttttcttatgtaattgaataaaaccagagagttcaggcttaggaacaactgaatttctaaataactgttttcttttccaaaaagtagtatgtatacttcatacagtattgtttattgagtaatccaatttctcatagatctgatatcccagtttattattcctaggtatatagttagggttttttttttagattttaaaaataagctttctgtctagatatttctcccaggcatcacactattttaaagattgtaacttgacaatgcgttttaatgtcaagtctcttcattgttttgtcgttactgttttagctgcaaatttgccctcaaataccattgagatttgatggaaatgcattaaatttatatttaactttgaagggcactgatatttttacaatattaagtattgtcttaaaagacaagttgcctttaaagtttctcaggaaatgtatatataaagttcttcatggagttcctgcacttttgaaaggctttctaaattattttcatatttttctttctgctgtatgttcaattttttttagtttggacttacacatcatacatctagacaaaatttatttttgaaaaattcttgaataattctatttctcaccttttgagaagtcttcattgctgataatattttgttttctatttttcaatgtccttggtcattttcactggaatttgcctatcagagtaatttaccttaaaaagtaaactttcattgccatcttgtgccagaattctatcacctagtctatgggaagaaaatgttgaacccacctttttccattgtgtgtgtgctttgaaggagtgtaccaatctctgctgtgaagccctaacgtgtaaactgaagcctggaactgattgcggaggagatgctccaaaccataccacgtaagaccttttgttttctttgttccaaaacgttttctcacgtttatttcagatttgagaaaaatatgccactgggttccataatacactaaaacacaatgtattttatatttttcaaacgactcaattttggagaggaaaactagcaatcattatgagcatgactaaggattgtagacaaacactcatgagaaagtagctactttgacatttgtgagattagggctgctggaatctatgccaaaaactgtttaaattcccgttagagaacgatgagtttaatacaaaccaaaatgagaaaagaaaagtgtatttaaaaacagcctcagttgatgagctcattttattcttggttaaaagctgatagttttaatttgcaaggctgtcagaaaatcaatagcatttaagaacatgctataagatttgacaattttactccctttaaagtgtctcaatgagccataattcaggtagtagttctgtgtcttatacaatcctatgtgagctgggctagggaacccagttacttggaaaatggtacttgtttcagtgaaaaataacctctaaatataaaatggcaacaagaaaaataaaaaataggggaaagactcaggatacattttctttactcctctttcccaattcttttctggaattgaaactgcagagacagtataaagaaaataattgactcaagcaccatcaattatcatttcatagggaatggataggcaaggtcaaagataaggaccaacgcttgtttatttaccaaacaccatttaatacagcctacatgaatcatggaatgaatccactctgcagggaattctggaaactgtgcccaggccagaaacatagcatcacaaaagaaaaaaaatcatccagctatttaagggcttggaaccctaggtgaacatgccccttactgtgcaagataggcaatttataccatggaagaaaattggaggtggactcaggaaactaaaattctagtcttttctgtcagaaactagctgtgggactttaagtccagataaattagtttttttcactcatgaaatacagctaatggtatagtctcttaaataatatgaattgttattcacataatttaaattctatacattttcattatcattattacataatattttgtaacttgtaataaccctggcttccaaattttatttttccttcaatcagagagtgaatccaaaagtctgcttcactgagatgctaccttgccaggacaagaaccaagaactctaactgtcccaggaatcttgtgaattttcacccataatggtctttcacttgtcattctactttctatattgttatcagtccaggaaacaggtaaacagatgtaattagagacattggctctttgtttaggcctaatctttctttttacttttttttttcttttttctttttttttaaagatcatgaatttgtgacttagttctgccctttggagaacaaaagaaagcagtcttccatcaaatcaccttaaaatgcacggctaaactattcagagttaacactccagaattgttaaattacaagtactatgctttaatgcttctttcatcttactagtatggcctataaaaaaaataataccacttgatgggtgaaggctttggcaatagaaagaagaatagaattcaggttttatgttattcctctgtgttcacttcgccttgctcttgaaagtgcagtatttttctacatcatgtcaagaatgattcaatgtaaatatttttcattttatcatgtatatcctatacacacatctccttcatcatcatatatgaagtttattttgagaagtctacattgcttacattttaattgagccagcaaagaaggcttaatgatttattgaaccataatgtcaataaaaacacaacttttgaggc

SEQ ID NO: 26 - DNA, 2358 bp, Homo sapiens
taatatgggttcatgcctagtatttccctttacaattgttgtaaaggttcaaacaatgaaaatgattaaaaggagactggcacagactcaaccttaagcaattgctagtaatattgaagggaattaaccacttgtctttcttacttcttatgttaagtttttctttttctttttcttttctttcttttcttttcttttttttttttttttttttttttttttttttttgagagggagtttcactcttgttgcccaggatggagtgcaaaaatggtgcgatctcggctcaccgcaaactccgccttcagtgatctcgcttctgggggcatcccatattttccaaactgccatcctatagtggggtgcccgtcgaggctgtggggagaccccggagagatttatgcaaaggaggacccagacaaatgtgcccattcagcctctcaagagtgaagaatggaagagaggggggcagagccctgtgtcttccgtgttgctgtgcgcaggagaaacatggccaaaggactgaggtggggtgacagggacaggcaatgctagagatccgaaggtcacatcctcggcctgtcctttgcacactactcccttgctaggctccctgctcccgccaatctagacagtggcgcaagagactggggttgcactgggactccaggaaaggcttagctgttgacgaaggaccggggcggggccggggggcggggcgaaggccaggatctccaggtacccggaaccccaaggggcgggtgtagcaggcaatcttggcgaaactgggaagggcgggcaggagggcagggaagccgctcacccaggcacaaagcgcctcccgcttgagcggactccaaagggacggtccgcggtgtgcagcgagctgcgctcaggggaccttgcgcccggcccttctgctgcacacagcccacccaggacctcccgcagcgctgacaggcggggcgggtgcaaagacggggcggggtctctgcgcccggccccctcccctgactatcaaagcagcggccggctgttggggtccaccacgccttccacctgccccactgcttcttcgcttctctcttggaaagtccagtctctcctcggcttgcaatggaccccaactgctcctgcgccgctggtaaggaacgccgggttccgtgcctggggatgctcgattcccagacaccatagagagtgttcctgggtttgagaaggtcgtattttgagatctcaactgtaggggactccttgacttagtccagtgctttcctcttggccaagatcctgagagcatttccttcctctctgtgcctctgtgtcagcgttgagggtactgaggctcaaggctgtcctgctccacgtcatgcggtttgtcccagggctgttggctgagccccagtgctctgaccaggctttgagcagcaggattagataggaggcaggggacattgcctcttcggggttcaggacagaaagtcgaagtcgccgtcttcccaggctgtgcctggagcctgggactttcctttggagtgcaaacaggaggctgcttggccttcccagcatgaagggagaggacatggggcttctcttcctctgctctgagtgggaaaggagctctgagggctggccccgcacagaggagggggcaatggagactcattaactcactgctgtacctcctgcaggtcactcgccgctcactggcttttttttctctttctcgcaggtgtctcctgcacctgcgctggttcctgcaagtgcaaagagtgcaaatgcacctcctgcaagaagagtgagtgtgaggccatctccatggtctggggctgtggctaaggttgggatggaacccaaggctggccctgagtgcatgcttctggggaactggccttcctttgtccccgtaggttgtcactgcctttctagtcttctgccctgtgcagggcgcctgggcagctttctcataggaagacccaccccagatatttcccagttgtctcctgacaaagccataccctcctgaactgagggtcctttgtggctggaggctctgttgggggcctctgttggggagggaggtccctgggcaagttggctgtgacctctcatgctcctcttcttccccaggctgctgctcctgctgccccgtgggctgtagcaagtgtgcccagggctgtgtttgcaaaggggcgtcagagaagtgcagctgctgcgactgatgccaggacaacctttctcccagatgtaaacagagagacatgtacaaacctggattttttttttataccaccttgacccatttgctacattccttttcctgtgaaatatgtgagtgataattaaacactttagacc

SEQ ID NO: 27 - DNA, 76829 bp, Homo sapiens
ccagcctgggctacagagcaggactccgtctcaaacacaacaaaacagaaaaaaactctttgctcaatactcctatggacttaatagcaatgattgctgctaatgtgattctaatactttttgggcatgccatcattgtttaatttcagagcaaactttctggaactgataaataataagctctccttaagaaattaaagtgcattaaaataaattgctttcaggggttcttaaacaagttcaagacatccaggagtgtgatacatttgagcgagaaatagctggcctagttcactctccacattaatcagaacgtctcccaccttctttttagggataagcactctcaaatatcattattcataaactaggggagggccgggtttccactcgcatcagttactttctctcccctgagaatatcttgcagccgctggaattttgggcccctttgctaggaggcaattaacaaattgcacttttactatcaaagctgagagtggcccagcagtggccctggccctgccggcacgcttccgatgcgtcgccctggcctgaagatcgccacagtcgggttcgcgccccgtggtcccctaaggcttccagggcgctggagctggtgcacaggacctgctcctccagggtccccatctgggtctccagcggtccttcctctctgccttctcctcgcagagcaccccgtgggcctagtctaaacgagggcaccactggtccggagttgcacttgttcgctccctcctgggctctggcagcgctgcatccccggggttgcttcgggttcgggcccaatagcagagtcagagccgagacgcatgtcccctgcaccggccaagggtgccgctggggctcgcgccaaggaggcaaaggcggggaccagaggcgccggaggcggcgcaacgcgcacaggtggcgcccggcctggccaggctctggcaggcgaggctgggtgtggtcgtgaaggggcgggcggaccggccccacactgcctcggttcggcaagtgggtcagttggctggggctcacttggcaacgggacgcgggaacgaggggcgcggacgcaggcccgggaggacgcggcggcgggaacctgggggcgcagggctagggcagcgggcccgacccgcacggctttcctggaaagcgctgcccctcgccgcggcgatgccctcgctgtggagagaaatcctcttggagtcgctgctgggtaagccgaagcccctcgccgcgagttcgcgggtgccagctccccgggccatgtccagagccgtggagccaggccaggttggctgagttcaggtaggaggaaaagggcgctccgtgcccagagtggagatgcttatcgtcccctgggaacttttcctactgaagggaataaaggaaaagacctagattgaagtcttcaagctgagtctgcgaggcgcccgcgagagaccccgtcgcccgagttcccagcagccctgggattgtgcccaaggagcgcgaattctcctcgtgtcggccttgaccccgcgcggccggtaccgtccccaaagccccccacccgtggcctttaagtttaacttaatacagttcagtgctgaactttaaaattcagaaggaaaggggcacccgttttccccaggagctgtaggtggacactgggcggcagctgctgccgtgggctgggcccaggacaagtggccttggtgtcggctgcacacttgggcatttggcgaaaagcatcagactcgagtctcatctgctctctcaccagctttgcaaaatcccgaggacaattttattggtgtaattctgtcggagctgtgtgagtaataaaatcaaagttcccagacaaacatttgggatattgctagaatccccggttcgttacaaaacaaagatccctctggtctgggtggggcgccttcctgagaacttgattttctgggagctggtaattctcgggagtgcttcagactatttttttctggctcagcctgtatctataagttgggagatgtacagtgcctagcattcaataagtacctcaggtgctaggtactcagtgcacttgatctcatttaatcctcccaacaacactgtgaaggggttgaaagtcctattttgctgattaagaaggggaggttggaaagtcagttggtagaaagttcccacgcccagtggttagaccggctacctttggagccaggctgcttagagttagggcaactctgacatttgctacttgtgtaaccttaggtactcacttaactttctgagtctcagtgttttgtttgttgttttgttcttgcttagttagtttttgcatttataagaggggagcggaaatagtacccacctcatagcttatggggctgtataaggaatgagacagatggtacatgttaatacttagcacagaccctagtgcatggcaagtgcccatagcgttaattatcattattgctcaagattatacagcagctgttggcagaggtacaacttacttcagatctgggtattccactacccagcactgcctcataaggattggactgaaaatggtctactcaagggaacgactgctgcctcactcaagtgcttttgggtgtagtctggggttggaggagggagtcctgctgcttgctgcccttttggactctcacaatatttttcattatacaggggacaacttaggtaagaaaattttgtcagtcagggtcctgacgggatgccaaattcaactcagatggtccaaatgaataggacttaataaagagactgtctacagccatatgggcaagggaaaggaacacgcaagggatgttgagagactcacggcagcaggaagccatcctctactggggcctgatgcgaggagtgggagaatatgtacatttcaccagaaatttcacttctgggtatatatcctacagatatactcagtgtcatgtgttacatagtgacatttcacgaggaaattgccattgcttttctgtccatcagtctcttaagcacaacacagtcagtgcagtgagttctgcggatccctacacaggtgtagagctcttgttttgttccatgtcagtggagacaactggaacccagttcaggccagagtcatgaagaagaatgaccagcccaagcggctggagtggagggacaggactgtcgttagaaacaatgttgaagttacactttctctctttaactttttttttttttgtaggatgtgtttcttggtctctctaccatgacctgggaccgatgatctattactttcctttgcaaacactagaactcactgggcttgaaggttttagtatagcatttctttctccaatattcctaacaattactcctttctggaaattggttaacaagaagtggatgctaaccctgctgaggataatcactattggtaagatttaaaagagtttctttaagttgttttttttaagttaaaaatcaagtgagattatgtagactgttctttgaatactaaatatttgaatttaaaaaatcaaagatttctcttttccttaccactgccttagaagagctttagtaattggaagactagactgagagtcaatgtgttttacatttccattgttttttccagactagaaagacctaaaaatcactgcaatgagtaggggaaagacaccttaaagaactgatcagctcttgaatacattgtgtttttctttccaactgtgacataacactcaggagccatttaaaaaagtttgttaaataataattcacaagaaatgtgaaaattatgatgaaaaacaccacagtaagcagtcaaacaagaaactaggaaaaatatttgcaactctttcagccaaagggctaatttctcttatatatagagttcctacaaaccaataataaaaagagaccaacaaatcaatagaaaagggggcacaggatctgatcagttcactggaaaggaaatacaattagttcttaaaaatggaatcaaatgtataggtcataaatcatacacatacagatatgtttatctagagtttgacaagtagattggcaaagaacagctgagtcttactgcactgtgcagtaggggtggggaaacaggcactcatacattgcttgtgcgagtgtccattggcacaacctctatgaagaacaatttagcagtattatcaaaattacaaatatgcatatttcaccagaaattccacttctaggaatatatcctacagatatactcacagtcatgcgttgcttagtgacatttcactaggatgttgccatcgcacaacacagtcagagcagtgagttctgtggatccccacaaaggtatagagctcttgttttgttttgtgtcagtaaagatgaagtcttgctatgttgctcaggctggtctcgaattcctgagctcaagccattctccctggcctcccacagtgctgagattataggtgtgagccactgctcatggcctagagctcttgtttttaaaacaactcaggctcagaaggatagtggtaaaaactcctgaaaagtgtgccctttacaaaattggtgtccataggaattgaaagacatgtcaaatggtcttgaaattttcagctccagaaataacaaatgaagtttcctacccttaactgagtaaatattaattgatttcaactggcattggcttacagtatccttacatgaaccaccgtagctccgagtcttgcaagattcatttccttatcacacttcaggttgattttatgggagtgatctcataggtggtactttcttgtcacctttggtgctgcctatgtgggccttacctatagatccacagactgagtagttactgggacagtttccattacttaagtccatttttggcccagtaacttctggtgatggtaagggatgtgatataaaataagtttggggtagatattgtattttattttgatgcttcctattcccttttcactttcttcctccatgaaaacacatccccttgagcagaagtagatttatatttggaaatatggaataggtagggaacattactcagagttgaggaggaagtggccaatctctgctaagtgctgttccaggtgaccattgagctttgttgttgctaacagaggctaaagtaagccacgatttgtcttaaaactcccttcaaatacttcttaaggacatgaaacaactttgtttttagagtcctgagatattcttatataaatacagagaggatctgagcattacatgccatctcacttctggcacctcagatattttaggttaattactgtgtaattaactatgaaaccagttcatactcctatcaatttagattatttttgatccaccagaaaggctataatcaaaaaagacagacaataataagtgttgacaaggatgtggggaaattggaaccttcacacattactggtagaaatataagaaatataaaatggcacagctgctttggcaaagcgtgatagaagctgttatcatatgatctaacaactctattccttggtatgtacccaagaaaaatggaaacatctgttcacacataaacttgtacacaaatgttcatagcagcattattcatgagagccacaaaatggaaacaacctaaatgcccatcaactgatacatggataaacaaaatgtggtatatacatgcaatggaatattatatagctatgagaaataatgaaacactgatacatgctacaacctggatgcaccctgaaaacgttatgctaagggaaagaaggcagtcacaaaaggccacatattgtacaatttaatatgaagtgcccagaataggaaaaattcgcagagacagaaaatagattagtggttgccagaggctagggcatgtggagagaagggaatgagaagtgacctgctaatggggatggggtttctttttggggtgatgaaattgttctggaattagataatggtgattgttgcacgactttatgagtatactaaaaaccattgaattgtatattttaacatggtgacttttatgatatgtgaattgtatttcaataaaaattttaaatacatatataaaattatacatcaactctgtcttcctgagtataaagatggtatcagataacatgcatcaaatgcagatcacggagttccaatccatacttgccagaaatgcttagctctccctattttgtttgtaggcagcatagcctccttccaggctccaaatgccaaacttcgactgatggttcttgcgcttggggtgtcttcctcactgatagtgcaagctgtgacttggtggtcaggaagtcatttgcaaaggtatggttaatgtttcatgtacttatagacaaacaagtataaccagttaccaaagggaaacctggggccaggagttccaggttatagtttttaccttccatatggctttgtcaaagtctccttttttttccttttcccaaaacaaggacatgaatacttgccatcaatctcaataaggttttgaaaactaaagaattatagcaagttgctgaagttgctatatagaggctaaatcacattcattattgcaaattaccaataagactatttcagctacttattctatgaaactgaaattcatgatggacatagtacattgagtccacataaaaagtgtttaaaaatacttttgcacttacaggtacctcagaatttggggattcattttaggacagattgttcttgttgttctacgcatatggtatacttcactaaacccaatctggagttatcagatgtccaacaaagtgatactgacattaagtgccatagccacacttgatcgtattggcacaggtaatactgtaacttaggaattttctctttgcagagcttacctttcctatgtgaatgttgcacatcttggaaagaaaatctataaaagtagtctttctgcattatatctatatttcagctttttcttcctctgaaataataattggtgcagccagtgggctatttgctaagcaggaggcacattttccttgcctgtacagacagagggtgaaaataaaataccattactggtttgtagcactgtggcagtgggagacgagaaccaggcctcatatcccagctggcattcagctctgtcttcctccttctttcccctggtcagagctctctaggatgggattctccatcctccacctccacactgacctcagtacatctgtaacactaaggaaagtttctgtcacgtatggctgtcactggaactccctgggttttttttcccagaggtctgaagctccaaatctaagaattgaaaagataagaaaccttgcatatgcatactgactttccaatcacctgtctctcccaggggccagctttctccgagacagaaacatgcccagcttagagtttgtttcataaaccaacccgagactcttctaaaaagaagggagaggtattagtggattctagttaacgtgctcctagctttttgtgtaactctcagtgagtcactgttcttctgtaactacaaggtgaaatctcacagactaatggaagtttagagggtattggctcaccaaaaagtgcttgtataattccccctgtggcccctagtttggcatgaaatgagaatagagggaaattatgtcagtaaattggccttgtgatgttaatagtagaagacttagaactctgtctggtcccctaacttatgttttacattcatatctagaggcagagactcgggcagcccattttgccggtacagcctgataaagatctgaacttcagggtactgtttacatctcctgacttttcttctatctggcctctgttttaaatgtatgtgacccagttcctggctggcagtcccttcctccatttctgctctgtgccttcctttataaaactgactgttcaccctgcaccttctcagcctatctgagcataccaagtattttttgtagtttcctttgaagatttgttgggtcctgggtgggggtggagtcacccactgtaatacactgcattttactcagcaaattcagtttagatggctctttttcctcaaaactctccgctgagcccccagacccctggcctcccttctgtcaccaccgccttctcccattccatcccatccccatagctctcggctctgcccctcctcactctgatcctgttaatgtcagagaagctttcttgggaaattagactgccagccatactgtcagaccctaagaccttccttctgtcctgtagagggctggatggggtcacaaagcatctgcccaataggctctctctgtttctacgaagaagtcctcctgctggcatcttctccagttgttacagttttgtgtgtgaagtcattgctgtgatgaattggacctcttggttaaacagtaccaaagagctacactgcctaagctccaatcccaggttcctaggttatctttactagctgtgtgaacttggaaaggctacctgatctctctgtgtctgttttcttgtttttgagatggagtttcactcttgttgcccgggctggagtgcagtgtcacgatctcagcgcactgcaacccctgcctcccaggttcaagcgattctcctgactcagcctcccgagtagctgggattacaggcgtctgccaccgtgcccggctaactttttttttttgtatttttagtagagacagggtttcaccatgttggccaggctggtttcaaactcctgacctcaggtgatccacctgccttggcctcccaaagtgctgggattacaggctcgagccactgcatctggccctgttttctaatttgtaaaataggattaatagtagagcctacctcataaagttgtgaaagttaaatgagttaatataaagttaatatacagggcttggaagaggggttggtgcacagtggctgcccagtcaatgcactaatattactctgcacccacagagggttagatgagagccctgttctttgggaggaagcagcttgtgtactggaaatgttccactcaatttgtacaacatttgttcacaaacacaaacactttttctgcaatgcgttagcttcacatgaagcaaataattttctgcattttcacctgttgaattccaaaatgccttttctcccttaaaccattccttatctggcctgcatggaattatgtctcccactaaatagctgtcagcatgtttagcttcatattgtagttgcatgtctcatctcctcttccgaagtaagcttcttgaagccaaataccatttcttccttgctaaaagtctgctaaatatagagcgcaaatttccatataactaaactttttccatatatgtatttttaaattctagatggtgactgcagtaaacctgaagaaaagaagactggtgaggtagccacggggatggcctctagacccaactggctgctggcaggggctgcttttggtagccttgtgttcctcacccactgggtttttggagaagtctctcttgtttccagatgggcagtgagtgggcatccacatccagggccagatcctaacccatttgggtgagtttgggtttggaagcaatcacaaaatcggcagttatgcctggaggaagcaatgcctcctttgtcagacagctaggtctgtgctagccagatatttcataccactctccctagatatcagaatgtggcatgaaattattgtgtgctctggagagaagggcactagaagggtcttttcctctgtgcagaaggattgctgaaaagtagatgtgggaggcccaatggttgtgcacagctaagtaagaggttcccagagctccagcataggcatctcgaggaatgcctgcacagaagagcattctcagtggtgggagaggagcagcattccctggccatttcctccagaccctctggttatggttatgggcatttagtaggataagaccacagtcccctgaggagactaggttggctgcctggggcacagatctctattctcagcaaaggagggcagccccaggagatccctgcatcttctggtactttcttgttccagctgtgggacagggtcacacagggagttagtagtctggagtcaagtgttggtccttgtgtttggtcctttttaactctctctctgctcttcctgacacatcttttctcttgtaactggctccatctcttcttgcaaaaaaattggaggaattcttaaaagatctgcctccgatatcttttctctcttgtagtgctgaattcttacaattgaaggcatgcagctgcctactggatctttccccagcagggatctgggcatatcccacaggcttgtcaacctcagcttgtccaaatctgaactcagtatttcccagtcctccacgcatgttcttcttcccccattcccaggtccattttgtctgtccacctcatcatccaaacctgagaccaagagtttgcccagaattctccatcttcctcattttctccaactcagttctatgacttctcttagattaaccccttcttctctatccctaagttcatctgccttagtggagtcctcaccattttttcattcaggctattactgttgtctcctaattgtctctctttagcagaatcttctccacatggttccagaatgatctctgtaaaatgcaaatctgattccaccactcctttactgataacctctcagcagttcccccccaccaatacctggtggcccccaattctcccatatgaggcaggatctggcccccctacttacctttccaaatgctttctgatcttatcctcctgcttcacctgagtcgaacccacttgcgcttctctggaagtgccagactgttcctgtcccccctctgcctgggcttgcttttctgccttgatgtcctggcaagccctactcccttcaaaacccagcacaaacattttctctgtgaattattctgttattatcacaggggatcctcctttatgccacatactataatactttgagtcaatcaatttttatatatgtgttatatatgtgtacacacacacacacacacacacacacacacacatatatatatgtatctgttagaaactttatattctgtattacagattttaaaaaatgtttttcttcctgtctagacactaagtcccttgagggcagggaatgggaaaaggaatgaatgttgattacttactctgtgtcaggtcctgaacaaggacttttgaaaatattatttcatttagagtctgtatcttcttccatatctgggaggaaggcagagaagaaagaaaggaacaaaaggccagagaggaaggaagaagtttattcctatgtgttaaagcttagtttccaaagttacctgtgaaaacaagcataagttttgtggcagagtaaaggaagaactttaatggtaaatggtgagtcctggtaaccaggagaaactcaccattcaactctgggccaatcatattacatccctggccttgctttactcacaagaagaatgtaactaaacttcagggggaaactttctcacatatataaaatcagcatttgcttttcagacatttcctaatcctgtatgttagaatgagacactgaagacggaactgcaactcacaagaccagcatttcccaaactgtgttctgtgagatgctggtttcttgagatgttaatggttactctgagaaaaagaaaatgcttctacatcaaataggttgaggaaatagtgcatttcaatctccctttctttgtgcttcacaatgcacatcagcatattagagacttttgcaggtttcctaaagttatttgaacatggaattcttctttagaacatctattaatatctgacagaataggtgtgtttctcagaaccagcttgagaaatgttgcattaggccatcatcatgaatagctgggactacaggcacctgacactacacctggctaacttaaaacttttttttttttttgtagaggcaaggtctcactattttttccaggctgctctcaaactcctgacctcaaacaatcctcccacctctgcctcccaaagtgctggtattactgtcatgagtcactgtgcctggccctatctgcattatttattaatggtgtttattatatgtttcccccactggaatgtgagctctatgggagaaagggatcgttgttcattgatgcatcccaaacacctagaatggagcctggcacatagtgggcactcaaaaatatttgttgttgatttgggagtagaaaaagatccacactgtccttcatggcctcttctcatatttggtcttctgtagccccagggtcattcttacacaggtaggagcaggcagtaatgtggctaacagcctcatcccagagcctgaggacaattttagattcttagtcctatgtgggctactgtgtatgacctcaagcaggttacttacataccctttcccccagaattctcctctgcaaaatggggataatattagcatttatcttacaggcacatgagaattaaatgaataataattacaggggaaaatcttaaaatagtgcctggtatgtagtgcatgctatggttttgagcttaatttatgtgacagctacttaaatgagtcctatattctagctattattgtttctgggtttccttctaaagtttagtcaaatttcttttttcctcctcttgcaactttttgccaaaatagcaacagaataaaatagtttgtggttgttttaaaagacacacagctatcagttatttatcaaactgacgctggtcttgggaaggccgagactctaggcaagagcagtattgaggtagaggaaagaaagaaaaaaaagcaaactaaatagaaaccattccaatgacctttgctttttgttcttggcagaatcatttaaaatgttactgaccaacatggactgtactttaatagtctgagaaagcttggttactgtgtttacatgataagttggcagatatcattgatctcatggcagaggttttattccttctctgttctgaatgtgtataatattggcttccagtgggctctcatgatctcactggttgtttcacacacgttatctcttatatgtacccagaggtgggaggtatatttctattttatattcgggatgatgaaatattactaatgtcacatgtcttagagcatgtcctttttcacagaggtgcagtactgctgtgcttggcaagtggattgatgcttccatcttgtttgtggtttcgtggtactggtttgatctggtgggttacaggtatgtggaatttacctgcagatagaacacgactgagcttggttatccagtttgtttgcaagcatgcgcaactcgactgaaagtagatacaaccatacaaatatgtactgtggccaaatgggctgttgtaaacagcaactataatgcagatgtcaccaaggtcaccggtgactacctgctctgagttcctgcttcctcctacctccgcctccccctcctcctgtggctgtgctgctttcctggactacactgccataatactacctactcccaaaaatacataaacaaggcacatgtgttaagtagcagatttataaaaattcttgatttttaattaaagtatattattttatttgtataaacttatgggttacaagtgagattgactgattgataacttttaagttcaggggtacatgtgcaggtttgttacataagtaaattcgtgcaatgggggtttgttgtacagattattttgttacccaggtaataagcctagtacccgttattcttcctgatcctctctctcctcctacctgcctctggtggaccccagtgtctgttgttcccctctttgtgtccatgtgctctcatcattcagctcccatttaatgataacatgcagcatttggttttctgttcctgcattagtttgctaaggatgatggcctccagctccatctgtgttcctgcaaaggatatgatctcattcttttttatggctgcatagtattccatggtgtatattaccacattttctttatccagtttaccattgatgggcatttaggttgattccatgtctttgctactgtgaatagcactgcaataaacatacgcgtgcatgtgtctttatggtagaacaatttatattcctttgggtacatacccagtaatgggattgctaggtcaaatggtaattctgttttgaggaattgccacactgatttccacaaatgttagactaatttacactctcaccagcagtgtataggtgcatagattgggtagtggtcaagtcagagttcttaggctgtccctcacctgatggatacagtgaacccataagtaattctcatcagtagcagattttactgaggagatgagggctgtgcatggccatgttgccagttgccagacctctttcactcttcaagattccttgcttttccgtgtttcaaaaatgccatttagagttccatgatgaagctccatttccctttctcctttacatgtaacaggggagctcccagccttccacccagctgtagggtccatgtctgcttactcaaagacctgacccatctcttcccagttacaccctttaggaccccagaagtatcagtgaagacaatcatgttttgggctgccctcttccctctcccctagtctttgtgaagaggagggagcattgaacttattttcctataacagaattatgccagccctcctcctttcccttaaaaggcaatatttaatgattatagtcaggttttctgactctaagtaaaaaaaaaaccactttattatatagcaaatactatatttggtttatgtgaggagagatgagatgttgttaatacatgttaattaagttggtgattcagagtggtactctaggtgctgtgtgtgggtttgagagactgtatcagtaatagaagatttaggatgacaacatagcaagtgaatttctgtacaccgtaagtgccgtcacatttgcatggaaatgtatgtgtaatccagatacgtggctaaatcgatgaggttggccaggtcctcttcctcctggagctatgtgaacatactgttgcagtcttgttgagctgtttgtattgcttgtgtattttttgataggcattgtatttggagcctgtggaggtttgtgtgtacctaagagtaatctttcttctcatcagagagtttatttgtgagattcctcaggaaaagggccaggaaagtttgtcagtgctgagtttgcattaagcatatacagtagcttcttaatctgcatataacttggaaaaggaaaaagaaatgcattgagcgtttgttcagcatttatatcatgccttttcacataaagtataagcaaagtgcttattgggcaggtagttaacagcttcattttaacctgaagaacacagagaaatagactgttagttaaagaacaggaaagctgtgaacctaccgtcttatgcttatttccccagacaagtaaggtcatatccttgagagtcaaacctaatctagttttgttgtctctctggagtattaaatagtagctttaaagactctaagaaaagcagatttaaggcttctagaaggctgcttgcagtagaagaaagcagggccataattcaccagcttcatcttcctttctgatcacttactcacctgcaataagttggagctcaagcttaattatctggaggtggtgcccacttttcactgtgattcatctctggaaaccacacaataatgcaagctgtggccaaagaaatcctgttttcccattgcacagtttatgttgacaatcccaactggagactcagcatgaaattaattatggcagtgactgaacaatttcatacaagcaaagatacaggtgctttaaatgttgatagcagttaaattagtaaagccagagttctatttttaaaaaaagtctagatatagtaaacatattgataggaccccattgtactatagtgtccagataattttactatatggaaaacttcatttattgaaaacttacatgtcagttattataattgttattgaaatagttaactattacttctgcttgatgtctttgatgttgtacagatttgggggagattattggagggcctcaaacaaaagcagttaaggaatacagttaaatgaaaaaggtaaagtgactaacagtgcgtatcatatactgtcattggtgtacaaaaaggaagggaaatgcatgcacatatgtatttctttgtatgtgtagggtatctctggaaggatgcaatggtaagtgcttacactggattggttgccttcactaaggggaacaaatgggttacgggtcagaaagtcccttttgtagcatttgaattgtaattttgaatttataacctatttaaacagtacaattttggtggatttaaaatatagagcctatttaaaaatagaaataaaaatgataacagtcaagataaatttgagagatgttttcattccctctagataattctctgtagtaaggagaacaatattattctaacgtctttagattagaatatcaaattcgggatcattcttttaaaaacagtcattgtaagccgtaagtaagaaaaattcaacctcactaacagtcaaataagtgcaatttaaaatgtcatagcattttcgaccttaatttggtaaagatttttggtattattacatatatttggtaaagatttttaccaaattaaagatgaaattttggcaggatgtgagaggtgtcaagacttggcaagttttctgcaggaagcaaagacaagtattaggtttcctgaaagctgggtataaggtttcctgaaagttgctttcaggaaagcaactggtcacaagtcatgactttaaaatacttatgccccttgacataagagttgtgttgctaggaatctgttttaaggaaataataggtaatgtggtaagggatcattgacaaaaaaagatgttcatcacactgttgttttaaaagcttgacataggaaccttcacaaatggccagcaataggaaaatgcttacttatattgtggtgtatttatccagtgaagtattatatgtacattaaaatgttttagaaaaaaattatttacactagtaaatgttcctgatataatgtttcataaatagcagcatatagtctttaatatgtggtacaattccatttatgtaaaaatacttctgtatatacacagaagagacttagaaatacacagaaatattggctgtggttatctccgtcttagacaatccttaattgcttcttttcagttctgtatttttaaaatttctaaagcaaataggcattacagttgttttattttaaaatgaaaaaattccattgagaatctaggtatttgaaatctccctatggagttaaactccatgggttgtagaggaccttggaatctagttctcatgctcatctgagagatgttctttttgaagtggggagaaataggcagtcaggcaggtggcattgccctgtgatggtgcaatggaatgtattgatgaacttattgagctatggggcattaagatgctgactggggccactttctgcttcccactcctttctggagttcttggccgaagtagtgaagagcctgctctagctacccttgaagggtgggtcccaattatacaacatggattggaatgtttcaaaaatgccatattttctatggaaaggggttatattgatggtcccaagatggagtggaccctgcagtgctatttcaaagctgatttcacaaggattgggggaaaggttatgtgatctcagcattggctcaataaactaacatttacagagtgcctgctgtggatcaggcagaatgcatagctcctgacacctagcaggctgttgggtaatgaatgaactgattgcagaattgctaaagcagtgagcctacaaatgctatgtcttctcttggggctgtgtggttggaaaagtcaatgtacctcttgtaggacaggtggtagcatttagatggacagaaattccttagaagccccttaacagaggtgttctagaaaccacactctacctgttttctaatgtcctgcatctgattggttaaatgtaatatttttggacatatttttggtattgcagaaattttagtttttattgctgttaggatcttaacagcaattacctaaaaatacccttttcactcctcctgccctttctgaggaaatagcagtgaactgagatttactagatccacattctacctccagttgagacaataactggctgtgtgacattaggcaaatcacattaaccttgtcagatcttagttttctcatctgtctggagattggatcagtatacccctaaggtctgttctggtcctaaaggctataaattggtcatcctctaagctcgactgctttcctgtctgattcttttctctctcacaaacaggaacagcttcagctgcggggctcctttacctgcacacatgggcagctgctgtgtctggctgtgtcttcgccatctttactgcatccatgtggccccaaacacttggacaccttattaactcagggacaaaccctgggaaaaccatgaccattgccatgatattttatcttctagaaatatttttctgtgcctggtgcacagcttttaagtttgtcccaggaggtgtctacgctagagaaagatcagatgtgcttttgggtgagtacatttgaaaggtctggattaaaataattgctcaaaaatatccttatggactgaccaggatttagcactttatgtaactggtggaaataagcaggatgatctagctttcttggtaaaatagactctcttgattaaaacacaaaacctggagtgatgtctaaattataaattaaaatcaaatgtattaatttaccagcgcatttctgtaatacttattactacaaaggtcttttaaattaattagttgtgaaaagattcagtccatactaaagcgtaaacaatgtaacacttgtgttatacgatgcgttaggaaaaggtatgatcatgatactcatgctgccacttcagtggttggctcgtaaatatacatggggattgtgattttttggggttcccctgaattttatttatgaatgttttttgagatgaggtcttactctggcagtgatgtgatcacagctcactgcagccttgagctcctgggctcaagcgatccttctacctctgcctcccaagtagttgggtctactaggtgtgggccaccacactccactaatttaaaaaattttttgtagagacaggggtcttgctatgttgcacaggctggtcttgaactcctggcctcaagtgatcctcctgccttggcttcccaaagtgctaggattacaggtgtgagccaccacacctagactctattatttttatttaccatatttgtaacaaaaaattcatatatcttagtgtaaatggtaaatctccaagtcatagaacaaatatatttaccattttagtggttatgaatttgcataccaaaattataatttaataaacttagctcagtttaatattttaaaaattgattcacataccaaaattataatttcataaacttagttcaattttaatattttaaaaattggcttctggcaataatacaattattggtgtatactaggcatacataaatcgaatgttgtgaatcattttagtttacataattttagcttaagtaacatgtcaaatacttctacaaagtgtttgaaagatgaggagaaaaaacatgttaataagggatctacttgtttgtttgttcacttattcattaaaaatattaacacgatttcactggttgtctacattttgaaaaaaaatgatcatgtaccttatgttccaggaacagtgccagatactgaagattatttttacacatttttatctgtataaatttgtggggtacaattgcaattttgttacatgcataggttgcatagtggttaagtcagggcatttagagtatccatcaccctgacagggtacattgtatccattaatcaatttctcatcattgccccctttcccaccctctcactcttctggtctactttatctaccactcccagctgctgaaatattaaaaacacccactgtccttgcctacctggagctttagttgaatgggggaaacatcatatataaaacgagacaaatacttaagaaattacagttgtgtgagtgctactcaggagaagtgaaggcttctattagggttctgttttttttttttcttttttttttttttgagacagggtcttgttctgttcctccagctggagtgcagtggtgcagtcatagctccctgtatccttgagctcccccctcaacctcccaagtagctgggtctccaggcacacaccaccatgcctggctgattatgttgttttttgtagagatggggtctcactttgttgcccaggctggcgtcgaactcctgggcttacgcaattctcttgcctcagcctcccaaggtgctgggattacatctacctgggttctgttacagttcccctggtgccctgacagacatccgactactctgcacattttgccatatgcttttctaccccacgagctagacatctgtcaggagaggctggtttgaaagacatattttaaaattacatgaaatatttttgaattaacttggagaatttggtatttctggtaaatactcaagctttcatctaatgagagaaacacattgctgcatttcctccgtggtaaccttggctttgcaaactttgtatttcttctgatttatttcaggtgtgtgtactctctcctgctttgttttcttgtccaatgccctgctttttttcttataccagcttgcttagggatctgccatgagaaaaaaacaaatgaaagtaagagctattccatgcatgagtttgtttctttagaattttatgaacgatgagttttttttttagtttcttctcactacttatggaattgtagaaacagtgcataattacagcttcatacaactaagaactttaaagaaaaataagagtgatgttatttgatgaggccacaaaagccaagaaatgttggtaatattcagagtggcttttaatacaactgagttgaaaagaatatttattatatcagaatttagttataaatttatttcctggattcctcctgctatttcctggaaaattggacaccgctgtttttgcttggcttctgacttttacttgacatttcttaaatgccttaatttcttaatttccatatggcagcatatctctgtttccattcttagtatgtatggttttagatgaagtaagtaaactttaagtgtaagctagtttgttgcatatcccaatttagctccactttattggctggcctgttggcacactgtgatttccagcatgcatcctctgtgaggcctctgtgcccagaaaactcacatcctggggcagaattatcacaagcactgccatattaagagcctacgtatgatccattgtgatcctcaacctggtgcacggaagggctcttattgcatccctatgggagctcagaagacttcactgtcccctgcccaatcaacagtcagtcatgaacacgttcagcaacctaacaactaggaaatactcaagaaattcaaagaaatatgtatcgggaaaaggctggggtcctgtcatttaaagcacgattcctagaaccctacctgatattttccagttatcaaaagcactactagagtaattgtttaggttctgagataaattaaatcagtacatgaatttccagggtatgttcctttcaaggaactctcagctgctggaatacaacattggaaggatttttggatcagactataacatattctttctttctcttataacagggacaatgatgttaattatcgggctgaatatgctatttggtcctaagaaaaaccttgacttgcttcttcaaacaaaaaacagttctaaagtgcttttcagaaagagtgaaaaatacatgaaactttgtaagtatagttttacattcttaaaaaaaattaattatataaaattctaaacgtatgaaattaaagagtataatgatccctcatgtatccttcatcctgtttcagcaattctcaacattttgccatgttgttaatagctatcttctctagtttttttaaaaaattatactttaagttctagggtacatgtgcacaacgtgcaggtttgttacataggtatacatgtgccatgttggtttgctggacccatcaactcgtcatttacattaggtattcctcctaatgctatccctcccccctcaccccaccccacagcaggccccagtgtgtgatgttccccgccctgtgtccgtgtgttctcattgtttaattcccacctatgagtgagaacatgtggtgtttggtttgttgtccttgtgatagtttgctgagaatgatgtttccagcttcattcatgcccctgcaaaggacatgaactcattttttatggctgcctagtattccatggtgtatatgtgccacattttcttaatccagtctatcattgatggacatttgggttggttccaagtctttgctattgtgaatagtgctgtaataaacatacgtgtgcatgtatctttatagtagcatgatttataatcctttgggtacatacccagtaatgggatggctgggtcaaatggtatttctagttctagatccttgaggaatcaccacactgttttccacaatggttgaacttatttacactcccaccaacagtataaaagcgttcctatttctccatatcctctccagcatctgttgtttcctgagtttttaatgatcaccattctaactggtgtgagatggtatcccattgtggttttgatttgcatttctctgatgcccagtgatgatgagcattttttcatgtgtatgttggctgcataaatgtcttctttggagaagtgtctgttcatatcctttgcccactctttgatggagtcgtttgttttttttttcttgtaaatttgtttaagttctttgtagattctggatattagccctttgtcacatggatagattgcaaaaattttgtcccattctgtaggtttcctgttcactctgatggtagtttcttttgctgtgcagaagctcttcagtttaattagatcccatttgtcaattttggcttttgttgcgttgcttttggtgttttagtcatgaagtctttgtctatgcctatgtcctgaatggtattgcctaggttttcttctagcgcttttatggttttaggtctaatatttaagtctttaatccatcctgaattaatttttgtacaaagtgcaaggaagaaatccagtttcagctttctccatatggctagccagttttcccagcaccatttgttaaatagggaaccctttcctcctttcttgtttttgtcaggtttgtcaaagatcagatggttgtagatgtgaggtgttatttctgaggcctctgttctgttcaattggtctatatatctgttttggtatgagtaccatgctgttttggttactgtagacttgtagtatagtttgaagtcaggtagcctgatgcctccagctttgttctttttgcctaggattgtcctggctatgtgggctcttttttggttctatatgaactttaaagtagttttttccaattctgtgaagaaagtcattggtgacttgatggggatggcatttaatctataaattaccttgagcagtatggccattttcatgatattgattcttcctatccatgagcatggaatattcttccatttgtttgtgtcctcttttatttcattgagcagtggtttgtagttctccttgaagaggtccttcacatctcttttaagttggattcctaggtattttattctctttgtagcaattgtgaatggaagttcactcatgatttggctctctgtttgtctgttattggtgtataggaatggttgggatttttgcacactgattttgtatcctgagactttgctgaagttgtttatcagcttaaggagattttgggctgaaatgatggggttttctaaatatacagtcatgtcatctgcaaacagggacaatttgacttcctcttttcctaactgaatgcactttattcccttctcctgcctgattgccctggccagaacttccaacactgtgttgaataggagtggtgagagagggcatacttgtcttgtgctggttttcaaacggaatgcttccagtttttgcccattcggtatgatattgactgtgggtttgtcataaagggctcttattattttcagatatattccattaatacctagtttattgagggtttttagcatgaagcactgttgaattttgtcgaaggccttttctgcatctattgagataatcacgtggtttttgtctttggttctgtttatgtgatggattatgtttattggcttgcatatgttgaacccaccttgcatcccagggatgaagctaacttgatcttggtggataagctttttgatgtgctgctggatttggtttgccagtattttattgaggattttcacagtgatgtatatcagggatattggtttaaagttctctttttttgttgtgtctctgccaagctttggtatcaggatgatgctggtctcataaaatgagttagggaggattccctctttttctattgattggaatagttttagaaggtatgttaccagctcttctttgtacctgtggtagaattcggctgtgaatccttctggtcctggactttttttggttggtaggctgttaattattgcctcaatttcagagcttgttgttggtctattcagagattcaacttcttcctagtttagtcttgggagggtgtatgtgtacaggaatttatcaatgtcttctagattttctagtttatttgcatagaggtgtttatagtattctctgatggtagtttgtatttctgtgggattgaaggtgatatccctttatcattttttatcatgtctatttgattcttctctcttttcttctttattagtcttgctagtgatctatcaattttgttaatcttttcaaaaaaccacctcctggattcattgatttttttgaaggatttttgtgtctctatctcctttcgttctgctctgatcttagttatttcttgccttctgctagcttttgaatttgctggctcttgcttctctagctcttttaattgtgatgttagggtgtcgattttagatctttcctgctgtctgttttgggcatttagttctataaatttccctctacacactgctttaaatgtgtcccagagattcttgtacattgtgtctttgttctcattggtttcaaagaacatctttatttctgccttcatttcattatttacccagtagtcattcaggagcaggttgttcggtttccaggtagttgtgtggttttgggtgagtttcttaatcctgaattctaatttcattgcactgtgatctaagagacagtttgttatgattttggttcttttatgtttgctgaggagtgctttacttccatttatgtggtcaattttggaataagtgtgatgtggttctgagaaaaatgtatattctgttgatttggggtggagagttctgtagatgtctattagttccgcttggtgcagagctgagttcaagtcctggatatccttgttaaccttctgtctcattgatatgtctaatattgacagtggggtattaaagtctcctattattattgtgtaggagtctaagtctctttgtaggtctctaaggacttgctttatgaatctgggtgctcctgtattaggtgcatatatatttaggatagttagctcttcttgttgaattgatccctttactattatgtaatggccttctttgtctcttttgatctatgttggtttaaagcctgttgtatcagagactaggattgcaacccctgctttttttttgctttccatttgcttggtagatcttcctccatccctttattttgagcccatgtgtgtgtgcatgcaagatgggtctcctgaatacagcacagtaatgggtcttgactatccaatttgccagtctgtgtctgggcatttagcccatttacatttaaggtgaatattgttatgtgtgaatttgatcctatcattatgatgttagctggttattcgcccattaattggtgcagtttcttcatagcatcgacggtccttacaatttggcatgtttttgcatggtactggttggcgtgtttttgcaggtaccggttgttcctgtccatgtttagtgcttccttcaggagctcttttagggcaggcctggtggtggcaaaatctctcagcatttgcttgtctgtaaagtattttatttctccttcacttatgaagcttagttataaaattctgggttgaaaattcttttctttaagaatgttgaatattggtctccactctcttctggcttgtagggtttctgacaaaagatccgctgttagtctgatgggcttccctttttgggtaacccaacatttctctctggctgcccttaacattttttcctttatttcaaccttggtgaatctgacagtcatgtgtcttggggttgctcttcttgaggaatatctttgtggtgttctctgtatttcctgaatttgaatgttggcttgccttgctaggttggggaagttcttctggataatatcctgaagagtgttttccaacttggttccattctccccgtcactttcaggtacaccaatcaaacctagatttggtcttttcacatagttccaaagttcttggaggatttgttcatttcttttcactcttttttctctaaacttgtcttctgactttatttcattaatttgatcttcaatcactgatatcctccttccacttgatcaaatcagctattgaagcttgtgcatgaatcacgaagttcttgtgccattgttttcaactccatcaggtcatttagggtcttctctacacgtttattctagttagccattcgtctaacatttttcaaggtttttggcttccttgcaatgggttagaacaagctcctttagctcggagaagtttgttattagccaccttctgaagcttacttctgtcaactcatcaaagtcattctccgtccagctttgttccattgctggtgaggagctgtgatcctttggaggagaagaggcactctggtttttagaatttttggcttttctgatctggtttctccccatctttgtggttttatctatctttggtctttgatgttggtgacctgcagatggagttttggtgtggatgtcctttttgttgatgctgatgctattcctttctgtttgttagttttccttctaacagtcaggtcctttagctgcaggtctgttggagtttgctggaggtccactccagacgtttgcctgggtatcaccagtggaggctgcagaataggaaatattgcagaatagtaaatattgctgcctgatccttcatctggaagctttgtcctagattggcacccacctgtatgaggtgtctgttagcccctactgggaggtgtctcccagttaggctacatgggggtcagggacctacatgaggaggcagtctgtctgttctcagagctcaaatgccgtgctgggagaaccactgctctcttcagagctgtcagacagggacgtttaagtctgcagaagtttctcctgccttttgttcagctatgcctggcccacagagatggagtccatagaggcagtagaccttgctgagctgtggtgggctccaccctgttccagcttcctggctgctttgtttacttactctagcctcagcaatggcagatgcccctcccccaaccaggctgcgccttggaggttgatctcagactgctgcactagcagtgagcaaggctccctgtgtgaggtacccacccagccaggcacaggatggtatctcctgttctgccggttgctaagaccatgggaaaaacacagtattttggcgggagtgtcctgtttttccaggtacagtctgtcatggcttgccttggctaggaaagggaaatcctctggccccttgcacttcccgggtgaggtgatgccacgccctacttcagatcaccctccatgggctgtgcccactgtgcaaccagttccaatgagatgaaccaggtacctcagttggaaatgcagaaatcgcctgtcttctgtgtcgatcatgctgggagctgcagaacagagctgttcctattcgtccatctatttctctacttttttttttgtactttaaagcaaatctctgatatcatgccatttccaccataaatactctgtattggttttatttcacttctaacatagataagagaattcaacatgcagaatttccaaaatgatttgttctaatggttgagactatttactccatttcttgttttccttttttggggagattatgttaatgtttgggatgctgatgaactaaaatctcaaacatgaaattagtttactattcaatatagtaaactcatgtaaaatagactggattaaataaaaatgtactgaatgtatttaatgtgaagacagcgtgttaagtagttgttaagtaggattcaaagatgtgaataatggtctccaccttcaaggacttggtgctttacaaaggagacaaaatattatagtgtaaagatataaaaaacaattaagaagctgtataagttctctatgtatttccaaaagaaatatcacaaaacagaccattatataaaaaccttcatatatgtttcatcttaatttaaaagattatatttggccaggtgcagtggttcacttctgtaatcccagcactttgaaaggccaaggcaggaggattgcttggggccaggagttcgagaccagcataagcaatgtagtgagaccccatctctacaaaaaatttaaaaatcagccatttgtggtggtgcacctgcagtcccagtagtctcagctactagggagggcgagggtgaagtgggaggatcttttgagcctgggaggtcaaggctgcagtgatggtgccactgcacttcagcatggatgacagaatgagactctgactcaaaaaaaaaaaaaaaaagagagaagaaaagattctatttaaacttagggagaaatgagattttttttgtgtgttttcttatgttttggtatatcccttgaaacaaataactagcagtttttgtttttaatcctgacaatctttgtctttttttttgttgttggtaagaaccacaattctttaattcacttatcaaatcgaggcatttggaacagtttatttacagttatttagtcatttttgtgtgattaaaaaaagacaagtttcttagagcaattttaggttcataggaaaattatatggaaagcgtggagatttttccatatgcctcatgcccccacatacatacagcaccccccactatcaaaattactcaccagaatgatacatttgttaaaataaatgaacctacattgatacatcattgtcacccaaaggccatagtttacattagggttcacttttagctttgtacagtttaggagttttgacaaatgtataattacatagatccctcagtgcggtatcatacagaatactttctctgccctaaacatcccctgtgcctcacctaatcatcgattcctcctccaaacccctggcaaccactaatgttttactgttttcattgttttgcattttccagaatgtcaatttttgtcttttaagggtttaatctatttttaccatgatttctgaatgtatatttatctaatgtgatcatcttacttttctttttcattttccactttttctaggtatgttttttcctttttctttttgatatttttttcattgattagggttttttttttcccttatgcccctcctccccactcctctttctagtttggaaattatactttcaatatctattcttttagtagttggttgtttttctcttagcacattgaagatattattctcctgtcttctgctgttgagaagtcagctgtcagtgtaattgtttttccttggaaaataatctgtcttttctctttggcagctcttaagatttttctgtgttttggtgttccgtagtttcactgtgatatatctggatgcagattttttcctccatcttgcttgatagtcttcaggctttatgaatctgaagagtcatgtcttttattatttctggaaaattctcaacattgtttctgcaaatattgcttctttcccattctttctctttctttttgactccaattagatatgtgttggactttcttattctgttttccattgctgttaacctctttcatattttctgcctctatgttttgggctgccccttgaactaactctctattcagctttgtctaatttgattgtctttgagtttctaatttcaattattataattatctttttatttctagaactctatttgatttcttttcaaaattttctgattatttattttagtctcatgttccctagtcatacttttgaataccctcttttatttctgtaaatataataagcatacttgttttatattctgattcagagagttccaacatctgtctctttgtgggcttgattctgcagggtgtttttttctttgtttcctgctcatggaaacttgttttcttgtgtgttttgtgacttatttttactttaagctcatggtccttggaacatttttaggggaaattcttgaaatctgggtttaaagagtggttgatgtacacatgtcacacatgaaaattaaccgaagaactacacatttcccctttgcacaaaatcattggccaataaattcaataattttataaaccttgttattttaaaacaaatttaggtgttttttttccctagtgccatgtgtttattccctcccatgtgagtggttcgcatacagagcacacacaggagtgggcaccatggaagagggcagcattcctggcttctgatgggaggatcttggcctcatggtgtaagaagggagaggatggtttatctcctgccttcactggggcctaggggacccaggagcaaattccaccctttccatctctcagccaaggagaagccaccttggtgacgtttagttccaaccattatagtaagcggagaagggattggcctggtctcaaccattacagggtgaagatataaacagtaaaggaaggtacagtttggatgaggccacaaaagagggcagatgacaccatcagaagcatgtgcaggggaggggcagttactgggcttctgggctgcttagtccattcaccttatctgtgatgacctttgcctgctcgaaaacaaccttctcagtgatgccagcttcccttgcatctagcttcttcccaatgcaggtgattactccaagtccctctgccagagcacgggccactttctgctcaatcagttcatctgactccccaaagacatgccttctctccgagtgccccaggactacccacgtagctctgcagtctttgattatgccagggctgatctccccagtaaaggccccattagtcactttgtagcagttctgcgcaggcacagcaatcttgggatctagcttctgctgggtgaagtcgatataggcagttgggggagagcaaaccacctcagcgtcggctggcaccttggtcacgttcagtgtcaatgagctccccaagactcttcttccacccattcatcttccaggtcctccaagaagaacttcctggagggtgccatggcactggagctgaggcactgaaggtcagtgtcagcaaatttattttattttatttattttaaaaaaacccaattatttcttttttctgtttagttctgtggctgcttgttggtgtgggattgttgggattaggactacggcataaagcctatgagagaaaactgggcaaagtggtaagtaattaaaaaccttgaaatagaattttatatggtatatatatgtgcatatatttgtacaatttaccattctgattgaacctggatctgatgacttcagagccctgggccctatctccttaacccttatgtgccagactgataagatagtgggattattttatgaagttgggttcttggaataggataggcccatacactagaggcaaattgttgatgattttgttttatggagttatttctgccattcatgatttaacatatctgaactatgtgtattagtttgttcttgcactgccataaagaaatacttgagaccgggtaatttataaagaagaattttaattatcccatggttctacaggctgttcagaaagcatggaggtatctgttctacttctggggaggcctcaggaaacttgcaatcatagtgaaaggcaaacagggagctagttatcttatgtggtggagcaggaacaagagagagagggagtaggtgctacacattttttttttttttatttgatggagtctcactctgccgcccggctggagtgcagtggtgcgatcttggctcactgcaacctctgcctactgggttcaagcaattcccctgcctcagcctcctgagtagctgggactataggcggtgtgccaccatgcccggctaatttttttttttgtattttagtagagacgggtttcaccatgttggccaggatggtcttgatttcctgaccttgtgatccgcctgcctcccaaagtgctgggattacaggcataagccaccatgcctggcaggtgctactcactttaaaacaaccagatctcatgagaactcactctttcactattacaacaacaccaaagggggtgttttatcatttatttatttatttatttattagagaacagtaccgagggtgtggtgctaaaccattcatgagaattccacccccatgatctggtcacccccaggccccaactccaacactagaggttaaaattcaacatgagatttggtagggacacagattcaaaccatgtcactatgaaataagcaactgttttatattggattttctgtacttcttggtagatattgctgaatacagcaatgtgagattctttaggaaaactcttacagataattcttgattttgcacattatgggtagcttatgccttgacaggtagtaaaacttttcttgtctctttctttcctctcttgctatctgcagttttaaatgttttaatatccttttctcttttagaacagtgggcagaaataagaataagtaattgaatgttgtgctttctatctgatctgataaaaaatctagtgtgtttcataatgcagtcagagttacagttttggttaaaatagaaattgttgagggttgactttgaattttagcaatctgtactagcgggaacatttttcattttgaataaaaagctacactgagaacacagaccatgcttctcttcttggtctttgtacttccagtaacttacagagtgcttgccaggtattcagaactaagtaactatttcttaataagtagataatagtagaccatcattacatgctcctttaactgtcggtcattattattgcaacataatgtccatcagaaaaggatacctaatgtcatccaggaattctttttggaaggagttatttgaattggatttaatacctgttcttttggtcatttgctcattcattcatttggctaatgattaccaaatgtttctttattacctggtgccagtgatacagatataaacaagttggacaagaacctgccctgccagagtttgcattctagtaggggagaattatagtatttagagaacaaataaagaaatggtctccttttagatcaagctgccatgaaggaaacaggattgtagaatggagggtaactgggtatgggggattagagaaaactgtctgaggaggtgacatttgagatgaaatttgcaagttgagaaaaaagttgtgaggcctgggatgttggcagaaggaacacatataaaggactgagggagaacgacacctggtgtgtttgagggacatcagggtgactggcatggctgaagctcggtgaagagtagtagaagatgacgtggagaggctggggagggccataccagggccttgtagaacacagtgagaagtgctgcttttattttttatttattttcattttattattagtattatttttaatgtcaatagttttttttttaatgttttagatggaatctcacactctgtaacccaggctggggtgcagtggcatgatctcgtttccctgcaacctctgccttctgggttgaagcgattctcttgcctcagcctccagagcagctgggattacaggcgcacaccaccatgcccagctaatttttgtatttttagcagagacaggatttcaccatgatgggcaggctggtctcaaactcctgacctcaagttatctgcctgccttgacctcccaaagtgctgggattacagacgtgagccaccgcacctagccattgtcaattgtttttgggcaggtggtttttggttatgtggataagttctttagaggtgatttctgagattttagtgcacccgtcacccaagcagtgtacactgcacccaatatgtagtcttattttgtgatcacgtttttttcaataggtttttggggaatgggtgctgtttggttacgtgaatatgttatttagtggtgatttctgagattttggtgcagtcatcacctgagcagtttaactgtacccaatttgtagtcttttattcctcactccctcccaccctttaataagcaactgagtctcctgagtctccaaagttcattgtatcattcttacacctttgcatcctcatagcttagctcccacttacgtgcaagaatatataatatttggttttccattcccgagtcacttcacttagagtaatggtctccaattccatccaggttgttgcaaatgccattattttattcattttttatggctgaatagtattccattacacacacacacacacacacacacacacacacatatatatatataaatcatattttctttatccacttgttgattgatgggcatttgggctggtactatatttttgaaatgtcaaattgtgctgctgtaaacatgtatgtgtgagtatctttttcatataatgacttctcttcctctgggtagatacccaggagtgtgattgctggatcaaattgtagatctatttttagttctttaaggaatctccacactgttttccacagtggttgtactagtttaccttcccacagacagtgtaaaagtgttccttttcactacatccatgccaacatttattagtttttgattttttgattatggccattcttgcaggagtaaggtagtatcacattgtggttttgatcaggcatttccctgatcattagtgatgttgagcatttttccatatgttttttggccatttgtgtatcttcttttgagaattgtctattcatgtccttagctcactttttgatgggattttttttttcttgctgatttgtttgaattccttgtagcttctggatattagtcctttgtcagatgtatagatagcaaagatttccccctactttgtgagttgtctgtttagtctgctgattatttcttttgctgtgcagaagtttttagtttaattaagctccatctatttatctttggttttgttgcatttgtttttgggttcttggtcatgaaggctttgcctaagccaattttaaaagagtttttccaatgtcgtattctagaatttttatggtttcaggtgttagatctaagtctttgatccatcttgagttgatttttgtataaggtgagagatgaggatccagttttattcttctacatgtggcttgtcaattatcttagcactatttgttgaatagaatgtccttttccactttatgtttttgtttgctatgtcaaagatcagttgactgtaatcatttggcttatttctgggttctctactctgttccattggtctatatgcctttttttataccagtaccatgctgtttttgtgactagggctttatagtgtattttgaagttggataatgtaatgcctttgatttattatttttacttagtcttgctttggctatgcagactctttttttgttccatatgaattttaggatttttttccagttctgtgaagaatgatggtggtattttaatgggaattgcattgaatttgtagattgcttttggcagtagggttattttcacaatattgattctacccatccatgagcatggatatgtttgcatttgtttgtgtcatctaagatttctttcagcagtgttttgtaattttccttgtagaggtctttcacctccttggttaagtatattcctaaatattttattttatttattttttcagctattgtaaaaggggttgaattcttgatttgattatcactgatcacagttggtgtatagcagggctattaatttgtgtacactaattttgtatcttgaaactttgctgaattcatttaccagttctaggagctttttggtggagtctttggggttttccaggtataccattatgtcatctgcaaacagcgacaatttgacttcctctttatcagtttgataccctttatttttttctcttgttcaatgtgctggctagaactttcagtactatgttgaatataatggtgaaagtgggcatccttgtcttgttccaggtctcaggggaatgccttcaacttttccctattcagtataatgttggccgtgggtttataataaatggcttttattaccttaaggtgtgacctttctatgccgattttgctgagggttttaatcataaagcgacgctggatattgtcaactgctttttctgtgtctattgagatgatcatgtgatttttgttttaaattctgtttatgtggtgtatcacatttattgacttactgatgttaaaccatccctgcatccctgatatgaaacccacttgatcatggtggattatctttttgatatgctggtggattcagtttgctagtattatgttgaggatttttgcatctatattcatcagagatattggtctgtagttttcttttttgttacatcctttgctagttttggtattagggtgatactggcttcatagaatgatttagaaaggatcccctctttctctatcttttggaatagtgtcagtaggattggtaccaattcttctttgaatgtctgatagaattcagctgtgaatctgtctgttcctggacttttttttgttagcaattttaaattgccatttcaatctggctgcttttcattggtttgttcagagtttctattttttcctggtttaatctaggagggctatatatttccagaaatttatccatctcctctaggttttctagtttatgtatataaagatgttcatggtagcattgaatgatcttttgcatttctgtggtatccgttgtagtattgtctgttttgtttctaattgaacttattctttacttgggttatctcactaatagtctatcaattttatatgtcttttcaaagagacagctttttgtttcatttatcttttgtatttttgtttgtttgtttcaatatcatttaattctgctctgatttttattatttcttttcttgtgctgggtttgggtttggtttgttcttgtttctctagttccttgagttgtgaccttaggttctctatttgtgctgtttcaaactttttgatacaggcatttaatgctgtgaactttcttcttagtactgcctttgttgtatcccagaggttttgataggttgtgtcactattatcattcagttcaaagaatttttaaatttccatctgatttcattgtggacacaatgatcattcaagagcaggttatttaatttctatatatttgcatggttttgaaggttccttttgaagttgatttccaatttttatttttattttttgagatggagtttctctcttgtcacccaggctggagtgcaatggcacaatctcggctcactgcaacctctacctcccaggttcaagtgattctcctgcctcaccctcccaagtagctgggattacaggcatgcaccaccacatccagctaaattttgtatttttagtagagatggggtttcgccccatgttggtccggctggtcttgaactcctgacctcaggtgatccacctgccttggcctccaaaaatgctgggattacaggcatgagccactgcacccggttgatttctaattttattccattgtggtccgagagatagtacttgctataatttcattttcttaaatttgttgacacttgttttatggcctatcatatggtctatcttggagaatggtgcatgtgctgatgaatagaatgtatattctgcagttgttgggtagaatgttctgtaaatatctgttaagtccatttgttctagggtattgtttaagtgtttctttgttgactttctatcttgatgacctctctagtgctgtcagtgcagtactggagtccccactgttactgtgctgctatctatctcatttcttaggtctaatagtaattgttttataaatttgggggttccagtgttaggtgcatatatatttagggttgtgatattttcctgttggactagtccttttatcgttatgtaatgtccttctttgtcttttttaactgctgttgttttaaagtttgttttgtctgatataaaaatagcaactcctgctcacttttggtgtccatttgcatggaatatcttttccacccctttaccttaagtttaggtgagtccttaggtgtcagatgagtcttttgaagacagcaggaacttggttggtaaattcttaccagttctgcattctatatcttttaaatggagcatttaggacatttacatttaatgttagtattgagacgtgaggtactattctattcattgtgcaatttgttgcctgaataccttgggttttctttcattttgttgttgtttttttaaggttctgtgagatttatgctttatggagattctattttggtgtatttcaagtatttgtttcaagatttagagctccttttagcagttcttgtagtgctggcttggtagtggcaaattctcttagcatttgtttgtctgttaatgactgtatctttccttcatttatgaaagcttagtcttgctggctacaaaattcttggctgataattttttggtttaaggaggctaaagataggaccctaatctattctagcttgtagggtttttgctgagatatctgctgttaatctgataggtttttctttataggttacctgatatttttgcctcatacctcttaagattctttttttttgtcttgattttagataacctgatgactatgtgcctaggtagtgatctttttgcaatgtatttcccaagtgttttttgagcttcttgtatttggttgtctagatctctagcaaggctagggaagttctcctcaattattccctcaaatctgtttccaaacttttagatttttcttcttccttgggaatactaattattcataggtttggtcatttaacataatcctgaacttcttggaggctttgtttatcttttaaattttttttcctttgtctttgtcagattgggttaattcaaaagccttgtcttcaacctttgaagttttttcttctatttgttcaattctattgctgagattttccagtgcattttgcccttctctaagcgtgtccatttctagaagttgtgattgttttttatttatcctacctatttcactggagatttttccattcatatcctgtatcatttttttttttatttctttaagtctgactttacctttttctggtgcctccttgattggcttaatagtcaaccttctgaattctttttctggcaattcagtgatttcatcttggtttggatccattgctggtgagctagtgtgatcttttgggggtgttaaagatccttgttttgccatattaatagaattgtgtttctggttccttctcatttgtgtagactatgtcagagggaagatctgggactcaagtgctgctcttcagattcttttctcccatagggtgctcccctgatgtggtgctctccccttttccccagggatgggactttctgagagctgaactgcagtgattatttcttttctggatctagctacccagcagagctactgggctctgggctggtacttgggagtatctgcaaaaaatcctatgatgtgatccatcttcaaatctcttggccatggataccagcacttgctccagtcgaggtagcagaggagtgaagcatactctgagagggtcattggttgtatttttgttaagtgtgctggttttgttggcctccagccagggtgtggcactttcaagagcacatcagctgtggtagtataggcaggatcaggtggtgggtggggccatggaactcccccaaaattatgtcctttttcttcagctaccagggccagtagagaaagaccatcaggtaggggcagggttaggtgtgtctgagctcagactctcgttgggctgggccggctgtagctgctgtgggagatgggtgtgtggatcctaggccaatggagttatgtttccaggagaattattgctgcctctgctgtctcacacaggtttccagagaagtgggagaaagccggcagccacaggcctcacccagctctcatgcaacccacagcatgaaaggctggtctcactccaaccgtgcccccacaacagcactgagtttatgcccaggcagccggtgagcagggctaggaacttgccccaggctacaagcctcccagctgagaaagcaagccaactcatagttccttggctgtcccatggaccctgcagcaacaatacacttccttcaaagggtctgtggattcccttggctttcttggcatgttcctgtggtagttcttggagcaaaagttcatggtgtgggtctccgtgtgctgctctctctgttgaagtgggagctgcaagttagttttgcctcctatttgtcattttcctgccatccccaatatgtagtcttttatcctttaccccctcccacccatccctccaagtccccaaagttcattgtataactcatgcctttgcatcctcatagcttagctcccacttacaagtaagaacatacgatatttggttttccattcctgagttacttcacttagaataacggcattcagacccatccaagttgctgcaaaagacattattttgttccttttcatggctgagtagtatcccatggtgtacatatatactacattttctttatccagtcattggtcgatgggcacttaagttggttccatatctttgcaattgtgaattgtgctgctgtaaacatgtgtgtccaagtgtcttcttaacataatgccttctttccttttgggtagatccccagtagtgggattgctggatcaaatggtagttctccttttagttctttaaggaatctctaaactgttttccattgtgattgtaccaatttacattctcatgctgattttattttacttgcaatggaagccactctagtgcctcaagcaggagagtgaagaaaaatgatatatgtcaatttggctgctctgtgaaaaatggattataaggggatgagaacggatgcaaggagataagttctgaggcttcttcagctgtctcatagagagatgatggtgatctttgctggtgtaatggaagtagagttggagataaatggatagacttagaatatattttgaaagtagaaccgataggattggctgagagggtagatgttgttgggtgaggagaaggaaggaatcaaggagacttctatgtttttggtttgagcaactggatgaagggaggtggcatttcctgagaagaatgaaggaataacatattttggagtgatgacatctagaattaattacagatgaatagttgtaagaaaaaggatagcatgataaatataatatgtctcttgaaatctctgttgatggttctcctttctttaccaggcagtcattagatttttttctgtttttaccgttttaaaaattatttaaatttttttgtcagtacatagtaggtgtatatatttttagggtgcatgggatgttttgataaaggcatgcaatgtgaaataagcatattttggagaatgggatatccatcccctcaagcatttatcccttgggttacaaacaattcaattacattctttattttaaaatatacgattaagttattattgactatagtcaccttattgtactatcaaatagtaggtcttattcttctgattttttttgacccattaaccattgccacctccctccctgagttccccactaccctagtaggtaatcatttgagatggatacttagggttgggcagcgcattatctgactcactcacgacctaagagaggaccttgtaaagggggctgtgctcctgggccttgacctttccagtacagcaagggtgttacatcattcataactaggttaaaataggctgaccacttcttcaatatgttgaaggcccctctgtatccctctgtgtgatttatttcccatgcaagagtaaacactatcctgagtattgtgactttttttagcactttcatgaattcctttttattgttactatatatgacagatccctagacaatatttttttctatatgacatctgatgtatctattttgcaacatactttttttttaaatttaaaatcatctttctgagattcctccttgtggacctatgtagccctaattcatttattagggctgtgtagtgttccattccacatagcaccatttgtttattcattttcctgttgatggacagccaggctgtttctaactttttactgttataagcagtgcttattacaaaactcacttttcaaacatccctcctaacttccaaacttaagctagaagttcacagaagactaatttgagaatgccatatagcaaatatctccttattttcatggattaaatgtgggaaaatgtctaaggaaattcctttgctgaaataagaaatttggtagagaggagtggagaaaagtgggtcactgaaactgccattgttcacagtcatcctaaactaccattaaaacaattcctcaggcaccaaccaaagaggtctctgctgccatctggcctttcaggtttggatatgacaatgaagggtggtctagtctagaaagatcagctcacctgctcaatgaaacaggtaagtcttcctggaattagttccaggttttgagaaactattattgttacttttattttcagcagggtcataagccataacttaatgcaggtattagattaaatttatgaccagcagatgatcataaactcacctcaaaaatgctttactttggcacgcagctgcagggggactgagcttctgtaaccactcctgtctttgtttgagagcaattaattcagttgattctgagcaactcctcatactgagtatctttaggggattcatgttgtgtttttgttcttagggatgcctctgctagtagcttctgtcacctggggacccactgttggggaccagaagacttggatcaaaaggcagaatgggttgtagggaaaagaaagagagatcagactgttactgtgtctatgtagaaaaggaagacataagaaattccattttgatctgtactaagaaaattgttttgccttgagatgctgttaatctgtaactttagccctaatcctgtgctcacagaaacatgtgctgtatggaatcaaggtttaagggatctagggctgtgcaggatgtgccttgttaacaatatgtttacaggcattatgcttggtaaaagtcatcgccattctccattctcgattaaccaggggcacaatgcactgcggaaagccacaggggcctctgcccaagaaagcttgggtattgtccaaggtttccccccactgagactgcctgagatatggcctcatgagaagggaaagacctgactgtcccccagcccggcacccgtaaagggtctgtgctgaggaggattagtaaaagaggaaggcctcttgcagttgagataagaggaaggcctccatctcctgcatgtccctgggaatggaatgtcttggtgtaaaatccaattatacatttgttctattctgagataggagaaaaccgccctgtggctggaggtgagatatgctggcagcaatgctgctcagttactctttgctacactgagatgtttgggtggagagaagcataaatctggcctacttacacatccgggcacagtaacttcccttgaacttatttgtaacacagattcctttgctcacgttttcctgccgaccttctccccactatcaccttgttctcctgctgcattccccttgctgagatagtgaaaatagtaatcaataaatacagagggaactcagtgactggggccagtgcaggtcctctgtatgctgagcaccggtcccctgggcccactgttctttctctatactttgtctctgtgtctcattttttttctcagtctctcatcccacctgacaagaaatacccacaggtgtggaggggctggcccccttcatgggtcagagggaggttgatttgtgaagcaaattgctttcaacaggcctagggccgatttgatttgtttcagtgctccggggtgctcatttttgtgtgaagcatctttgaaatctgagagtgtttttggtttgtagaccaactacgggtgtatggagcaggataagtaaaggactaacctgttctggttattcttaatgataagcgtgcctcctgagacatatgagtgtctatatggatgtaataccactaagacatttttttgccccttagcccttttttagtctgattacaggcttccaaggcacacctggtcaagatctaataaagccaatcaacttagttctgggtcagtactatggagctgtttgtgctggaataaaatgctatggtgcaccattctcttgtttctgaacataaattggatatttgagaaatgcattaagattatttgaaattttgggaatgatgttgagcacatttgaaaatttttatccttcttggtagttcctggaggtgtttcatgttttaattgcattctaaacgtggggaaattcctttagagctcagatttgagccacttctctctagtgactcactaataattactttgtttttgggtttatcagtaaagaaaaaaaggttaagggtcaagagtaaagtgttgctaattgttttttgccttgctgtgattcatcactgtatgctacttttttttttctgaacaggtgcagatttcataacaattttggagagtgatgcttctaagccctatatggggaacaatgacttaaccatgtggctaggggaaaagttgggtttctatacagactttggtccaagcacaaggtatcacacttgggggtgagtataccttgggagttaatcccgaagatagtcatgaaaggctaggctgcataggcttggagtggcaagttgatattgtaatatctttggtgaatgtgccccagtgatgcttcttgggggatgaggaggtgctggagatatgcacattctgtaatttttcaaatggtttttctgtggctggatatttccagttcttcagcattataaaccaatcaatctaggagctgaggttgcagcaccaagcatgtctggcctggatgctgtcctcatggagcttaccttccagtgtaagacagaaaatcaacatgtacacaaaaaaataaataaggtacttcacaatcatgataagcgctgtgtagaaaagaaaccactgagggagaataagtgggtgggcagtggccatggaaatgctactataggtagggtggtcaggaaggtctctgcaaagatatcatggtgagcaggacccaggaccagccttgggaagagctgagggaacagtcagggtgaagactgaggcaggatccatcttggtgtgcctggagcatggggggccaaagagcaactggtaagaaaggaagtcaaggatgggaacctgatcatagagagctccattttatccagttgtgattggaagccactggaggattttaaacaggatagtgatctggaagaacagattctcaggggcaagagtgggagccaggaggcagagatgataggtggaatagcacagatgagagatgacaatgggaacagtggagatggtgagaagaggacaaactcaggaactattttagaatagaaccaacagaacttacaatagtttagatgtcaggggaggggaaggaagaatcaagggtgatgtctaggtttttgacctgagtacccgctaagagatgataccctttaatggaatgggaaccatcaggagacctttaggtttgtgctaagtgtgagataccccaagacagtcaagtcatgcccagtaggcagttgggtatggcctggagggctgagaaggacagaccaggctggagatgtaccttcagctatcatcgtatagagatagacctgtctcagagactccatgaaggtgacagagaatgcgtctagctatggaagagaagcctgccaaggactgagctctgtggcttagagtgaggtggaatgccttttcatatgcctataggacagtttttcatttctaattttgtaagttgttactccatgttctagctggcaagattgtaccttcccatatgtgttgattaatattagaattgtttatgcaaatgtgttgccagagtaactgcaaatacaatgggttttttgtattactaatgctgcccttttcatgtgtccatagcacttattaaaacagagttgatggtgtttccttagtgacacagtgagacatgctatcagatgaaatgatctgacaaatggactgccatataagtctctgccgcattgctttgaatgtcccttggtgggatgtgtgcagtgggacacatccctttttaatgcatttgcttagtcccagtgcatggtagaatgggactgacaatgatgcccatgtctcttttcattccaatacaggattatggctttgtcaagatacccaattgtgaaatctgagcatcaccttcttccgtcaccagagggcgagatcgcaccagccatcacattgaccgttaacatttcgggcaagctggtggattttgtcgtgacacactttgggaaccacgagtgggtttctttggcccacctaatattacacaaatgccaagaaatgttattaacaatgtactttgatttctatgaaatcacctttctcattttcttcttttttacctcccaaagtatttctccctgcgttgctggttttaaaaatcagacagaagcatttaagatgcaggcagccgttagtgctggtgtagggacaggccgtgttagtctgcatttactgagctgtacagtcaattccctgtgcaggggctgtccaaagtgcattactgtgtttgctcttcactctgtgtagggtaagcactcttagagccccgttttgcaggtaaagaaactaggcttagagaggtcagacaacccatccaaccaggagcaagcacacagccagggcataggcagtcccaaacccagggttacaagtgcttgcaaccacacaataaaccagacaacagaaaaagaaatttccttttcctgcaggattactgctacaaatggaagtactgttgggatttgaggttgttaaatgacatctcttctctccctcatgttttcacaaacaacagataggcagaggaatctggaagagggagatcaaaatatcactttgaatactgataagcctatttggacaacctggcttaagtgcccatatggacttgtgaatacatgcctaaatatacacgaaactgactccccctaaatggtgggcctaccctgcttgccctggcaagctctctccttgatggaaagaagaggacggaaaacagcctgtctgcaaactggcagcttccaaggagaatagaaaagaaggatttgagacaagcacgtgaagttaatttcaagattattgaattagaaaagtcctcccaaaaagtaaagaatggggagagaggccagtgatggttttctaaagaagtccctctacacgcaacatgaagagtggggaatgagttttatccccaaagaataacatttacaaccagtgacagtactgaataaatcatgaataatcccagcaatatattgtaaaagcaaacataaaagtatgtaacttatacttgaccatactaaaccacaataatttaaacatgaatataaagagctatgtgctatgacattcacatgcaagctttgcctgcattaatgacatgaggccacagaactttaaagagacatactttaggaaaacaacgttgttgtactataagttttatttaaacaaattggtgtgtgtgccactcttatttccctggttacctcactgtttctaacactattatgtgaatccgtgaaagcatatttgaatattttcttaaaaaactcagatcataaataatataaataaaccatccaaatataattaatatgaaccatttatgaaccagactcttgcttacctccttagaaataagaagagtgtttggaggatggatgatatagatggttcatatctcttaaaaaagctgtttgaagaaatgctttctttttttcccagtgattttcatgtagcaagtacaggcattcagaaatcattcccatgaccttatgttgtacttaacattgggtttatctttaaaaaaaataatactttcatgtttaaaggttgcaagttctcaacctaagaaacagtttaactccttcccttttttcctttgcctttttccccgtctcctttaactctctccaatatatcccaaaatgtaaagaataggtttgaaaaggaagagaaagctaaaagagagccctaggaatatgcttggaaaagaggagggaaggattgccttttctcactttctgttaaccacctacttaaagctctctggataacaccatatcctttacttgctgtcttgctcatttgattcaataataatgacaacaatagcagtaacaataatagtgaacacttattgatgatacataactccaggaatgaaggcagtgtaatttaatgattaagagcatgggattccagaacctggaatcagacaatctggtttgaaatctaattcattaactagctgtgtatcctttgctgagtttcttaactaccttgagctttagttttctcatctgtaaatcagtgcaatagtcctacctatttcatggggttcttgtgcccatattacctcatgcaaagtacatgaatgtagtaagtgctcaattaacactggccattactaaaccaaatcagacaactatgaatataaggtatattgggcagcttaaaaaataatccatttgtcaaacatgaatcaagcatctgacatgtcccaagcacacagctagactcattccttgctttaggaaccactgctctgagccactccccagaagtactgtctgggacactgtagcctcccaacaagcgacataggaaagttaacaccttgaataatttgtgacgtgatcacgacatgttttatttgtctttgttttctacagtactagatacacaaattcttactgtgaataaatatttagagatttcgttttccagtgattatggcatataaatgtgaaaatcctattaggaatgaataatttctaatgcttgtgcatgttattagctgattcaacaagattttaaaaagtactgactgcacaaatatgtcttttacaaccactaaataggaaatagcagcattttttagaagtcactcaggcaaacaccataatgaaaattgatattattttaggtaattaactgagccactaatcaccatttaaagaaatctataacatgcatcatatacaaagaggagagaacacagaatccatagtctgacactatgtgacacagaacctatgttctagatttggttccgtggcggttaaccttggtaagttccagttcttgtgtctctggaaatgggataaaattctcttttccagcttactttatagggttattggaccaacaaaatattaacagataagaaaacataaagcatatgtgagctctctctctttctgtcttgacctctttccttatacatatactttttacttttattactctcactaggtaagatttatctcctgagaaaatgtaaaaccaaattcacagattacttccagttagaatatattggattggaatccaatatattctactaaaatatattggattgaaaacactgcctgtggttagtagctttggaattttctggatctggatttgaatccttgttgtaggtatcagaaggaatagaattccctgcagacctaatgaaagaactacttaacaagatgctggagggacccatggaacaaataagagaggctgaggcactcagacactagttaacagtggggaatcattacctgccttaaggccgaaggaacaggcagagaaaacagtgttcccagagcccagtgagacccagaaccaggacaagggaccacctggcatagaatgcagctactgccagagggactggggaaggaatccctgaatgttgctcttctcccaacgtttaatctcccattgatgcctccgattggccaaacctaactggaaaccagcagagaaggaagtccaggagatgaaatctgcaggggtcagcctctcagggcatagagaaaggacagaggatgaatgtgggctggggaaatgaaaaataaccataggcatattagcctcatttaaaaatagagctaccacctgccttctgttgtgagaattcagtagcaaaggggtttaacaaatggccgtccttttcactcttttatttcttgagacatcttttaatagccctcagctatttttatccaattcagtcctgtcttgagatcctaactcaacaaggtttctccagtcttctcagtgcttggtgatcttctatttttctttgtcattttcccccttaacactcatgtattagctacctttctatgtaaatacctgtgtttgactactgcctatctgttctgggcaccattccttgctcttactctcagctatgcattgcagagaactgcatttcccacagtcccttgccttctggcttctgggtaggtttagccaatgggaggcactagtgcaaggttggagggagtagagaagcgagtgtatttctctccttctctctctgcttcctctggtgtctctgggaggagctgagtctcttctgcggctccagctcttctttgtatggtcccagctcctctgggaagcctcctccattgctacatctcccactagtcggtgctggcttctggactctgataatatcacctcctcttgttttccctgtagctgtagaggtggtactggtttcttattgttattaatctctgattgcctcattgactcctatctggcttcccatcgcctagctaaccaattccctatattaagttcactttgtttgaaacatctagggtgtttctgttttcctggctggatcatgtaaaatatgatgtcctattttcccctaaactccccagaagcttgatgtacccacctaagtatctcagttataggtttacagtgcttagcataataaaagcaccatgttcagctggtgtttgagcaggagagccaaggaggctttcagaaagtgttcagttgggctgggcgcagtggctcacgcctgtaatcccagcactttgggaaacaaggtgggtggattgcttgaggccaggaattcaagaccagcctgcccaacatgcaaaatgctgtctctactaaaaatacaaaaattaagttgggcatggtagtgtgcacctgtcatgccagttactcaggaggctgaggcaggagaattgcatgaatgcgggaggtggaggttccagtgagccgagattgtgccattgcactccagtccgggtgtcagtgtgagactctgtctcaaaaaaaaaaaaaagtgttcagttgaaggagcttaggttacataagcctgatgggctctgtgaatgtcaggattcttcatcttaccagtattcctggctctttttacttttttaaactactaattctttagctgtaatactgatggtgagttatcacgttagtgatttcatttcttctgatgaaaagttgaacaatgctgtatttagagtagatctttaaattgacttgactccaaatgacttgtgaagaaaggtcatgttcttagccaaatgtctgtcagcctattcatttgaagtgctgtatctaggtcttgttcatttgtataatgttaagacagttgcccgagtaggaatgactctgggcttcttcactatatgcagatagtctttggcaacttaggtacctaaggctttttaaagtttgttttacaaatacaataaagggtcatatttttacattttttagagatgacctcgacaggaaactgcaggctattgctgtttcaaaactactgaaaagtagctctaatcaagtgatatttctgggatatatcacttcagcacctggctccagagattatctacagctcactgaacatggcaatgtgaaggtaacataatcttaataggatttctaatttattaagtaaaacatttctttttctttcatgtttttaaaaaaaccaacctcacctaaaaatttcatgtgcagtctatctactgctgcctagaaaatcaccacaaaacatgtgagcttaaaacaacagcaatcatctatttgctcatgaatctccaatgtggacagggctcaatgggggtagctcatctctgttccatgcagggtcaactaggtgtctcaaccaaggactggaggatctacttcataggtgatttataggtcgcaagttgtgctttaggcttgggaccctggttcctcgccatgggctacttaggcttcctccctgcatggtgctggctttcaatagtgaaaatcccaagagaaccagaaaaaatctgttttgctttgtatggcatagccttgtaagtcatatactgttacttccactgtcatcacaattctgatcacattaaattcttgatgggaggaatatcaaaaacacaagataagaatactaatggaaagtgagattttgttgtagccatgtttagaaaacacaatctgccacattatgaaagttaattatggggctgggtgcggtggctcacgcctgtaataacagcactttgggaggctgaggcgggcggatcacgaggtcaggagatcgagaccatcctggttaacatggtgaaaccccgtctctactaaaaatacaaaaaattagccgggcatggtggcaggtgcctgtagtcccagctactcgggaggctgaggcaggagaatggcaggaatctgagacgtagagcttgcagtgagctgagatcgcaccactacactccagcctgggtgacagagcgagactctgtctcaaaaaaatatataaataaattaaataaataaataaataaataataaataaataaaaattaaaaaaagaattgagagtaaaacaaaatgaaatgccacacagagagaatggctaattagccaacagggccccagcagatgacactgaattactctaccttttcaggtctgaaacacttgaatttgtcagtgtaccagaatataatcatgttctggggaactgccacacaaatcaaattctcaggagactgatatatatatatatatatatatatatactgatgtatatatatactgatatatatatactgatgtatatatatactgatatatatatacacactgatatatatatatactgatatatatatacacttatatatatatatatatactataatgccaaatgaattaatttagaatgagaaatatgattgttatgtttagttatgccctatgcagatgtcttggtccctttcattccattttcaacttcatgtcttgagataatatctgcagagaaaaaatcttatccgtcttatgttgattttactactttaactcttcttagggtgtaacattatttacagagtttggatgacaggttaaagagcatggcatgatgagaattttctgcatgtgacagaaaataacagagagtgtatttctttttttttctgatttttttaaaattttattattattatactttaagttttagggtacatgtgcacaatgtgcaggtttgttacatatgtatacatgtgccatgttggtatgctgcacccattaactcgtcatttaacattaggtatatctcctaatgctatccctcccccgtccccacaccccacaacagtctccagagtgtgatgttccccttcctgtgtccatgtgttctcattgttcagttcccaccaatgagtgagaacatgcggtgtttggttttttctccttgcgatagtttgctgagaatgatggtttccagtttcatccatgtccctacaaaggacatgaattcatcattttttatggctgcatagtattccatggtgtatatgtgccacattttcttaatccagtctatcattgttggacatttgggttggttccaagtctttgctattgtgaatagtgccgcaataaacatacgtgtgcatgtgtcttaatagcagcatgatttataatcctttgggtatatacccagtaatggggtggctgggtcaaatggtatttctagttctagattcctgaggaatcgccacactgacttccacaatggttgaactagtttacagtcccaccaacagtgtaaaagtgttcctatttctccacatcctctccagcacctgtcgtttcctgactttttaatgatagccattctaactggtgtgagatggtatctcattgtggttttgatttgcatttctctgatggccagtgatgagcattttttcatgtgtcttttggctgcataaatgtcttcttttgagaagtgtctgttcatatccttggcccactttttgatggggttgtttgtttttttcttgtaaatttgtttgagttcattgtagattctggatattagccctttgtcagatgagtaggttttgaaaattttctcccattctgtaggttgcctgttcactctgatggtagtttcctttgctgtgcagaagctctttagtttaattagatcccatttgtcaattttggcttttgttgccattgcttttggtgttttagacatgaagtccttgcccatgcctatgtcctgaatggtattgcctaggttttcttctagggtttttatggttttaggtctaacattgaagtctttaatccatcttgaattaatttttgtataagatgtaaggaagggatccagtttcagctttctgcatatggttagccagttttcccagcaccatttattaaacagggaatcctttccccatggcttgtttttgtcaggtttgtcaaagatcagatagttgtaaatatgtggcattatttctgagggctctgttctcttccattgatctatatctctgttttggtaccagtaccatgctgttttggttactgtagccttgtagtatagtttgaagtcaggtagcatgatgcttccagctttgttcttttggcttaggattgacttggcaatgcgggctcttttttggttccatatgaactttaaagtagttttttccaattctgtgaagaaagtcattggtagcctgatggggatgacattgaatgtataaattaccttgggcagtgtggccattttcacgatattgattcttcctacccatgagcatggaatgttcttccatttgtttgtatcctcttttatttccttgagcagtggtttgtagttctccttgaagaggtccttcacatcccttgtaagttggattcctaagtattttattctctttgaagcaattgtgaatgggagttcactcatgatttggctctctgtttgtctattattggtgtataagaatgcttgtggtttttgtacattgattttgtatcctgagactttgctgaagttgctcatccgcttaaggagatgtatttctttatgtaaaagtgtgggcaggtgaatcagcactggaatggcactgtgtggtgtttggaatctgtgttctaccttgtggttccatttgacaaggactctgttcccaaaccagcagcctttaagttctagttagcaggatagaggaagggataaagaaggggccaagagcatatgccagttcctctgaaggcaagtcccagaaactgatctgtaacacttctacttatatttcactggcagaaatttagtctaatggccatactttgctgtacagaaagttgagaggtgcaatgtttagtcctgatggccatattcacagctaaaataccataattttggaagaagggtaaggcagatattaggaagatgagttagtctctgcattttttggatagacagaaattagagtgttaaaacaacagccgtcatctatttgctcatgaatctggacttcagacagggctcaatggggatagttcatgtctgctccatgcaggatcagctaggaggctcaactagggactggaggacctactcagtagatgagtcacaggtggcaaattggtgctttgggctgtggacccgggttcctcaccatgggctacttgggcctcctctctgccttgcagctgatttccaatagtgagtatcccaagagaacaagaaaaagcctgtattgccttgtataacttagccttggagccacagatggatccctgatttctgggtctggtcagagggattatgatactgacatttatttttatagagaatacaaaagaaagaaatgttttacaaggaagatgagttcagctttgggctgagtttgaggcatttgtgggacattaatggagatgtccaataggcaggtgcatatacagatctggaatccagaagggcagtgagaactagagttatagattaaggagtggccaccatgtagggaagcgttgaagccatggaagtgagtggtattgctagtaattagagaagtgcaaattagagtgctagagttagagaagtgcagaaggaagaccaaataaagccctgatgaagtcacattgaatgtggctatcatgggggtgtaggtgaaggaagagaagacagattatttcaggaaagggagtaaggagatttcagaagaggaaaacctggaaagtgtgtaatcacagagactgtatcagttatttatcactgtgtaacaaaccacctcaaaacgtagtggcttaaaacagtaataattgaatattctcatgattctttgggttgactgggtggatttctgttcttgcctgggttctcctatgcagtcatctgatggcttacttatggcaggagggtctaagatagccccacacaggcgtctgggccctggtgctggacctctctctcttctcatggtctgtcattatttactagcctagatgatgctgcatttaccagctgtgtgaccttggggaaagttacttagcctttctgggcctcaagttccacatctgcaaagtggtgagagtgatatctatggaatcatagggttgtttgatgatgaaatagaagataacatctgcaaagccctcagacttacatgacatatattatgtgtgtctggctgtatgttgaaaatcaaataagagaaacgcgtaagtacatggtctatgaagcacaaacgaatattagacaagatgaaatttggcaagtctatgtaaaaatggcatcctaatagggcattcttatatggtgtgtgtgcatgtgcacgtgagtgtgtgtgagggatgtacatggtattaaggaaggagaatttgatttgattttcatctaatcctctcttggtttccactgtcgtgatcaaaagctgtgtcaaaattggtagtggattcttatattgctttctctaggaggaagtttattaatgtggagaagagttttaatcatcaatgcttggatgaacagatttttctcttaaagaaatgagtatttaaattctgcagtcttaaaactttatagcatctttatttttaaaatttttttgcaagtcttacagcatctttaaaaaatctgataaacaaaatgatagttaaatagatttatttatcatttatttatctatttaattattcccaatactaaagttttctattttcccaagacaaaccggaacagtgcttctttatttccttcatcaacattttaaatttaatttaaaacatttattataatttttatgtatacaaaaggtatatgtatgtgtgtattataaacaacaataaagattaatagacatccatgtgtctaccactaagcttaagaaaaaaatgaagaattatataataaattgtgatgtattcttttagtgatctaaaaatgtgtttttaattaaatgttaatagtaaaattcagaagtggtgaaaagtcaggtatattttttatttataagatatttaaacagaataaaatggagatttctttcttcagaataaacacctcatatttatagttttcccaacacatgatagaaaagaatatgtttctgttctctttctttgatgaataataaccctggtcccaagccctcaacatcaaaaagactcatgattgctccccagatgttcttatttccatgattcaatttaagaaacacagatggaacacctgctcaatgccaggttttatgctaagtgacaggttggacaaaagtgattaagattccctctgtgcaggtgtgggaggatggagacatagaaacagatacctggcacgatggcataactagtgtgtgtaaagtactgtacaggatgaccaatgaaggtgcagtcagtgctgctggggatgagagacttggaaagctgccaggagtcaggggctattttgtaatcgttgatttatctgagtcactctccagacctccttcctctttgttttcttagcatgtggtacagaagctagataggcgcacagtaggtgctcaataaatatatgtagaatgagcaaataatttggaccaaaaaagatcagtaggagccaggaagagaaaacagcatgtacaaagagatatttatcatgtagctcacacattttttggcaatgtggaatagagctttgctttttatgctttaaacattctcctctctgctctttattaggatatcgacagcactgatcatgacagatggtgtgaatacattatgtatcgagggctgatcaggtgagcacaggggtttgattttgtttttaatctattattaatgtgatcttttgggtctgtctgagaaggaaaaagaactttatggaagcaattaatttttgttgctttttataaaaagcaatcaatgtttataaacattgatttgactatacagtttaacatctttttcaaggcatagtctcataatttacaaaagtagaaatagctaagcaaattaagtttaattatataagagggtactgtgtaggctattaggcatggtgaatatgtagctgtcaacacatgggaggaatggcaccatttttgaatgtatgggttagtggaaacatcacaggccattggatgagaaagtcctgggcttgagttccagccttgccagcttctaatcaataatcctgggtaagttaactaatttgatggggccattactatactgtagtgagctctataggtaaattgtatttaaaaaatatcattccacataaaaatattacccgagtatatcacatacatgcgtatgtgtgtgtatgatatacttggataatacatatttggatacatagagtcatgtgctgcttaatgatatttttgttcaataacagaccacatctacaatggtagttgataagattataatatcatacttttattgtaccttttctatgtttagatacacaaatacttaccatggtgttacagttgtctacaatattcagtacagttacatgcagtacaggtttgtagcctaggagcaataggccataccatatagcttaggtgtgtagtaggctataccatccaggcttgtgtaagtatgcactatgatgtccacacaatgacaaaatcgccttatgacacatttctttcttttttttaaatatatttttattttttaaatcgacacataataattgtacacatttattgggggggtacaatgtggtattccaatacttgtatgtatactgatcaaatcattataatttgcatatcaattaccttaaacatttatcatttctttgttgtaagaatattcaaaatcctcttttctatttgaaatatatagtacattgttgtaacctactgtgaatagaatataagaacttattcctcctaactgtaacattgtacccattgactaacatctccccatctctcccttctccctgttctcccccattgctggtaaccactattctactctcaacttcttttttatttgtttatttatttatttattattattatactgtaagttttagggtacatgtgcacaatctacatttcttagaatgcattcttgttgttaagtgacacatgactgtatacatacatatgtgatccaaaataatacagctgagattttaaaattcaaatatgtagctgtataaatcagttttgaaggcagtatttgtatcaataaagcaaggaacagtttaatgccaaaaaagagggactaaccattcattcattcattcattcattcattcatttatccaataagtgtttactaaatcctctttatgtactgggtgttgttctcgggagtgggaatataataggaaaaaaacaaaatccttgactgtggtagaacttacatcgcagtggaaggaaacataaaataagcagataagaaatgacaagctatgacaggtggagatatgcatgatgaaagaaaaataataaatccaggtgagaaggcagggtgtgtgggggtggctgtggtaggttataaaaagtgggtgaggaatgatggagtgaaatcttggcagcacctcaagtggaaggagggaccccacctgtgcataccctgaggaagagcacttcaggcaggggaggcggggaaagtttgagaggaggatgctggatgttgcggggtaagagcaaggaggccagtgtcgctggagtagagtgagagaagtgatgtgagtatggcaggtggtggtagatgatgtacacagtgagttgattcacaggttcctctacatacaaagttcttccacagagggaacatgctggagaccttccctgaaacactcaagggttctcctgttaggacagaatctgtctggaggtatttgacctgagccctctaactgccatcttggggacaatgtggggagccctggtgtgggctcctaggactgacttccctgagccttagtcttttctccatatagagcagttcatcaccaaaaggcatcttggcattgcctgcctgaagataggggccgacgttaatggatctctttaagtaaccttatcttctaagatctgtggcctacatttatgagagaaaatggttgctttctgggatgatatagaatcatggattcaactcctctcccagtggggatatggcttgtttggttatgaattatagtccagtgaaagcaaattgttagtttctcttgctctagactccatttgccattcaacaagtatcgatctagcagaatggatgccaggcaatagggataaagctgtaaacaaaacagagaaggatctctatgctggtggagggaggatggacaaaaatcatgataaataattgcaggatgatctattttagaagatgatgagagtggtgggaaaaactaagcaggggaaggagcttccagaatatggaggtggggtgcaattgtaagtagggagctgggtaggtcttactaagaagatgacatttcagccaagattggaaggagggagccatttggccacctggcagaagatacctcctggtagagggctgagctagtgcaaaagccccagtgcaggagtgctgcatatgtttgaggaaaagtgaggttagtggggctggagagggttggggtggagtggggtgaggggcggccgaggagggaaggagagagtgtgtgggcaggcagggaagagaacagatcttgtaaggatctagggatccttagcaagcactttggacattattaagtaaaatagtgaccttactcgttcttggacaactccatggagccatatgcttactgaggtgggccaaggaggcccttgagatgctaagattgttttggtttacaccactaactcagaaactctaaaaggagcatcacatgcccaaatagctgtggaacagatagcttgactataatttggtgtttccaaagtgttacggtaggagagaaggtgctgaagggtgagttttgttaagtattttatatctaagattgaaaacactgtttctgtttaaatatttgttaaagcaattgtttaaatgagatatcggaaattctagaaaacgacttttcatataggctgaaataggtttaatttcaagttttaaaaaatgttgggaaccaaggaacagtggtatttatagtaactggtacccataatagctcattgttgggctctgaaacctttattacctctccttaggagaatgggatggcagagtttatatatatatacacactctgtgtgtgtatatatatatacactctgtgtgtatcactctgtgtgtatatatatatacactctgtatatatatacacacacatacatgtacatataaagtatatatataaaatatgatatcatatatatatttatttatgtatgaatttaatactctgtgacataacaaaataccatagacttggtggtctaaacaacagaaattaattttcttgcagttctgtagattctaagaccaagattaaggtaccagcagggttggtgtctggttaggactgtccccttgggttgccgataactgccttcttgccatgtgcccacatggcctttccttgggttgtgcctgcagagagagagtgagctctctggtgtctcttcttataaagccattaatcctttaggatcaggccccccctgcacttatgacctcatttaaccttaattatttccttagaagatatgtctccaaatatggccacactgggggttagagcttcaacaaatgaattttggggggaacacaaaataggaaggtaattttaaaaattcccacattaatgaagttaggaactagggtttttcagtttctgtccacaaaactaattttgtaagccttcatctcaatcaccaaattcaatgccctacatgtagtaggtattaggtgcttaataaatacttattggacaacaatgggagatcctctgttttaatggaagatttggattgtcagattcttcagtttcaaggcttttggtgtatttttgaaggcagtgtctgttaaatgggtcagaactttgatcttagagatttgggaataaataacctagatttgctaaagacagtgacctagaattacacagaagtgcacagatttaggacttgagcccagacaatgcattaagctgtctgacagctcagagtcacatctgatgttcagtcacagctctacttacctttcccaatgggcagacttgctgcttctgctggtcctgctctgggtttctgtttctattttgcatggagttacaggcataggctttgttttaagtttttctcttctcctgccactcaggtccaagcccccatcatcttttacctaagttattgcagtggcctcataacttgtctccctgctttgaccctttccctgaaggtgattctctacctggtagctgtcacagacctctgcttcaaacccctctgatggattcttatctcactctaaaaaaaaaaacagcaacaacaacaacaacagcaacaacaacaacaaactgaggtcttcatagtggcctgtgaggaaggctttgcatgttccctcttatgcacttcactccggtcatggtggagttggcccgcaaaacaccaagcatatttccacctcaggacctttgcatttgtggttccccttccctaaacaccattcctccagtatctgtatggcttgatccctcccttcgttgaattttttgctatagtgtcactttattgcagaggtatgccctgaccatccaccataatatagcaacctctcctactcatcactgcctgtccttcttacactgcattcaccccagtgcttacttatctatcactacctgacttattgtaaacatacatatgtgtttaatgcatccttccctactagaatgaaagttccatgagggcaaggacttcattttattcacgacttattccccaacacccagaacagtgcctgcatgtagtaggcactccatatatatacatatgtgcttcattgaataaatgaatgactgaagctgacctaagtctttttttctggaagagcacaatgtaataaaataaaatgaattctttgttgttcatggttccccgtgttttccacgagcttctcaaataagaactctttgcataatgtctacaaagtgcattgaatttccccaggaattgaaagctctaagccaaaacgggatatggaattttttcagatatataaaatctttgatttcagacttgaaagtaggctgaaaatatgcatgtggcatttggatttttaaaggtaagaaagaaggtgaacacccctgtcattctgaagagttcctgttattaactcaaaacatgattgtgtgggaggcaatttgtatggctagaatattcattagtataaaaaaagtaaagtaaggttgctaagaatagttacttaattaaatctatgtacatattctttattcatttatatcataaaagcaatattttgccaatatttagattaacaatttaagttaattccagttgtgatatacagagtagagttagaagtgggaaactggtttaataacaaaggggtatcacttggatctcgttagatttctatacaataataaaactgttacaaaccatttctgtttctgctacaggttgggttatgcaagaatctcccatgctgaactgagtgattcagaaattcagatggcaaaatttaggatccctgatgaccccactaattatagagacaaccagaaagtggtcatagaccacagagaagtttctgagaaaattcattttaatcccaggtgagttcctttatgctgtagttccagttatgagctactgcatccctctatggaacctacatattacctcaaaatgagctagaaattatattttgtcctagaggtttattccaggtaagggagactgtgacaaagatgataaaatctggtttgggttgaagttacggtgcttgctttctggaatcaagaaatatgttgtaacctcaggttaaaaaagttcacagcatcatcatcatcattatcatcatgaacatcatcaccatcatcatcactgtcacctccacgatagctagtatttgaatgctcctatgtcccagaccctgttataggtgctttttgtgttgtctcaattaatccttattggttggtcctcttattatccccttttaatagatgaggaagctcaagcttaagaacatgaagtaacttcactggggtcacatggctagtgagtgatggaactaataagtggggagacagcctattagcatcgttgggttgctggtattctcagctctggctgcacattagattcacctggacagcttttaaaaaataccactgcctgggccccaccccagaccaatttatcaggacctcctggggtggtatctgggctgtggaatttaaaaaattatttccaggttattctaatgtgcagttaggattgagactgtggatgatggataattcatttacatcacatgtgaaaaattcattaccatgtgaaatacaatttttttttgagatggagtcttgctctgtcacccaggctggagtgcagtggcatgatctcagctcactgcaacctctgcctcctgggttaaagcaattctcctgtctcagcctcctgagtagctgggactacaggtgcacgccctgatgcctggctaatttttgtatttttagtaaagacagggtttcactatattggtcaggctggtctcgaaagcctgacctcaggtgacccacctgcctctgcctcccaaagggctgggattacaggtgtgagccaccgtgcccggccttgttttgtttttaaaagagaaatctatttgcagcaaaacatatgagttggagtatgtgctcttttctctcccatgactggataatgagaggaaacttctacataaagccaaagacagaacatatcgtatacattattattatttgacatttctaccgcttttaccagctaataaacatttctcatttttttgggggaaaaaagaaatttctccattctctttttcttctttgtccctccttacaacaagaaaaaattgtaccaaagtgtaggtgatgaatatgaggagagttatcaccaagtctagatttgttccaattcctgtattgatcttgccctgtgtaagtgtaatgtgactaggaaaccgcgggccttagggtcatctgtctggttcaaatcctcactcttgccagtgaacagcttggtaactgtgggccagttgcttaacctctctgagcctcaagtgcctcatctaaaaatgggaaaaatagtagtggctacttcctaaggctatgtgaggtatgaatggcacaaaaagtttttagaatagtgcatagtgagtgcttattgtttaacagtagctgcaatagcaacattagtatttgcagtagtaatggtagaagtaaaatagaaggattccctccttttgctgattgagatggtttcttaaatggaagctaaaaaatcagagaagaaaaggattttcttgtgtcgttattcttcacatagcaggagtgcggagaaatccaaataaaatatttttggctaaccacaactgcagattgatccaaaccaactgtgaagggagctagatttgctttcccactcagtttaattacgaaaatagtaaaggcataaatagaaggcatgccttaattttaaaactgtgatgagaatatttaagcaattttcaaatatacaagtaatattaatcacaccttagcaattttcacatatacaatacattattattaactatagtcacaatgctttacaatagatctccagaaatttttcatcctgtctaattgaaactttgtatcatttcaccaacatcttctcaaccctcatctcccccagcccctgccaaccaccattctactctttgcttccatgagttcaattttttcagattctacatataaatgagataatgaagtatttacctttctgtgcctggattacttcacttagcatgatgtcctctaggttcatccatgttgttgcaaatgacaagatttcctcttttcaggctgaatactattccatacatatgtatgtttgtgtatagctgcattttctttatccattcatctgtcaatgggcacttaggttaattatatttcttggctatagtgaaaaatgctgcagtgaatgtaggagtacagatatttcttcaacattaatttctttcctttggatgtataccaagaagtgggattgctggatcatatggtagttctatttttaatttttaaaggaactttggtaatgttttccataatatggctatactaatttacattcccacaacagtgaacaagggttccttttgctgtacatctcctgccagcatttgctgtcttttgcctttttggtactagccattttaacaggtgtgaggtaatgtctcattgcgcttttaatttgtatttctttgattagtgatgagcatttcttcacatactagctggccacttggatgtcttcttttgagaaatatttttcatgtcctttgctcatttaaaaaaatcagtttgctttcttgctattaagttttttgagttccctatatgttttggatattagccgtttatcatatataggttgaacatctcaagtaaaaaaatccaaaatctgaaatgctccaaaattcaaaactttttgagcactgacacagtgctctaaggaaatgcttggggcatttcagattttgtacttttggatttgggatgctcaaacagtaagtataatgcaaatattccaaaaatgaatccaaaatctgaaatacttctggtcccagtgattttggataaagaatactcaacctatatagtttgtaaatatattctctcatcccataggttgtctcttcagtctgttgattgttttctttgctatatagaagcttgttagttcgatagaatcccatttgtctatttttgctattgtttcctgtgctttagggatcatatttaaaaaatcattgcccagaccaatgttgaaggtttttcttgatgttttcttctagtagtttcacagtttcaagcccaaaaatctttaatctattttgagttgatttttgtatatggtatgaggtaagagtccaatttcagtcttctgcatgtggatacccagttcccccaacattgcttattgaaaaggttgtcctttccccattgtgtgtttggggtacctttgtcaaagatcaattgactgtaaatgtgtggatttatttctaggctctctattctgttctattgatctatatatctgtttttatgccagtaccatactgttttaattactacaggtttgtagtgtattttggaatctggtagcgtgatgcctccagctttgttctttttgctcgtgattgcttaggctgcttgaggtgttttgtggtcttatacaaattttagggttgatttttctattcctgtgaaaaatgtcattggaattttgataaggattacattgaatctgcagattgcttttggtagtatgaatattttaacaatattgattattccaattcatgaacaccagatgtgtttccattaatttgtggtcttcaatttctttcatcattattttgtggttttcagtgtacaggtgtttcacctccttggttaaatttattcctaagtattttttgatgctattgtaaatgggattgttttcttgatttctttttcagatagttcattggtagtacatagaaatgctactgatttttgtatgccgcttttgtatcctgcaaatttactgaatttattaattctaacagtttttcagtttttttcagtggagtttttagggatatatatatatatataatcatgtcacctgcaaatagggacaatttaactttttcctttccaatttagatgtattttattccttttacttgcttaattgctctagctaggactttcagtactgtgttgaatagaagtgctgagagtgggcatccttctcttgatcctgatcccagagaaaaagctttcaacttttaatcactgagtatgatgttagctgtgggttgtcatatatggcctttgttatgatgaggtctatttctgctatgcctaatttgttgagagtttttatcatgaaaagatgttgaatttttcagatgctttttctgcatctattgagatgatcatatgatttttgtcttttaccctgttaatacattgtatcatatttattgatttgcatatatttaactatccttgcatcccaaggaaaaatcccccttgatcagggtgtatgatccttttaaggtactgttgaattcagtttgcaggtattttgttaaggattttctacatgtgtgttcattagggatattggcttatcattttcttgtagcatccttgtctggctttggtatcaggctaataatggcctcataaactgaatttgcaggtgttccctcctcttcaattatgaaagagtttgagaaggatgggcattaatttttctttcatttttttttttttttgagatagagtctcactcttgtcacccatgctggaatgcaatggcacgatctcagcttactgcaacttccacctcccaggttgaagcaattctcctgcctcagcctcctgagtagctgcgattataggcgcctaccaccacacccagctaatttttgtacttttggtagagatagggtttcgccatgttggccaggctggtctttggtcttgaactcctgacctcaggtgatctgcctgccttggcctcccaaggtgctgggattacaggcatgagccactatggtcaatctaatttttctttttttcttttttttttttttattatactctaagttttagggtacatgtgcacattgtgcaggttagttacatatgtatacatgtgccatgctggtgcgctgcacccactactgtgtcatctagcattaggtatatctcccaatgctatccctcccccctcccccgaccccaccacagtccccagagtgtgatattccccttcctgtgtccatgtgatctcattgttcaattcccacctatgagtgagaatatgcggtgtttggttttttgttcttgcgatagtttactgagaatgatggtttccaatttcatccatgtccctacaaaggatatgaactcatcatttttctttagatgttttgtagaattcaccagtgaggcaattgggtctgggctttttgcttctgaggaggattttgattaccagttcaattttcttatgcattattgaactgttcagattttgaatttcttcatgagtcagtcttggtagattgttactatgaactggtccatttctttcttttaggctatccaattttttggcatattattgctcatagtagtcacttatgattatttgtgtttctgtggtatcagttgtaacatctccacactgatttataattttattaatttgattttctctttttttcttagtaagtctagctaacactttatccattttatcttttcaaaaaaccaactcttagtttcatatttttttttatttttctatcatctatttcattatttttttctctaatatttattatttacttccttttgttgacttcaggctttgttctttttctactcccacaggtataaagttaggttgtttgatgtctttattttttcttaaggtaggtgtttattgctacaaaattcccttttaaaaccgtgtttgctacatcctgtaagttttggtacattgtgtttccatttttatttgtctcaacataatttaaatctttccttttgatttcttctttgatccattgtctgtttaggaaagttttgtttaatttctacatatttgtgaattttccaattttcctcttattaatttataatttaactattgttgttggaaaggctactcaaaatgatttcagtattcttgaatttgttaaggcttgttttgtggcctaacataagatttgtcctggagaatgttccatgaacatgtgaacccccaaaatctgagacagttctcagtcaatttaggaagtttattttgccaaagttaaggatgcacacctgtgacacagcctcaggaggtcctgacgacatgtgcctaaggtggtcagagtacagcttggttttatatattttagggagacatgagacatcaatcaacatacataagatgaacattggttcagtccgggaaggcaggacaactggaagcaaaggcaggacatctcgaagcagaaaggaggctttcagttcatatgtaagagacaaatggttgcattcttttgagtttctgattagcctctctgaaagaggcagtaaatatgcatttatctcagtgagcagagggatgacttcaaatagaatgggaggcaggtttgccctaagcggttcccagcttgacttttccctctagcttagtgattttggggtcccaagatttattttcctttcatttgcacttgaaaagaatgtatactctgcggctgttgggtgaaatgctctctatgtatgttaggtcgatttggtctatagtgttgttcaagtctactgtttccttgttgattttctatttgaatgatttatccattgttggaagtgggttattggagtcccctactactattgtattgctgtctagttctcccttcagttctgttaatattttcttcatatatttaggtgctctgatggtgggtgcacatatatttataattattatattatattgatgaattgagcactttagtataatgaccttctttgtctcttctgacagtttttgacttaaagtctactttgtctaagtagagccatcccacatctcttttggttatcatttgcatggaatatctttccaaaccttcgctttcagtctatgtatatcctcaaagctaaagtgagttttttttataggcagcaatttcttataacttatttttttcactctgtcttttgattagagaatttaatccatttacatttaaagtaattactgatagttaaggacttagtattgccatttaaagaattgttttctgactgttttacagttccttcattctattcttcctcttttcccttatgatttgatgagttttttggtaacagtatgctttgattgctttctctttatcatctgtgtatctactataggttttttatttgtagatactatgagtcttacataaaacataactatttattttaagctgaaaacaactttgtctgctgcatataaaaactgagatttagcttttcctcccactacattttatgttattgatgtcacaattcatgtattttatatatcatgtacccattaacaaatttttgtagatatagttattttaatatttatcttttaacttttacactggagttaaaaatgatgctgcatcagcattaaagtattaatgttttctgaatttgattctattattacctttacaataagttttatactttcatatgtgttcacatttttaatgtcctttcatttcaacttgaaaaactcccattagcatttctcataaagtgcatctaatgatgatgaactcctgcagcttttgtctctttgggaaagtccttacctttccttgtccctgaaggacagccttgctacatagtattcttggtaggcagttgctttcttttagcactttgaatacatcatctcaatttcttttggcctgcaaggtttctactgagaaacacactgatagtcttataggtgttcccttgaatgttttttctctttgcttttctcttgttgcctgcaaaattttctttttgtctttgatttttgaaaatttgattataatgtgtcttggtagcactctctttatatttaatatatttgggagttatttgggcttcatggatctgcatgtgaatcttcctctccaaatttggaaagttcagctgctttttttaaaataagctttctctccctttttccttctttctctgcttcttctgaaacaccaataaggtttacttaatgatgacctataatttctgtaggctatctccactttttcattcttttttctatgactctggttgggtaattttgaatgaccagactttgagctctctgattgttctccttgattgagtctgctgttgaatctctttattgaatttttcagtttagttatgatgttccttagctctagaatttctgtttggttcttttttgtgatttctatctctttattgaacttttcattctgtttatgtactcttttttcttattttgtttagttgtccatctgtgttctcttgtagctcacttagcttcaagatgattattttgaatttttcattatgctgtttttcattagcatcagttacttgtgctttatttgttcctttggtagtatcatgtttccttgattatttatgatctttatggacatgccctggtatctgtacatttgaaaaagtgggcatctcttctagtctttacagattggcttggcagggaatgcctttaccagttggctggtccaaagattctcagtgggctatctagctgggctcatgggtggacttatgctagagttcttgggccaacttgcttggtgcctggatcagcaagtggataggctttgtgcctgggtctctgggggccagcctggtgctggggtccattgggatgggcctggagcctgtgtcaatagggactggacttgaagtctgggtccatgagagccaacctgattcctggggtagatgtgtggggttaggccttcagcctgagtctgcaggagccaccctggtgctggaatgaacctggtgcctggatccattgggatagatctggaacctgggcccatggagcctaggcctcctatgttaaactcagtgctggggtctcctccataggtgtcctatgggcctgtactctggaattggtggagcaggcctagattctgttacctgggctgcagggactggtctggagctcgggtgggttaaagcctgggttcacagggccagtctagaacctggaactggcaatgctgtcctggtgcctggggttataaggggtggcctggagctggttgcataggggccagcctagcaccaggttgggcttggagcctgggtctgtgggtattgctctggaggccaggtccatgggcactggagtcagggaccacagggctggcctggagctggggtaggcataaaggctgggtccatgtgttctggcctggaatctggggcttttgggggtggcccgaaactgatgccagtctggagccttgggtggggatggagcctgaatttgctagggccggcttagggactggggttgttggggctggcctggtgtttaggtgggcctggaagcttggtctgtgggtgccagcctggtgccaatgttcattggcctggacctggtgctggagtctgtggcaaagttgggtgcttacttcactcattttaccctatgcagagagtatctatctctctacttactatgctacctagtcttgggggaggagtgatagaagtaatgtgaagttgtccttcttacccttctcaatgagacttttcttatttctctaatacattcaaatgctataatctctcatctgaaatctttagctcttgtgaagatatttttgtgcatggatagttgttcaaatggatgtttctacagggacaagcactggaaagtcctattttgccatcttgctgacacaactcttatatatatctatacatcacacaattatccttcttttgtaaatgtatgacacatatatgtatgtgcgtatatctgtgtgtatatgtgtgtttttgttctatttgctaatctgattctttcatccaaatagtatattatgaacttcattccataataaagtattcttcttaaaatatgttttaatcattgcataatatttcattgtatggatgcaccaacatttagctaatcgattttgttatttttgcatatttattattttattattataaaaagtcttctaaggaattcttatctgtttgagcataaccttgattacttccttagggtctagctctagaagtgaaatagcagaatcaaaggtgatgttaaatttgatattccttgttattattcttttaagatgacaaaggaagcaggtctcctgtctcttacattatagaggttagatattatggttgcttatgaagaaaaggaaggaagtggcctcttatgtgcaagtcttagctttcttcctagtgtcttttgtattctatcatatcaaccagagctgtataattaaatagttattcatgtgcaaagagttaatctgcagcacattaacacatgtagacaatttagaagttctgccaaaatagatttttatatgcataaatgtaacatgaatagcatttcaggcttaatggcccctttgcctataagagaatattattcaaactcaagatgaaagagaaaatctggacttatttttcagcaatgctagccaataattcttaaacagatgtgcttttggaattatccataaccatggaaagaggactttgggggttaaaattttagtttgcctttcctatatgcatgaatcttttttatttattcatttgctattttattttatgattgaaattttacataagaacatacctttctgaatggtttttacatgccaataactttttatttattttttatttttttagatttggatcctacaaagaaggacacaattatgaaaacaaccatcattttcatatgaatactcccaaatactttttatgaaacatttaaaacaagaagttattggctgggaaaatctaagaaaaaaagtatgtaagataaaaagaagagattaatgaaagtgggaaaatacacatgaagaacctcaacttaaaaaacacatggtatctatgcagtgggaaattacctccatttgtaaactatgttgcttaataaaaacatttctct

SEQ ID NO: 28 - DNA, 2065 bp, Homo sapiens
taattggccgcagggtgctggggaaaggggacagagagaattgggggatctggaatttggtgtgctatcactacaccgcagctctattttccattaagaaaaagatcatatgacgaagtcgaactaagagatctgaagtaaaaaatgaaaagatggagcaaaagtaagaaacatactctgagacgagtgggttttccccctttattccaacagcaatcttaaatgatggacgtcatgtagcagttatatatctatgaacatgcatgagagatttataaatacctgcatacataaatacaaacatcctattatacatgagaaatcgtaaatgcttgggcatcagaagtgggagctgtgatcctagcttgggggcagcacagggtaggcggccttctctctgctttgagtggcttctgggcgcctggcgggtccagaatcgcccagagccgcccgcggtcgtgcacatctgacccgagtcagcttgggcaccagccgagagccggctccgcaccgctcccgcaccccagccgccggggtggtgacacacaccggagtcgaattacagccctgcaattaacatatgaatctgacgaatttaaaagaaggaaaaaaaaaaaaaaacctgagcaggcttgggagtcctctgcacacaagaacttttctcggggtgtaaaaactctttgattggctgctcgcacgcgcctgcccgcgccctccattggctgagaagacacgcgaccggcgcgaggagggggttgggagaggagcggggggagactgagtggcgcgtgccgctttttaaaggggcgcagcgccttcagcaaccggagaagcatagttgcacgcgacctggtgtgtgatctccgagtgggtgggggagggtcgaggagggaaaaaaaaataagacgttgcagaagagacccggaaagggccttttttttggttgagctggtgtcccagtgctgcctccgatcctgagcctccgagcctttgcagtgcaatgtcccgcctgctgcatgcagaagagtgggctgaagtgaaggagttgggagaccaccatcgccagccccagccgcatcatctcccgcaaccgccgccgccgccgcagccacctgcaactttgcaggcgagagagcatcccgtctacccgcctgagctgtccctcctggacagcaccgacccacgcgcctggctggctcccactttgcagggcatctgcacggcacgcgccgcccagtatttgctacattccccggagctgggtgcctcagaggccgctgcgccccgggacgaggtggacggccggggggagctggtaaggaggagcagcggcggtgccagcagcagcaagagccccgggccggtgaaagtgcgggaacagctgtgcaagctgaaaggcggggtggtggtagacgagctgggctgcagccgccaacgggccccttccagcaaacaggtgaatggggtgcagaagcagagacggctagcagccaacgccagggagcggcgcaggatgcatgggctgaaccacgccttcgaccagctgcgcaatgttatcccgtcgttcaacaacgacaagaagctgtccaaatatgagaccctgcagatggcccaaatctacatcaacgccttgtccgagctgctacaaacgcccagcggaggggaacagccaccgccgcctccagcctcctgcaaaagcgaccaccaccaccttcgcaccgcggcctcctatgaagggggcgcgggcaacgcgaccgcagctggggctcagcaggcttccggagggagccagcggccgaccccgcccgggagttgccggactcgcttctcagccccagcttctgcgggagggtactcggtgcagctggacgctctgcacttctcgactttcgaggacagcgccctgacagcgatgatggcgcaaaagaatttgtctccttctctccccgggagcatcttgcagccagtgcaggaggaaaacagcaaaacttcgcctcggtcccacagaagcgacggggaattttccccccattcccattacagtgactcggatgaggcaagttag

SEQ ID NO: 29 - DNA, 2258 bp, Homo sapiens
acatctggaagtttccagggggctgctttgcatctgaaactgtcaggtgaggggtgacagagatgcctgaatctgagttgggggggaattcaaatctgagctggcgaagaggatgcctggaaggaatggcaggaaagacttgagttaattggcgcttctgggtctgcagtaatcttaggtgcaaagctgtctaggtctctgctgaaggactggggacacctgggatgttcaggagaatagaaatggccagatgtgtgttagtggagaaaagaatagtgacacatagaccaggcacctggggtctaatatcttgagctggtcccgactccttctgcaacttctctgtctgtcctagttccaccagcactgcttggatactggtgctggcacagttccttctgtcaccaactttgctccccaggtaacatagaggcaactctaaaatgcttctttccttgagaccaggtggatgccagggatttaaaccatgctccaggtgccccataatccaggccaattcaccacagatgatgaggctttctttgctcagcctctgggctcagtaaactcagccatctctttgcttgggagaggtcctctactccctccttagaaaactcgtttcctggctatggccataccaacccaaatgtacctgggcttggctgacttcagaaaacttttctgctttgtgccaggatggaataaggcttaatccagatagttagagttcatcttcaggcctgagagaaaaagaggagggcttggctacagccagaccagggagagctggaggggtcagggacattgaaggtagcatcagagaggaacaggactacaggctatggacagtcctttctaagctcaagactgggtctgctaggtctaagttgaaggacgaagaaggcttggtctgagctgcaggtcaggagtgcctgggtcaatcaagtcaacaaggaagaaggtgaatcttcatttgctcttttcttcccactccagccccagaatgttgacagtcgctctcctagcccttctctgtgcctcagcctctggcaatgccagtaagtgagataccaggagcctggtattggggacttgggaaggcagccttgggcactgctgttggccaaggcttttggaggttggcttggggtggggagctgagttgtcggaggaacaggggtgatgcagagaaactgaactcctggaagatttctccctccaactcctgcttgcccctccagttcaggccaggtcttcctcctatagtggagagtatggaggtggtggtggaaagcgattctctcattctggcaaccagttggacggccccatcaccgccctccgggtccgagtcaacacatactacatcgtagggtaagattctttgaattcctggctgggcgcggtggctcacatctgtcattacaatgctttgggaggcagaggcagatcgcttgaggccaggagttctagctcagcctgggcaagatgccagggatgccagggatttaaaccatgctccaggtaccaagaccccatctctaccgaagaaaaacaaaaaaattagccaggcatggtggtgagtacctgtagcctcaactactcaggagggagaggcgggaggattgcctgagcccaggatgttgaggctgcagtgagccaagatcatgccactgcactccagcctgggtgacagagtctctttgttggcaaaatgagttgaagttccctgtaggatcttccagggttcacccaggcttcacagtctgtaggactagccagagacctctcatccctatcatcacctttctttctccttccttcctcccctcttcctcagtcttcaggtgcgctatggcaaggtgtggagcgactatgtgggtggtcgcaacggagacctggaggagatctttctgcaccctggggaatcagtgatccaggtttctgggaagtacaagtggtacctgaagaagctgttatttgtgacagacaagggccgctatctgtcttttgggaaagacagtggcacaagtttcaatgccgtccccttgcaccccaacaccgtgctccgcttcatcagtggccggtctggttctctcatcgatgccattggcctgcactgggatgtttaccccagtagctgcagcagatgctgagcctcctctccttggcaggggcactgtgatgaggagtaagaactcccttatcactaacccccatccaaatggctcaataaaaaaaatatggttaaggct

SEQ ID NO: 30 - DNA, 705636 bp, Homo sapiens
ccaagttgcaataccgcacatcctagggtatgttcatgcaattcaatggaggagaaaatctttcagagacagatggatctgaaatgataaatatgtgggtaaggactctgggcttgagtatcattgtccagccatgtttcacaagtgtgtcctgtcagggaaggatcagagttccttgtgctctcagagggaaggggtcacagagttcctctctggttcccaggaaaggtaatcgcactaatcttcatgatcttcatgagactatcctccagtgctgacctgttacggagtttttgtctgaagttctcactgtaatccccaatctacatattttcaatcagaagtgtttagagggcaggacacatcttcaaggtcacacattgagaagtatggagatatgtcccactaccttctcctacgatctcagacagaatcccaaatttcaaaaggacacagaaggacagctctcaggtgcttttaaaaaatgacccacttccagggacagtgagcttccctgtaaccatggtggatgttctgaactacaataaacattggatggatccagtattgtttgaagtcactgtcattattacattcagctgttgtttcaatgtgtctgaaagggtaaatgactatttagatggcctgggtgtgtggtgggttttatatgaatctttaagggttgaacagtactgaccctattccaaaatctgtccttgatccaggatcacactcatctctcagaccagctccttcagcacatctctttacctggaagaagaggactctgggcttggagaggggaggcccaagaagagaactgagttctcaaagggcacagccagcattctcctcccagggtgagctcaaaagactggcgcctctctcatcccttttcactgctccgtacaaacgcaccacccccatgcaaatcctcacttaggcgcccacaggaagccaccacacatttccttaaattcaggtccaactcataagggaaatgctttctgagagtcatggatctcatgtgcaagaaaatgaagcacctgtggttcttcctcctgctggtggcggctcccagatgtgagtgtttctaggatgcagacatggagatatgggaggctgcctctgatcccagggctcactgtgggtttttctgttcacaggggtcctgtcccagctgcagctgcaggagtcgggcccaggactggtgaagccttcggagaccctgtccctcacctgcactgtctctggtggctccatcagcagtagtagttactactggggctggatccgccagcccccagggaaggggctggagtggattgggagtatctattatagtgggagcacctactacaacccgtccctcaagagtcgagtcaccatatccgtagacacgtccaagaaccagttctccctgaagctgagctctgtgaccgccgcagacacggctgtgtattactgtgcgagacacacagtgaggggaggtgagtgtgagcccagacaaaaacctccctgcagggaggctgagggggcggtcgcaggtgcagctcagggccagcagggggcgtgcggagctcacggaatacaaggccgggtcaggagcaggtgcagggtgagcggggcttgctcatcttctcagtcgtctccctcctcgccagcacctcagctttccgtagaggtcctctttctttattgtgtgtggttctacttcctcacatccttgtgccaggaaagaaaggagtaaggcaaattttcctgttacaattgaagtttcaccaattactaagaactttcctgcaagtacctgcacagcccattatacctcatttatatatgtatatattctaatgcttctcaccatctcttgatttgtgtcatcaatttaattgtgccctttttgaaattcatatgctgaaactttaaatccaatggatctatatcggaattttaatggtataattaatgttaaatgtggtcataaatgagaccctaatgcaatagagctgttgtctttattagaagaggaagagacaccagatacctctcacttctcacatgcactcagagaagagggcacgtggagacatagtgcactagaaggtgggcctctgcaagccaggaagaagccgcaccaagaaccaaccctgccagcaccttgatcttctacattcagactgcagaattgttagaaaatcaatatttgttgtttaagccacccactccttttgtcttcttacgaagacccagacaggctaataccacacaactctgttagctccgtctcctggagggagaagcagccccctgaagctgggcacatcgctcagattttcacatgaattaggcaaaaacagtagctctcatataaaaactgtcacgtccctgttgggacaaggtcttttaaacaagccctggggctttgtcacaaatgttgcattttatcctttattaggacttaactaattgacaatgagtaccagctggatggaaactgaccactgaccatcttctgctgtctccttattatatcacagaaaaccacagcaacattactctatgtcttcaactttctaaatttgtactgaatctattgctaaatgaggagctacatggggtctgagttttgttaccttcttcccagtcttccccaattaccaagcatagaagatactttcagtgaaatttagctgtcaatgcccccaacaccacatcatgttttaaggtccaaggactttctttggggggctattgaaaaacacttttgaatggaaaatcctaaagcatacaacagctgaaagaatggcccctgtgcacatgaaggctgaagggatggatgatagggtacgttcctccaaggtgttcctgggcatgtgatggttggatacctcatgcatacgaaaacaaggactgaactgagatagaaacaagggccatatcctataggaaaacaagaaaaaaacgggcatccctgaagagagttaattagacttggtgggtttaagatgaatttttttccaaagttttttaatgttctaagctaaatatgaatattttcaataaactgcaaattaaaaggagaatgaatttagaagtttagacagaaaaaagccatgagggtgtagaaagcaaatccacacaaaactgtcacatggcagaggccagaatggagctgatgcagctatatcattattctgcagacctagttgagaccctttggtgtttaaggcaggtccagcagtgaagaactcctttattttttgtctgggaaagttctaatctaatcttcatttctgaaaaggatttacatgataaagattcgtcttggcaggttttatttatttttagtcccctccaacccacgtcaatttgagtaaagtcatgtgttacgtaacaatgctgcagtcaacagtagaccacatatatgtttgtggccacataatgttgtaataccatattttcactaaactttttccatgttttgatgtgtttagatagagagatacttaccatggtgtttccatttcctgcagtgttcagtgcagtaacacgctgtacaggttagttgtctgggaaccctgcgctaatccacataccctgtgtgtagtagggtattccttgtaggtttgtgaaaattcacccttgatgcttgcacaatgatgaaattgcccagggacacatttctcaaaaagaacctctgtcaataaaccacacaccattgaatacaatccctgtgccttctgaactgaaaaccttctgctgagaaatctgttccttttctttctgttttctaaagcctcttttatttccagcaatgtggttttaaactgtgtcacattttttgtcattgggtttatcttacgtaaaatttatagagcttcttcattgtggatgaatatttgcttcccttctccaaatttggaaatattttttgctattattttgaataatttatctcttctctctctctctctctctctctctctctctctctccctctctctctctctctctctctctctctctctctctctctctctctctccccctctctcccttcactaccccttttgtcttgtctttgtataactcctcaaatgcgtagttgagtgtttagtgtctttcctggcccataagtcttgaactcttttttatttctttcacttaaatttttcttctctgtctctactatttcaaatgatctttctttgagtttactgtttcttctattacttgatctagtttggtctaaaatcttgttaaaatttttggctgtattcttcaggatcaatatttttgtttagtcatcttttaaatgttttatctttattaaaattctcacattgttcttgcatgctgccactagctcattgaacatgtttctaacatttactttaaagtttctgtcaggtaatccatgttcttccttttcattgatgtcagtttatggaccttttggttgttcttctgtttggaccatgttcccctgcttcttcattttccttgactgtctttgttgttatctgttctttataacaaaagccatcatatacttcttcaaagactaggctcatagagatcaccctcaccaatcagcccagacagtaattgtgggtctctcaaaacttgataggattcaaacttctgtctgttcttagtggcccctaggttttagaggatgatagattgtgccaggactcacaggtaagggaggtagaaactatgtactcatgaccatggggtctgtgctgatctgagcttctcttgtcatcactctcaatattcaacttccccgtggatcaggctcagctgtggctgctccacgtggggctgttctcagtctgttgcctctgtgtgtgcagaagtcctctgtgaagttaactagtggagtcagacaggaaaatactacagaccaagaattctcagactgttctgcaaagcccctggattcactgaaaaaagaacaagtttggtccagcaggattcatggcaagtgttggtgagggagataacagtaattcaagtggaagttctcaatgggactcgccttcagtacaaagaagattaacagtcctcagagacactgttcagaagattctcttttaagataataaaactgagagcccaagacaagtctgtgtattactgtgagggacacagtgtggggacatctatgtgagcacagacacaaaagtccctgcagggagacaggaggggactgcatgttagttgctgctcagaaccaccagggggcattcaggacaccagtaggcactcagaaccaccaaggagagctcagaatcaccagggggcactcaggaaactggcaggtgctcagaaccaccaaggggcgctcaagatcccagcgggagctcataaccaccagggggcgctcaggacactagggggctcagaaccactagggggcgcccaggaccaccaggtctctcaagacaggagggcgcactcaggacactagggggcgctcagaaccatcagggggcaatcaggacaccagagggacttcagaaccaccagggggcgctgagaaccaccagggggtgctcaggacatgaccggccctcaggaccaccaggggattttcagaacaccaggaagcactcaggacaccagagagcgatcagaacaccagggggcactcagatcctccagggggcactcaggacaacagggagctctcaggacaccagggtgagctcagtaaaccagtgttcgctcagaaccaccagggagcactgaggacaccaccgctcccttaggaggcagctccacatcaggtccctggatccgggaagggagggcgggtccttttggatcttgccactaacctttggggagttttcctgcttcctttgtggtttcaagaatcatttgcagattcttctcatgtacaaagctctgctttcttggattatgtaatgtttttggctttggatgctaccagaattacgttgtactgtgagaggattcattcgtggtgtgtgcaatagtgaatgaaagctccaatgttaggggtggctttgaaagctacgttaggggtggctgagggcagttagcagaaaatgatcatcactatagaaggctactcatttctttgcacatttgcataaacaattgtagtttatgccctaaaaactgcatgttttcttggccctttttcttaaatggctccactctaagtccagtaatctaattaagctgtgtttcaaagaccaccaatcaagttaattctgtttaatgcaacactttgtaaaggaaaatgtacatctgttttttagagtcagctttaaattttacattactttacaaatattgatttgtcaaatttagtctcataactatcttcagtaatttaaaatcttagtcatgtcatgttaaattaagtaatcctaggtttctcacttgaattagggttactaagaattagaatagtaaaagagtataattagcttttggtgaggtttataaagaaagatgaggattttttttttttttggcttaaaaatattctgtttcccagtttacagggcttttcaactggttttaagataaccactgtttacatctaaactttttttggtaaatgactgctgagtttctatacatattccatagctagagtttcaaagtaaaagctctagtatctttgtattagtgtgtgtatgcgtagatgtgttaatatgtgcatgtatatatatgtgtgtgtgtgtgtgtgtgtgtgtgtgtgtgtgttgtggctactaggtacaaaattggctttgaaataaatattttcaaattaagtaaatgagcccaatgcatttgaagtacatgtgactcaaataaatatttaataaataagttggctttaaaattattggtaaaaacaaattagagatattttaacaattatcagcataccttatagtttatattaattcatcaagtgattttatatttaaaatcacagctagatattatatggtgtcaaaattttttatgatgattataaaattattaacctcgttggccatatgcggtggctcacacctgtaatcccagctctttggaaggctgaggtgggtggatcacgaggtgaggagattgagaccatcctggctaacatggtgaaaccccatctctactaaaaatacaaaaagaaaaaaaaaattagctgggcatgctggcaggcgcctgtaatcccagctactctggaggctgaggcaggagaatgcttgaaccccagaggtggagcttgcagtgagctgagatcgcaccactgtactgcagcctggatgacagagcgagactccgtctcaaaaaaaaaaattataaacctcattaaaaccagaatgatctttgtaattttttgacaaatatgatgtttaatattgttgttttaataaaaaacaggtaaatagttattagaaaaacaattatttgcttaattattaggtttttactcaggcaagcacctgaaattcatgggttattacatgggtaacagagaaaaaactttaaaggatgaattacaattttcatacagtaatcttgataagctacttaaataaaatagggaaatgtaatcaaataaaccccccaaataaacttgttcttcaatttaaaaatctaaagtttaattaaataatagatattgactaaatgtttaggtcattactaattgttttaaaaaatatataagaaaatatttttcttaaaaaattattcttagaaaaataatgtaattcaaagttatttatataacatcataaaaagtaagagagttttaaagaaatttattgacatagagaagtacttttggtaagaaaggttaaaataaaaaaattttatatgagaaataatcttgcatggtaattttttatcctaaaataaaatgactaagaaagaatgacgtttagaataaaacaagatgttcaactatgccataaatggtttgtgtaagtgaaaataagatttataaaaagttaatttattaaaaaaccttcatattatcaagttgactataattgaaagggaagtatttataatagtctttatagagatctggcttttatataaaatatagtaatacactgaagactggttagaatgacaaaattgtcttaaagtgttgatttactaaataaaattataagatattttaattttttaacccccaaatttaacttttattgcatcttgccattgtgattttttccctttgagaagacttgagaggctctccattttttcatcacgtcctttaacattttttttcttacaggcgattagcttcttactgacttaacttctaactgttgttagcttttaactgctattattgtctgatgctaaaaacattttatctttaagttctaaataaaatgttttctttcaatataacattctacactcttggcttatctttaaatgtctacatttttctatgaaaccaaagtcttcacgtgtaatctgagtcacattcttggtatgtctaattaattcaaatgcttttttcattagagttgacctgcaggttatctacatgcattttccaatagggaaaagcaatcacactgtaaaaggttttgctttgctatttggtaactggcataaaacaaattttatattttattgaaataattcctatgttactgttattaaggtttccaacttactgagattttaagaaaatataaattaatgttattacattcatgtagctatctacattacttttaaaggccttgtgctgccacattactgacctttgactcctaggtctaaaaaggacacacagcattttgggagactaaggcaggcagatcacctgaggtcaggagtttgagaccagcctggccaacatggcgaaaccctgtctttataagaaatacaaaaattacccaggcatggtggtggatgcctgtaatcccagctacttggaagcctgaggcagggagaattgcttgaacctgggagacagagattgcagtgagccaagattgtgccactgaactccagcctgggtgatagagcaatattccatctcagaaaaaatatataaataagagaaaaaggacactaagtcctgctaaatcttaaacactgacagtaattaaagccccatctacagacctggaagaaaatgacaataaaaattcatcatactcttaagacataaggccagaaattgaaactactcaacaactccaggcccagggactattacagaagtggatttgtaagattgtaaaagctaattttgagatataatattacttgagagtttctttataagttaagcattaatattaaatgcacactaatggaagtctagcatctgggcccctgtgacagattgacaagggtttcttgaagaagtaatccactctttagcttaaaaaattattaaaatttataaaagacctatgaaaattatattttatggtaaaagtagttataatttaatagacttatttctcagaattgagagatagttttaatttttctcatgatgttcttataaggggttattgtttagaaaattaattctttcaaaaataaaagtttttgcttttttaagaaatcactgagttttcacttggctaaataaataacttactttacaataatctgtaattccattttgtaatatcaagtgttctaaataaacctttgatatttgacctccttcacacaataaaagtctaaattcagtcatttgacctcattattcttttttgatatttgatctcctgaagccaaaaagaaacatatttagcttctttggtacaattaaattatactggaagcaatgtcaaatttgaaatggtgtttaactttggactatatttatataaatgtgggctatataattggagtatattcatataaattaaagagtacatgttctaaaatggtatgaggttcaattgactttgatatgtcagtatattttgtcagtagtacttatgattattatataaaatttttgttcatcacagaaataaccaaactttctcctcaattctgtctttaaccgtggctattctaaaacttcagccatccacaattgttttcctttgattctttatcaggtggcttataataatctatagaattttgaggggtactcttaaatacacaattgtgacaattttataaattgtgccatttatatacagagaaaaacttccaagactctcatggagacctgatgcatttatgatggttgttaatataatgtcaaacaggacaggacttaattgcatgaactgaactaacaggagcctgaaataaattttatggcttattctttaaagcatttgctaattacttacattttgtttttcagaatcaaaaaaaaaattctcttaagctattcattgtttttaacaattgagtatagtatattctagtgagaaaattcaaaaacacaatttcttcttctctacataatttctccaaaatttggaaactgtgagtattgttatatcaaaatattaattcacataggttcaatataaatctgctttcttccgtaacagggcacaattggagacaatgatcattttaccaagactttaacttgaatgacatattttcatatttactttataaaatgaatttaagctggatagctgataaaagccccttgggaaaactggcatgtaacctgttttgttcagggccctgagctgtagtaagtcaataattttactttctgacagacccaggaatcccaagttgtcttggaaaattgaaaaaagaagaagtaacccaattcatatagctgtctgaaggcacagatgaaacaatgtctgggcttgatgcttttaaagattctacccttagatttcttataaaaaatttccagcaaggtcaatttatgaattaaatagcctatgtacaaaaaatagaaaaaaagagagctaatatgttaaattactatttttgcctcatcttatacaaaaaaattaagcctaaaacttatattacaaataaatttgccctactatgattgtgtctctaataactttggggaattatagagagaaatactgtttcaaaataaacaccagtgcatctgttattagattctaaccttgtccacttgtttttcaatttatattattttctacaatttatattagtttctacaatttatattagtttctataaaaatttatatttgcagaagcctccaaaatatttttcctgatttaaaattaccagaagttaaactgtgctttcttatagctagacatcttatactctaaagaaaataaaatcaatgacatgatttggctctgtgtccccacccaatctcatcttggattgtaataattcccacatgtcaagtggaaaaaggtgggaataattgaatcatggaggctgttttctccatgctgttctcctgttattctcacaagatctgatggttgtataaggggcctccctcttcccgtggcacttctctcttgcagccatgtgaagaagcacgtgtttgctaccccttccatcatgattgtaaatttcttgtggctttctcagccacgcagaactgtaagacaattaaaccttttttctttataatttacccagcctcaggtatgtccttatagcagcatgaaaacggacaaatgtaagcaacttaattatataccaaaactcttttatacctgcctgctgtgtgaagggaaaataagtcttgaggccgccaaatcaccaagctaaatgggagagtcaaactggtgttacaggagataggaagaaattattttggtagatagttagggtgacagaatttctgccgaaaacatttcttctaacaaaaatcagcttggcaattacttattttctattcacacagagttcaaagaaatcacttctaacaaaaagcagcctgaaagatcaggctgtaaaacatataagcaactctgccacagagagggtgtttctgggtgtaatcaccaaacttcacatacatacactgggccctagtaaaaacagtgggccttaatgagcacattcctttccttttctgggggcactataacatcagaaagctggaaacttgcacaagtttaggatgcctgcacttgcaaggaggtacctgggacctagcatggaaaatcctcttcccctttttagcactctgggagtggagccccagccttgggattcccaggtgtttcccttcagtgatcaggactgaacacacacaactcatcatgcagtttgtgctgagctgggttttccttgttggtattttaaaaggtgattcatggagaactacagatgttgagtgtgagtggacatgagtgagcaaaacagtgggtttgtgtggcagtttctgaccttggtgtctctgtgtttgcaggtgtccagtgtgaggtgcagctggtggagtctgggggaggcttggtacagcctagggggtccctgagactctcctgtgcagcctctggattcaccgtcagtagcaatgagatgagctggatccgccaggctccagggaaggggctggagtgggtctcatccattagtggtggtagcacatactacgcagactccaggaagggcagattcaccatctccagagacaattccaagaacacgctgtatcttcaaatgaacaacctgagagctgagggcacggccgtgtattactgtgccagatatacacagaggggaagtcattgtgcgcccagacacaaacctccctgcaggaacgctggggggaaatcagcggcagggggcgctcaggagccactgatcagagtcagtcccggaggcaggtgcagatggaggctgatttcctgtcaggatgtgggacttcatcttcttccaacagtttctctaatgaacctccctaattttagaattctgtggttcctaatgtcatctctacatattttcaaaaggtcattttaatatgaggacataacctctcatgtaccaaatgcacattgatgcttacaaagatgaaaagttctcaaccattgtcaccaggatcgcagtcctgaggaagctcacgggtgtctgatgagtctcctccattcaggcccaggacagaaacctcagggagactcctggactagaacggcagggattctgatcacagccaatagagagcctgggccagggtcagtgtcctgtagaagctcacagggttcacatctgacccttctcctgaccctaaagccaatccgcatcagcactgatctggtgctccttttgctcccaatacatgttctttctttggagtgtttgttctcccttttttatttgcttttctttcttcctgaaaaagaaacacatggtctctatgctctacactccagggctcaaggcattttcttagaactcaggcaaggctcaggcttggctactccagcccacgtgggagaggctgatgggatttccttctctccccatattctcagggccctcctctgtgttgtgtgtagactcatctgggaatgcaattggccgttaatagtgaaggggataaactcatttgatcaaaatgggatgtggatgtggaattaaccctgttctatgcacactgtcagagtcatcttcttcagaagtagtgttagaaagagcttgtgaactttatcagaatcaaaatggatccacttgtgttaaaaccctaatgaatgaagctggggaaggccatgaaggagggttctaacacacatatttcctgataagaagaactatcataaatagaccctgcacagccacaaccttttacacagaggccaccacagccttaaaagctttatttctccaagtaaatctgccccgcaactgcctattcaaccttacaccgctatctcaaaatagctgctgtcaccctcctcatttttccttaattctcttttttattattttttaaattatactttaagttctagggtacatgtgcacaaagtgcaggtttgttacatatgtatacatgtgccatgttggtttgctgcccccattaactcatcatttacattaggtatttctcctaatgctgtccatcccccttcccccaaccccactacaggccccggtgtgtgatgtttcccaccctgtgtccacatgttctccttaattctttatcttccttttcctacctgaatgtacccatacatattttaattgaaacgcacatcctagaaaaaatattattatactttagagtctctgtctgttattcaggttgacatgacaagctacagacggacatgccacttttctgtgagacatagaggatgacagtttttggagatgtctaggaatatccaatgtccataagatcagccatcaataagtgcagactggaggtcccagagagaggcgaagctgctgaatcatcgtggaatttcatcttctccagttctgctctgatggaatcaggcccacccattttatcaatgacaatctacctaacctagagtcagctgatgacagtattaatatcatctattaagtaaagtcataactatatatatagtgagagagggagagagagagagacggagtctcgctctgtcacccagggtggagtgcaatgtcgtgatcttggctcactgcaacctctgtctccggagttcgagcagttctcctgtctcagcctcctcccagtatctgggaatacaggcacacaccaccatgtccggccaatttttgtatttttagtagagatggtgtttcaccacattggtcaggctggtctcaaactactgacctcaggtgacccacctgccttagcctcccaaagtgctgggattacaggggcaggccaccaagtccagctaatttttgtatttttagtagagaccaggtttcacgatattggtcaggctggtctcaaactcctgatctcagcctcccaaagtgctgggattaaagatgtgagctactgtgcccggccaacaccacctatattaatgttggattgaataactacaaagtctaccctaaccaagtgtaccatcaaacttaccattacccagaggaaagaatctttaacatgagatctatattcttaaatgttttaaggtgtaaaactgaccacagtacaatcacccaattatgattttggtaatgagttgtagaaactgcatgtatattttggatattaacattttttcagatgcacaccttataattatattctctcattctgtaggttgcaattttttccacactttgcgggatctttttgttgggaggtggttctgcttgttcaattctgattttattatctgtgagtttaatttgaaatatagaaaatcatccttttttatatactttaaattttagagtacatgtgcacaacatgcaggtttgttacatatgtatacatgtgccatgttggtgtgctgcacccagtaacttgtcatttaacactaggtatatctcctaatgctatccatatcccttccccccaacccacaacaggccccggtgtgtgatgttccacttactgtgtccatgtgttctcattggtcaattcccacctatgagtgagaacatgcggtgtttggttttttgtccttgtgatagacttctgagaatgatgatttccagcttcatccatgtccctacaaagggcatgatctcatcattttttatggctgcatagtattccatggtgtatatgtgccacattttcctaatccagtctatcattgttggacatttgggttggttccaagtctttgctattgtgaatagtgccgcaataaacatacgtgtgcatgtgtctttacagcagcatgatttataatcctttgggtatatacccagtaatgggatgggctgggtcaaatggtatttctagttctagatccctgaggaatcgccacactgccttccacaatagttgaactagtttacagtcccaccaacagtgtaaaactgttcctatttgtccacatcctctccagcacctgttgtttcctgactttttaatgattgccattctaactggtgtgagatggtatctcattgttgttttgatttgcatttctctgatgaccagtgatgatgagcattttttcacgtgtcttttggctgcataaatgtcttcttttgagaagtgcctgttcatatccttcgcccactttttgatggggttgtttgcttttttcttgtaaatttgtttgagttcattgtagattctggacattagccctttgtcagatgagtagattccaaagattttgtcctattctgtaggttgcctgttcactctgatggtagtttcttttgctgtgcagaagctctttggttctacatactcaaatcaataaacaaaatccagcatataaacagaaccaatgacaaaaatcatatgattatctcaatagatgcagaaaaggcctttgacaaaattcaacaaccttcatgctaaaaactctcaaaaaattaggtattgatgggacgtatcttaaaataataagagctatctatgacaaacccacagccaatatcatactgaatggacaaaaactggaagcattccctttgaaaactggcacaagaaagggttgccctctctcaccactcctattcaacatagtgttggaagttctggccagggcaatgagacagtagaaggaaataaagggtattcaattaggaaaagaagaagtcatattgtccctgtttgcagatgacatgattttatatctagaaaaccccattgtctcagcccaaaatctccttaagctgataggcaacttcagcatagtctcaggatacaaaatcaatgtgcaaaaatcacaagcattcttacacaccaatcacagacaaacagccaaatcatgagtgaactcccattcacaagtgcttcaaagagaataaaatacctaggaatccaacttacaagggatgtgaaggacctcttcaaggagaactacaaaccactgctcaatgaaataaaagaggataaaaacaaatggaagaatattccatgctcatgggtaggaagaatcaatatcgtgaaaatggccatactgcccaaggtaatttatagattcaatgccatccccatcaagctaccaatgactttcttcacagaattggaaaaacctactttaaagttcatatggaatcaaaaagagcccgtattgccaagtcaatcctaagccaaaagaacaaagctggaggcatcacgctacctgatttcaaactataccacaacgctacagtaaccaaaacagcatggtaccggtaccaaaacagagatatagaccaatgaaacagaacagagccctcagaaataatgccgcctatctacaaccatatgatctttgacaaacctgacaaaaacaataaatggggaaaggattccctatttaataaatggtgctgggaaaactggctagccatatgtagaaagctgaaactggatcccttccttacaccttatacaaaaattaattcaagatggattaaagacttacgtgttagacctaaaaccataaaaaccctagaagaaaacctaggcaataccattcaggacataggcatgggcaaggacttcatgtctaaaacacgaaaatcaagggcaacaaaagcccaaattgacaaatgcgatctaatatgaaattcttaatgagttctatagttataagtacattatttctccttattaaaactaatcttttttgctgaatgggtggaagatggtggcttccctccaaaagaaaacatagttggttctgtaaagagttcacccatttcttccactataggcctgccctggcataatacaagctcccaacttaagaacttatgattttccatccatgggagaagccatcttttccatctattattaaaacagaagacacttcattaatatcactcccaaaataggctatgtcatatccagtgaggtaggatggctgacagtggtgagaatccaagtaattggtcaagcactgctatgtgtgaagaaacaccacagcatactctacactgtcactcatgatatggaattgttgcctcctcagcaatgtaactgagcccttaatatgtggctgggatgacaaagcaatgccagcctgcagagtggaacctgttcttccttctgggattagccaaaggccggtggcactcatggctgaccctactttccttacaactggacgaagcgaagcaactggatatgaacttctatcccaggatgtaactgtccaaagtgccttctctttatgtcaactggaaaagtgtgaaagacagacactattctcataaacggatatcctagttattccacccactagccagctcttccccccaggtggcagtcatagatttagaattgcaagtagaggccctggctaagcataccaccagtccctttaacaacacctaccataccatcatcattcttactgaagaaacctcacagatttgacaagtgacactatgaagctatatgaccctaggtattgcaactacagccaaaggtaacacttgtgtattaatgaaccctgaatgttgcatatatatacaagattagtcccacaatataactcaagctatgcaagcattagatacccatatttctgctagagatggatgccctctctcaggaccctgcgacagcatggtttagttgacttcctaacacatggaagactttcatatatagtagagctggtatactcttcattgctatcttcagttgctgtggattttattggtaccttgcactttaagtgagaatgtaatactgaccttctcaaaaactcctaggtccttgcaccataatgctccaacaaacacctactgtaattccggagactccagaatatttccaactccagtttaatggattcccttccaatatatacaagctatgccctttctaagaagtagccagattgactatgacacacgttttccatagaaacaaaatggaatttgacagtggggaatgatatacaggcagcttaatttcaaaatgcattttaaacttattttttgaggttttaatattattttcatactccttgaaacctgaaatttcacacttacattctaattgagacttaataacaaataaccagaacacatgaattgcctgtaatctctataccttgtattgtaagccacatttcaagtgtaaccttacttgtcagcacagtatgtttaccataggcataattgcttgtcctgactgtccagaaggcagggtggtattaagtatgcggcctctggagctgggaagtctggctttgtatactgtctctgccactgctaactgaaggacaatgggccagttacttcctgtaccccagttttgtcatatgtaaagtagggttgttgtaagaatgaaattagttaatatttagtacctaacaactagtaggcattacgtggtagctattcgtattgctatcgtcagagaacacacaggagtccattgttatttttaccctccccctccaaacaaaatgtgtaagacactagacatggtagctctgtaacggggttcgtcatgtattaaactgtgtacccaaatgatatgtcaaagtcctgacaaccagcacttcagaacacgtccttatttggaaatatggtagctggagatgttattagtgaagatgaggtcttacttgagcagggcaggccctcaatgtgggaagatggttgtctttctaagtacaaggaaatttggacacagagacagagacatacagtgtgccatatgacagcagagccaaagatcagagtggtgcagcagtaaaccaatgcatgtccaggattaccagtcacctccacaagtgaggaaagggcaaggaagaagtctcctgagtctcagagggagtgcagcccagctcacacttgattttggacttctagtctctagaactgtgagacaatacagtcctgtcatttttaagccacccagtttgtagtatttcattttggcagccctacgatattcatacagagttcttcacccaaaaggaagcactctttctcacaaacagtcaaagtcctggatgacggacaacctggagattgcaaacctccaaggaatcaaaggaggttctataaagtctaggagccccatctttcaaaggctgctcctcaagtccacacacacactttggaaggagaatcctgctcttggacatgggatccttagtgagccaactgccaataatccaacatcatcatgaattaaagatctctgacatttcctcgtcaccaacgggaattctgtcaagtagtaagtaaaacccttcttcaggaatctccacaccaaacagttctgcatggcttgggacgcctcaggaaacttataatcatggcagaagaaaaaggggaagcaaggcagtcatacatggtggcagaagagagaggttaaacttttcagtctctcttgggtgtaaagatacaatcttgaggcaaacagcagaatcaattttcttatgccttgaaattctccctttcaccataaatattcccttcacattaatctaactttatgtttgcatcgaactatgtgcctttttggaagttccggaagctaatttgagacagatagacaaagtcgggagaccctgatgcagaattccagaggtgacttcaatgttgctagttaacaacccaggcattgcccagatgatgccagcccaagatccaggtggactgggatgccagagagctgccagaacaagacgcacagacctggttctcagcccaaatcttgcatgcctttcttaccaactttcccttttttaaacccctgcctttccttcaaaattgaagtggttgcttgggatgggaatgcgttcacttcccctttaccattatggttaatacaataatttttgtaccagatctctctcttgttaattggatcctgcaggtggcagattccggaccagagtgacgttagaaactgaatgcacatactgggtggttcacagacacagtgttctgtgaagtttatgggtggattcctggggaagcctgcaagcctgttagtgattagcagaaccgcatccagctactgggatctgcacgccaggtgccgtgagcccctcaccatgttccctggtcccagctgcccgcggatggttcagccttgacaacgggctcggtgttctgggtggtgggagagcaagggggccccttggggagcgtgctacagggctgtgaatccaggggcccacccggtgttccctgtggagtcactgagggaatgaggggcttctcagggcacagagctgtaacgcctttgtgcagtggtggctgaatacagtgacactgggcgcgtggtgagaagcggggcaaggtcagttcactggaccctccgccctgagcctcagatgagtcgggggtccccagacaggcccggtctctgccctgcggcggacactggagcctttgctgtggccgccaccgaggagccttgacctcaaaggagggggaacctctctacccacctcggaaacctgaagggagcggcggtctctcccagacaggatctcgccggcctccgcgtctccaggcccaaccctgtaccacataaaggaagtccgcgctgagctaccgggacacagcgccgttgggtgggcgggcgcggcgcggcgggaagcaccggggcagctgccacagagatgcgcggggactgtcgggaagtgggcggtccgggaggcgcggggctgatgggacgtgggcggtccggggacgcgcgggggatggcgggacgtcggcgatcccgagatgccagggggcagctgggacgtgggcggtcttgagaggcgcgggggcagctgagatgcaggtggtcccgcacgcgcgggggctggcgggttgtgggaggtccagggatgcgagggggcagctggtacgtgggagttccggggacgcgtggggtcgccaggaagcggggtctaggacttagatccgccttctcttcaggccatgcagccccgaagctccgaatcctgggatgactcctgtccatgttggaagggaccctgccagtcctggcaaggttcaacggccttagggcaagaaatgttagtagagtcctggaagacgatgtggggaacgggtagcggccaccggatggtgatcgttcttctacaagaccttgacatggatggggagaaacagagaagaaccttccaagtttgtcccactggacatgcccaccacactttaccagccctttctagaaggcctgtgcgtaacacatgaaaaagctgctctcgacctttccctgaccttttaaaagaaaacatttgctgcatctaatccgcctagatgtaaggaggttcccaaatgtatgacagagtcagacaattacatgtcttgtaagttaccatgtgcttgtcttttgttttccgttttttttcgtttttttgttttttgtttttgagacggagtctcactctgtcgcccaggctggagtgcagtggcaggatcttggctcactgcaacctctgcttcctgagtttcaacaattgtgctgcctcagcctcccgagtagcttggattacaagtgtgcaccaccacgcctggctaatttttgtagtttttagtagagatggggttttgccacgttggccaggctggtcttgaactcctgacctcaggtgagccacccaccttggcctctcaaagtgctgggattacaggtgtgagccaccgtgcctggccgtaagttaccgtgtgctttttaaacaaatcatagcaaaggggtgtcttctggaaatgacattttgaaatggagttactagaccacccctggaagggacacagtaaccacacgtccacgttcgttcagtgggtgagaggacatggaggggagacctgggcaggaagggaagagggttccatgccaggctgctcatatttaaaagacattttcattgtagggacatggatgaaattggaaaccatcattctcagtaaactatcgcaagaacaaaaaaccaaacaccgcatattctcactcataggtgggaattgaacaatgagatgacatggacacaggaaggggaatatcacactctggggactgtggtggggtggggggaggggggaaggatagcattgggagatatacctaatgctagacgatgcgttagtgggtgcagcacaccagcatggcacatgtatacatatgtaactaacctgcacaatgtgcacatgtaccctaaaacttaaagtataattaaaaaaaaaaaaaaaaaataaaaaacattttcatatcgttgtcattgttttcttgtgtgcattttattcctcgctattgtatacatcattggaaattctaagtattcttttgaaatatctagtctttctagatgttctgaagtgcctgatgtatgttaaaattacaggtggtaaaataataaattttgtaaatgtctttttgttaaaattcatatgcagtgttttattttattttgatgttggtggggggtggggaggatggccaaatccctgcttgatcaacacacattgcgtttgtgctctgttcaggggaggagagaggaggagaaagtgcagatttccaggcttctgtgcgcaccgggaggagagattaatgatcatctcttctgtctgtgtgtttgttttatttatctatggatatcctgtgtataaaggatgaacaagtcctatttataacatctaatcttttcaggtgttaagttgccagcgtatgacggaagtagcattattaaacgaatgcagcttgtacatattgtgttaaaattcataaaaagccagtcttctgaaaagaacccttgggccctccctccgcagcctccggcgccagctgcaggaagacctggccaggggaaggcgggcggcagaagctgctgctggctgtggggaaggcggtggagcccaggcctccacaggctccccacaggctccccacaggctcgcgcggctctggttgctgggctccgcacgggccgcgtgggggcgcctgctgggagcgaggaggcgccatcctggctcgcctgctccaggaggacactctgggcctgcgcagatgcagttctccaggatgggcgcgggcgctgggggcggcgctccttgggctgctgcgcctccactgagccgcctgggtgtgaggacctcgcgccggcgcctccgggaaggacgcggagccgccgcggccgatcccagggctgcagctgctgcccgacgcccgcgggaaggcccttccgccaccgcccgggggttcgaacttggagcagctgctgccagctgaggcgccagcggcgtcgggagctcctcagagtcagtgttttgtgctggattcggcatgtcctctgaaaactcgggaatttgtcactgaaatggtgacaggaggtgagaagtttttttagacgttgccttcgctggcctgacgcggggctcagacctggaatcccaacactttgggaggctgaggcgggcggatcgcttgagctccggaggtggagaagctgccttcgtggtaactgtggtcttaagttcagctgagaacgataaatggcttttccttgaagtggctgcttttgtgatttctctcaggctcatcttttgtcagttagaaatccagtggtaggtgtagcttagagacgggaaatttttggttttgttttggctacacgtaagtgttggaaattattttctttaacgttccagtgtgagcaaatccagaaggatgtcagattaaacaccgaatttaacaaattcaaccgggcacggtggctcacgcctgtaatcccagcactttgagagaccgaggcgggtggatgatgaggtcaggagtttgagaacagcctgaccaacatagtgaaactccgtctcttctaaaaatacaaaaattagccgggcgtggttgtgcgcgcctgtaatcccagctactcaggaggctgaggcaggagaatcgccgagattgcgccactgcactcagcctgggcgacagagcgagacttcgtctcaaaaaaacaaaaaaaaatcaatcattggaatactgttgttcattacaattaatgaacgtttgatagacgcataaacgaactaaattcacaagtacatataagtaaaataagccaaaaaaaaaaaactacatcccgtatgatgacacttttatacattctacagaatagaaactaaagtgatatgaaggttgggagttgaatggagaaaaggtgagcgaaaagagggaggacggaggagttgcaagagaacaagagaaaatgttgagggtaattgatctgttttctatcttaataatggttatggttacatcaataatttctaaattgtacattttgtgtgttaattataattttatattattcaagctattacaaataaatacctgtataaatttcttagggacggtttaagggagatggataaatcacataaaaagtcagatatttctgaatgtacaatgaataacccttagctctatctttattttttggtaattcttaaatgcagcagatttttttaatgtttttattacaagaagggtttcttcaaaccacaccaggtgtgtgtaactctgggctaaagttggttaagggagcagtgggatccggtggagaggagcacaggcctcgatcctggagcccattcttgtcacatgtgagctcctggacacatctcatagctccctcatgcttctgcgtttacattctcatctgtaaatggaggaccaatgggcatctgcctctaacaatgtattttcatgtgttaagatgatgtatgttaagtgtttactatagcacaatcttttaataagaaattacatttttttccaaatactatcattgtcttcaagcgccaccaaccaccagaaaacttaatatgctctgtgccctgccctgtcctcagacatccagcccaagagacttttatatagtaggagatatgcaaatagttccctccctctgctgatgatgaaaaccagcccagccgtgaccgtgcagctctgggagacgagctcaagtgccaggattcccaagtgttttcacttggtgatcagaacttaacacagaggaatcaccatgttgtttgggctgagctgggctttcctttttactattttaagaggtgatacatgaagaactacagatattgttcgtgagtggatattagagaaacagtggatatgtgtggcagtttctgaccaggatgtctctgtgtttgcaggtgtgcagtatgaggtgcagctggtagagtctgggggagacttggtacagctgtggtggggttgggggtgtcctgagactctcatgtgcagcctgcggattcatcttgagaagcaatgacatgaactgggcccaccgggcttcaagaaaggggctggaatgggtctcatacattagtgctagtggtggtagcctatactatgcagacactgaagggtagattcaccatctctagagacaatggcaagaacatgctgtacttgcaaatgaacagtctgagagatgaggactcggctgtgtgagagacatggtgaggggaaatcagtatgagcccagccagaaacctccctgcaggaaccctggggtggggggaaatcagctgcagggggcactcaggacccactgatcagaatcaaccccagaaggaggtgcacatggagattaggggctggattccttccaggatgtgggacttcaacttcttctgacagtttccccagggaaccgctctaagtttagaattctgtgtcatctctatgtatttaaaaaagatcattttaatgtgaggaactaactattctcacatgcacaaaatgcagattcacactcacagagatgaaaagtcctcaactgtggtcactaggatcagagtcctgaggaatctcaggcgttcctggtgagtcttctccaatcagacccaggacagacacctcagtgagattccatgactagaacaggctttatggattttaaaaaatagagactgagccagggtcagtgtcatgtagaacctcacaggtttcacatctgacccttctcctgacgctaaagtgtgcaaatcagcatcaatactgatctggtgctgcttttgctcccaatctgtgttctttcttgagttgtccctttttcatttgcttttcctgctccctgaaaaaagaaagatgttgtctctgtggtctaaattccagggctcaagcccttttcttggagctcaggtgggtctcaggttgtggctcctgcagccacgctggggaggctgatgggactttcttctctcccattgctcagggccctccactatattgtgtggagactcatctcagaatagatgtggccagtgggagctgaaggggacaagcttgtttggtcaaaatgagatacaaatatggaattcaccctgtgctgtacaaactgtcacagagtcactttctgaaacaatagtgttagaaagaacttgagaaagttgtcagaatcaaaattgggtcacttgtgttaaaactctgctgaatgaagctgggaaaggccgtgacggaatgttctcatgctcatatccctgataccaagaactatcgtaaatagactcttaaaaccacaatcttgcacaaaggtgcccacaaccttaaaagaattacttctctgagtaatcttcccagcagctctctgtgtaagattggacttgatgccacccttgttattgattcttctatcccggagaagttgtctcaaaacagcttatgtaaccctcctcatttttctttaaacctttatctttctttacctgcctgagtgaacccatgcatgttcccattgcaatgtccatcttcaaataattatcattttactttagagtctctttttgtctgttattcagatttgacaagctgcagatggacacatcacgtttctgtaagacttaggggatgacagttttgaggcatggctggggaagtacaatgtccataagattgaccctcaataagtgcaggctgtaagtctcagagctgaagctgctgaatcaccatagaatttcatctttagttctgctctgatggaatcaggcccacctgtgtaatgaatgacactctacctaacctagagtcaactgatgacaggttaaatatctagacagcaaatttgcaacaccacttagattagtgtttgaataactacaaagtatagccgagccaagtatatcgtaaagcagactattatacatggagaatctttaacatgacatctacaattcttaattttttttacgtataaaactgatggttttacaatcaggctgtcatgattttgctaatgagttgtagaagttacatgtatgttttaaatattaacagttttttcagatgcctggtttgcaactatattctcccattctgtagatttggaattttttccatgctttgcaaaatctttatattttgatgtagttccagtccttcaattctgcttttgttgtctgtgcttttaatcttaaatttaggaaatcattgctaaccttttggtgggagagaattttacaattgcaggctatacatttaactgtttaacccatctagagttgattttttgtgtttattctaacctaatattcttaactatttgcaagtgaaaacccagtttgtttaacaccctctttaggggagagtatgatttagccgttgtgtagaaaatgttataaatcactttgccttcatattggttctcaacttgaaaatgagtttgccatcaatacgtgggtttatttctgagctctctatatgtatttatgccagtaccatcctgttttgattatgtttgtaattaattttgaagtctgagagtaaaatgcctccaagtttattcttgcccttttgcagatattagacaaaatattttaacatttcaccatgaagtatgataacagctatggcttttcataatgaattttattgtgtttaggttattttcttgtatttctattttgggtagagtttttatggtgaaaccttgaatttttttaatgttattttctgtctgagaagttaatgggaccttcttcgtatttaatttggcataccaaatgtattgatttgaggattttgaatcatctgtgcatctcaaaaataaatttgagttggtcatggtgtatgatccttctaaagtcctgtggaacttagttgactattatttggtgtgtggagggggctcatttatgtctactaggaatattggtctgtagtttacttttttgtgaccttgtctattactgaaaatacggtaatttgggccttatagaaagactggaaggttggcatctcaccaatttttgaaaaagttagagaatggttggcattacttctttaaatgttgagagtcctttttttacttaacatgtgacctatcatggagaatatttagtctttgcttcggaagcatacatattacactgctcttggttggaaggttctgtagatgtctattaggtcaatttgttcaatagtgttgttcaagtccactgtcttcttaagaattctcttaatgatgttctatccatcattgaaagtgaggtgctaaagtcttctcctaatttttattattttctatttatctctccatatctcttaaggtttgcttaatgcagttatatttatttttgtacaaatatgtaaaaaataaatgaaataataattgctaagtaattttaatggcaaaatcacataataagaaattatattttcccaaatgctgtcattgacactaagctcctccaggaatctcacatctgctctggacacggctctcctggtgtcctaccccagagcttgctatagaggaggagacatgcaaatagggccctcactgtcctgatgaaaaccagccttgcctgcgtctacgggagaagagccccagtccagaagtaccaggggtttccatttggtggtcaggtctctgaacacagaggactcactatggagtttgggctgagctgggttttccttgttgctaatgtaaaaggtgactcatggagaactagagatattgagtgtgagtggacacaagtgagagaaacagtggatatgtgtggcaggttctgaccagggtgtctgtgtgtgtttgcaggtgtccagtgtgaggtgcagctggtggagtctttgggaggcttgttatagcctgggggtccctgagactttcttttgcagcctctggattcacctttagtacctttattaggtactggatgagctgggtccatcaggctcctgggaaagggctggagtaggtctcatttatgagttgttgtgtaggtagcacaagctatgcagactctgtgaagggtcgattcaccctctccagagatgatgccaagaaatcactgtatctgcaaatgaacagcgtcagagccgaggataggtctgtgtattactgtggtggcattgtgtgcatcccttgtttaggtacatgcagagatgctgctttggtgtgttcaggggctcctgttttggggacaccaattttggagtttgcagtatccttgagtccagtacgttcatggtggcattgggtctggggtgtgcagtggcaatgagtccaggatacatgcagctgatgccgtatcttgtgaggacaagaacaactacaaaacgatcctattaataaataggcaaatgacttgaatacacatttttcaaaaaatacatacaaatgacatatagatatataaaatgttaaatatgagtaataatttttaaaattcaaatgtaatctacaataaattatcaccccatacctgttagaatagctatttttaaagaagatgaaagataaccagtattggggcagaagtggagtaaagggagcctatatatattgttactgaaaatgtcaattagtacagacattatggagaatactatggaggttcctcaaaaaataaaaatagaactaccatagtttccaacaagcccactactggctatgtatccacaggaagtgcaatcagtatgtcaaagagacatctgtgcccccacgttcattggaggaatatttatgatagtaatgatgtgggaacatcctaaattaccataaatggatgaattactaaagaaaatgtagtatgtacccaatggagtaatgttcatcctaaaataagaagggaatcctgcatttgcaacagcaggcatgactctagaggaccatatgtgaagttccacaggcaggcgcagaagacaagtaattcgcgatttcactgtagtttgtttaaatggtagactcacagaagtagagtggagtgttggttaccaggggctggaggggtggactggaaaaggcgagattttggtcaaagggtgaaatgttccagttagacagaaggagaaagttacagtgttctaatgcacaagatggaaaatatggctaataatgcattatatatttcaaaatggctaaaaatgcaaatgttaaaaattttctcactaagaaatgatacagcctgggcgcggtggctcacacctgtaatcccggcactttgggaggctgaggcgggcgaatcacaaggtttggagttcaagaccagcctggccagatggtaaaaccccgtctccactaaaaacacaaaaaatagccaggtgtggtggcacgcggttgtaatgccagctactcgggaggctgatgcaggagaattgcttgaacccgggagacagaggttgcagtgagctgagatcatgccactgcactccagcctgggtgacagtgagactccaactcaaaaaaaaaaaaaaagaatgaaatgatagctgtgtgaggtgatggatatgtcaaatagcttgattaacaattccataatatatacatgtatcatagcatgtgtgaggtgacctgtatgaaggtgaagtgacctgggggctgtgtaagattacctgggggtatgtgtgaggtgaacacggcacatatgaggtgaccagagacacatgtgaggggacatgggagatatgtcgggtaagccagggggatttgtgaggtgacacagagcaagtgtgaggtgacgtggatgcatgtaaggtgatttggggcacatgtgaggtgacgtgggggatatgtgtgagctgacctcgggtgagtgtgaggtgatccaggatggatgtgaggtgacctgggggtgtgtgtgaggtgacttgggcacatgtcaggtgacatcggggattggtggtgatgtgggtgtgtgtgaggtgacctaaggaggtatgaggtcacctggggcatctgtggggacctggaaatgtgtgaggtgggtacaggtgaagtcacctagggcacatgtgaggtgacctgtggaatgtgtatggtgacctgggaccgtttgaggtgacatggggaatgcgtgaggtgacctggggcatgtgtgaggtgacaaagggcatgtgtgcagtgacctgggtgcatgtgaggtgacctggtgcatgtgttaggttacctgggggatgtgtgaggtgaacaggggcaggtgtgaagtgcctgaggaatgtgtgaggtgaactggtgcatgtatgtggtgacctgggggatttacgaggtgacctgcgggatgtgtgaggtgaccttgggtgagcgtgaggtgacctgacgtatgtatgaggtgaccagggtgtgtctgaggtgatgtggggtatatgtgcggtgacctggtggatgtgtgaggtgacctgcaggatgtgtaaggtgacactggggatgtgtgaggtgactcagggcacatgtgaggtgaaattggggatgcgtgaggtgattcagggcatatgtgaggtgaccttggggatgtgtgaggtcaccttgggtgagtgtgtggtcatctgggatatttcccaacttcgtaaggaaagcctgcaacaacacatggcattagaagcttcacactctagcaccattaatgcgtacatcctcaaggaactctaaatgttttgaggttagcttaaatgccatggagcggcaccttccccaggcacactcatatatgcatcctgggtctccctgccaagctgtatctcctcaaatttacagtttatgtttgctctgtgacatcaactctgatatgttcaagtgtgtttttttttctttatttgtagttgttcaggcttgttgtttcactctcattactctgggctcagtcctctcctcaggtgtcccacttcagagctcgctgtgaaataggagacatgcaaatagggccccccctttcctgataaaaagcagcccagtcctgaccctgcagccctgggagagaagcaccagccctgggattctcaggtgtttccactttgtcatcagcaacaaacaaattaccatggaatttgggctgagctgggtttttcttgctgctattttaaaaggtgattcatgaagaactaaggatattgagtgagtggacatgagtgagagaaacagtggatttgtgtggcagtttctgaccagggtgtctctgtgtttgcaggtgtccagtgtgaggtgcagctggtggagtctgggggaggcttggtacagcctgggggatccctgagactctcctgtgcagcctctggattcaccttcagtaacagtgacatgaactgggtccatcaggctccaggaaaggggctggagtgggtatcgggtgttagttggaatggcagtaggacgcactatgcagactctgtgaagggccgattcatcatctccagagacaattccaggaacaccctgtatctgcaaacgaatagcctgagggccgaggacacggctgtgtattactgtgtgagaaacactgtgagaggtcggaagtgtgagcccagacacaaacctcctgcaggaacgttgggggaaatcagctgcagggggcgctcaggacccactcatcagagtcaaccccagaggaggtgcacatggagggtggggtttgtttcctgtcaggatttgggacttcctctgcttctgacaggttctctagggaaactctttaattttagatttctgtgcccaccaatgtcatctctacatttttttaatcattggttttgaggactcggtctcacatgcacaatatgttttttgccacctatgggaatgaaaggtcctcaaccctggtcaccagcatcagagtcgtgaggaagctcaggggtgcctggtgagtcttctccagtcagactcaggacagtaacctcaaggggattcccttgtgagaactcacacattttcatgagaacagcaccaggagtcagttcttaaccattcatgaaagacccactccatgacccagtcacctcccaccaggtcaccccttcacaactggggattataatacaacatgagatttggggcaggacacaaatccaaaccatatcagatacacattgtgaaatacgcatggtggtcaggtaatttgtatttctatcacctcacagcgctaccattttattattttttttaatttactgcatgagtgagtgtctgatgagaacacctaagatctaccctttcagcaacaatcatttttacaatacagtattaactataggaccattgctgtacgttagatctccagaactcatccaacctgcacaactgaaactctgtacaatttaacacacatcacccaatttccctcacctcccaggtcctgggacccactattctactctctgctttcaagagcttgaatattttagatcccacatgtaaatgagatcatgcagcatttgtctttctgcatctggcttattcaactcagcatcatgtcctccaggcccatccgtgttgttgcaaatgtcagaatttccctcttttcaaagccaaacaaaatacagatgtatgtatacacattttctttatacattcatccatttacagtcattaaattattttacaaatctacactattattaataatcttgcaatgaacatgtctttggcaaagtaattttatttcctttgcatatataacaagaagtgggatcaccagattatatgatagctttatttttaacttatcaagtaaccaatcctaccacaggatatttccctttcccccacattcttgccaacatttgtcatctgttacatttctgataatagccatattaactagtgtgagttgatattgcattgtgcttctcatttgaattcctctgataattaggaatgttgagaactttttcgttttctgtttgccatgcatgtatcttctgaaaaaaattatccaggtttttgcccttttttatcagttcatttgttatttgctgttgaggtgtatgggttatttatacatttggacagaacttcttgtcagatccataattgcacatagtttttcctgtgctttgttattaaattcaaagaaatcagttccgaattaatggcaggaattttttttgctccatgtcatttatgagtttatggcttcaggtattatgtccatttttagttgaatttttttttttttgggagacggagtcttgctctgtagcccaggctggagtgcagtggcgcgatctcggctcactgcaagctccgcctcccgagttcacgccattctcctgcctcagcctccgagtagctgggactacaggcgctggccaccgcgcctagctaatttttttttgtatttttagtagagacggggtttcactgtggtctccatctcctgacctcgtgatccgcccgcctcggcctcccaaagtgctgggattacaggcgtgagccaccgcgcgcggcctattagttgatttttttatatggagttagagaaggcctaattttatttcttttgcatatgaatgccagttttacaccattattgaaaagactgtcctttctctactgtgtgctcttggcacacaaaatcaggagagacataatgacaaaaaaaaatgagatcaatagtcctgatgaacatagacctgaaagtcctcaacaaaataccatcaaattgaatccagaagcactttaaaatgtgatacatcatggtcaggtgggctttacccctgggatgcaaggctcgttcaatatccacagtaactctgattcacaatgtaaacagaataaaagcaaaaagcatatgattatgtcaatagatgctgagaaagcttccgataggatctaacatctactcatgataaaaaccctcaacagactagacatcaaagaaacatacttcagaataagagccatctacaacaaacccacagttaacatcatactaaatgagccaattaaaacacttatctttataaatgacccagtctcgggtgtttctttacagtgcgagaatggactaagacagcatccaaataggaaaggaagtcaatccgtccatcttcactgatgatataattctatatctagaaaatcctaaaaactctgccaaaataattctagaataaacaactttagtaaagtgtcaggatacaaaatcaatggacaaaaattaccagcatttctataagccaaccacatccgagctgagagtataatcaagaacacaatcctattcgacttacagtatccacaaagaaaatgaaatgcccgggaatacagataacaaagtgaaagatccctacaaggagaactatgaaacacagcatacataaatcataaatgatacaaataaatgggaaaacatttcatgctcatggattggaagaatcaatattgtaaacattgtcataatgcccaaaggaattcagattcaatgctatttacataaaactatcatcatcattcttcacagaatcagaaaaaaatctattctaaaatttatatggaaccaaaaaagaccctgaatatccaaagcaatcctaaggaaaaagaataatgccagaggcatcatgatactgaccttaaactacaccataacgtcttgctaacaaaaacagcctgtactggtacgaaagcagacctgcaggaaaaaaaatagatcaaaatagaagacagaaataaagttgcacacctgcaaccctttgatctttgacaaagctgacaaaaacaagcaatggaaaaaaaaaactctgtgttcagtaaatggttctgggataactggattctggcaggtatgcaaaatgcaagagtgaaggagcctgtgcagcttctacctagatttcagatgtgtagagagccctgcatgcccaggaagaagcctgctgcaggagtggatccaccacagaaagcctctactagagcagtgccaaagatggggaaagatggagttggagcccccattcagagtccccactagggcacttcatagtaaagttgtgggaatgtggccacaaccctcaagaccccagaatggtagagctacgggcagcttgcaccctcagcctagaaaagcttccagcacttgactctcacttgtgaaggcagccccgtggtctgtgcctagcaaacctatagggattggctgcctgaggttttggggacccaatccttgttccagtgtgccctggttgaagtacataaagtcaagagagattattttgtagcgttaggatttaatatctgcagtgctgggttttatatgtgtgtggggcctgttggttgttcctttggccaatttatccctttgggattggaattatttacccaatgcctgcatcatcattgcaccttggaagtaaacaacttttattttttaaatttgcaagctcacagctggagggacattgccttaagactcagatgagactttgaaaatttgagttggacgttgatgaagttaagattttgggcactattgaaaaaaggtgattatattttgcaatgtaagaagaatatgagaactttgggtccgagagtgcaatgatataatttaggggttttcccctccaaatatcatggtgaaatgtgacccacaatgttggaggtggggccaactgggtggtttgggtcatggggaaagatttttcaggactggcttggcatccaccccatggtaattagtgaattcttgctgtattagctactgtgagatctgattgttcaaaagagtcttgcaatcctgctaccctctcatgtaacccctcctcacaatatgacacagccatctccccctttgccttccaccatgactgtaagcttcctgaggccctcacaagaagcagatgctggtgccatgcttctcacacaacctgcagatctgtaagccaaataagcctcttgtctttgtaaatcacttggcctcaggtattaatttatagcagtgtaaaatagactaatacactgcccaaagcaatatacagagtccatgcaatttctatcaagtaactaattaattatgtatttttaaaaatcctaaaatttatatagaaccgaaaaacactctgaatagcaaaagcagtcctaaccaaaacgaacaaagctggaagtaccacattccctgacttcaaattacacagcacaaagataataagaaaggcagcatggtagtggtagaaaaaaaatcaagagcccagatatatagccaaatatctacaaccaacagttctttgacaaaactgacaaaaatatacactggagaaacaaccctctattcaataagtagtgctgggagaattagatagccttatgtagaagaataaaatgagacttctgtatcatcatagacacaaattaactgtgaatatggattcaatgtttataaactcataaaaatacttgaaaaaatctaaaaataatcctctggacattggcctaagcaaataaaatatgactaagacttcaaaagcaaatgcaatgaaaacaaaattagacaaacaggattaattgaaccaaagatcatctacacatcaaaagaaagaaccaatatggtgaacagacaacctgtgaatggtaaaaaaaaaaaaatgtgcagtctattcatcaaatatatagatctacaagtaactcaaataagtcaactagaaataacaacttcataaaagagtgagcaaaaacgagatatttctcaaaagaagacatacaagtgttcaacagaaataaaacatgctcagcatcacaaatcatctgataaatgtaaattacagacaacatgatatagcatcttccaccagtcagaatggctattaaaaataaaacagatgtttgcagagaagcataggaaaaataatgctttttatatgcttgatgagaatacaaattggtacaacctctatgaaaaacaatacagaaatttctcaaagaactaaaattagaattaccatttgacccagtaacccctcctggtgggtatgtttctcccaaaaggaaacttctatataagaaaaagtcacctgcattcctatttttattgcaacactattttcaatagaaaagtcaagtaatctctctaagtgtcaatcagtggatgattaaataaaatatgatagatgtaaatcatggaatactatgcagccataaaaaatgaaattgtgtctttcacagcaacatgaatagagttgaaggacatttcctaaataaaataactcaaattctcttttataattggaaagcacacaatgggtacacatgtacatagagaaaaacaatagacactgggtactgcaaaagaaggcaaggtgagaggaaagtgagggttaaaaaatcagctattggctccaatgttcactatggggtaacagttacatcagaagcacaaacctcacctttatgaaatatattcatgttacaactctgcacatgtgcaccctgattctatgaaaataaaaacagaaaacatgaacagaattgttagactgctagctagattgaccaacaaacaagaaaaatgcaaaagtagcaattctttgttttgtaaccctttctcattttctggtaccataagaaattgtagactatcgtcctatattcttttctgaagtgctaccattagccatttctcaaagaaattctggttccttttttcttttattttctttcattttttttagacagagtctgcaacgtccacctcccaagttcaagcgattctcctgtctcagcctcccaagtagctgggattacagacgtgcaacaccacacctggctaatttttgtatttttagtagagatgaggttttgctatattggccaggctggtcttgaactcctgacctcaaatgatctgcccacctcagtctcctaaagtgttggaattatgggtgtgagccactgcacccagccgctggttccttttacagaagaatagtattaaaaactcatatcttgattcttgatgtactttttgttaatttcttgtagaacatctcaagtaatcaatacaggaagtatttgttgtgtattaacccatatatatatatacccacatctaaacggtttttatttatgttcctatattatgctaaacttgcaaatccactgagataccctaagttaataccacatgaatgattttcaccttccttctatgcctttccctaacctagcactccaaccgtggggaaccccctcccaccacacaccatccattccctttgtagtccatttccaggattcctgtagagtggaacccgattgtgtaagttgtgctcttttgtggaacatcatcaagtggagtccagtgctgacgtgcagtttcttttttctttaatcttatggactacactatttctgaacctacttagtacctcttttgatttcatacattagtataatggcataagatattttctatatagtctgcattccatcctggaattcctaatcacctatttttttaaaatttcttgtggattaagattgtattagtcagtgtcccctagagggacagaacaagtaagatacacatacacacacacacacacacggagtttattaaggagtattaactcacactatcacaaggtccacaataagccatttgcaagctgaggagcaaacaagccagtccaagtcccaaagctgaagaacttggaatccgatgtttgagatgaggaagcatccagcaggggagaaagatgtaggctggaaggcgaagccagtctaatcttttcatgttcttctgtttactttttattctggccacacttgcagctgattagattgtgccacccagattaagggtgtatctgcctttttcagcccactggctcaaaggttaatctccttcggcgacaccgacacagacacacccgggatcaatactctgcatccttcagtgagatcaagttggcactcagtatttagcattacaagtccaccctttgtcaacttgaacccatacacatctcctgagattatacataatcttcaaataaagacaagaataaagtcataattatgcctaataatacaattattcttcttacaactggaaacacaccaatccccaatccaaatggtactacatatgctccactccctcaaggacacagccaggatcatctgatgacttggtgtctagatggcttcagcacttttaattttacctccaatgttagactccactttatcaatgcagatgtagcagaatattttaagacattgatatgctgaaaaattcaacagttcataaaagttgccttcccaccacagccagtggttactactgaataaggacctgccatcctctagggagaagctataatggatggggtgcactgttggtggttatggaaatcgatccatcgtggcaaatggcagcatctttctttgataacattatattctattgtgcatatataccacattgtctttattcatttgtctatctactgacagattttttccatatgtttgctgttattaatagtgtttcaataaacataggatgcagatatcttcacaaggtggtaatttcatctcctttggatatactcccagaaacaggattcctggtcatacaatatttctggctttaattcatttaggagcctttatactgctttccataattgtgaaaatgtagaatggtatagccattatgaaaaacagtttcagttttgaggtatgatctgtaaacaaataatgtttgttatggctctcaatgagagtttctactaaatatgatggaaggtcaggaaggtctctcaccttaaagcagggatggattatgcctcttatttcctaaaagcaaaagattggaagcatgcatgatggaggtggttggcaggtttcaggatgatctcataagaggagaatctgttggataaaactgttgggttttcagtcatagacacacctacactcaatatgaaatgatgaaatcaagtgaggatctagaatgtgttcgcttgaagcaacagcatattctcaaaggcacctattgctccatcacaagggtgatgaacttttgaaaccagtaaagtgtgagagcacagtaagtgataaagttatcacatttacatgaagtttgtttaatgtgccaagggctcgcacagattaatcataaataaacacaatgtattttagcatacatagatgtctagagaagaatcttcttagagaaacttcttcaggttacagaaatctgtgtaagttgtagatctaatggagaagtgtctatgaatactggtctgtttttgaagtatggaaagatgatctcttttggagtaggcttgcgattgtgttgatttcttaattgtttcttgagttgtaacaaaagaaccaaaaaaatgactaaccggagtttcatggctgtgttgataaaaatttttcataagctttctgtcaattatttgagaccagatttcctgatttttttctccaatagatacatgttcacaagatctcaggaaaccacctctcaggtgctttagtttaaaagactagcttcctagaaaaagaagattctgtctaaccatgacaagttggtttcatctgcaaaccatcaagtttgagacctcattgtcaagaatcataaaaattttaactccaatgtactgaaaatcataaatctcgaatttaatgttgataggcattgacaaaatggttcattcttggatgcgtcctatgttgctggctcaacatatcagttaattgagaatcctcacttagctccctctgtttgtagcactgagttgattgtcaatcttcagagtcatccgttgaaggagagtcctgaggttcatgggattcttgtagacactcaggggaacaaaagaaagaaacagaattgagggctgccagccatttccacatcactaggaataattaccatctaagtataaaggtctgcatcattcagaacaccctgcatgacaggctgatgcaaaaaatccaaccctacagaggctccacagcaacctttacagttctttccgggaagaaataatctccaagttaagtgagtcagtaaagctgctctgagctacagtaaaaattggattgggcccgatttgtctgagttcagtgtaattattatactcagctgctgccccaatatagactgaggatggataatttaaatgagcctggctatgtggtttgttatatatctgaactaaataaacataaagggcctgtctggactagcgtgagggtgagagatcctgggagccccagccccccatactcttatctcccttcctccaggaacctctaggttctcagggtgagaatccacaagatccattcatggctctattaccaggagaccaaaatctctgaccttgttcatacagacaaacaggcgaaggacatttttagatccttatctatgtggcgaaaggcaatctatccccattacaagccttaccagcaaccttcctttgtcatgaaaatgggtaaaattagccaataagattacatttaagaaaattttcctgtgatgttccagccagaaaacagcaaaaatcagcttcacacctggagacttcttgcatcggtcacagcccagagaaagaagatcaccatagcattaaaatgcaactgtaagaacatgtaatgcttccatgttccacgcattacgtctcaccagtttagtcaatatggattaaatatgagagtgtggcaattcgcaaactctatctgaggaggaaaatcggataaaaaatgttatgaaaaataaagcaatttgaagcctctgacttcagcaacttcaccactaatgaaatgatgtaaccctcattggcctcaaatttagttttcacggggcatctgcagggttccaaagtgagaccaggtgaattcaatgtgcatgcacttcccaagtgtccacttgtattctgtttctttacttctgtttacagaaagtagacacatattcagtcttagtaccagtgtagggagcgctttccatgagatggataccagaaaaaaatggcaaacatgggatccgttaatataaaaattagccacgatgtatatatatatatgtgtgtgtgtgtgtgtgtgtgtgtgtacacacgcgcgcgcatgtgtgagttgaatagcagagttggagtgggtttctatccacatgtacctgcacctgcaggtattctcaggtgccataatcaactgtaggaccctaaaggaaataagagtctcccctcaacccctgaagagtgtttgggttcaccgtgtgtccaatgattctgtgcctcttgagctccaggaaagggctccctggtgatgcatgagatcttttcttggagtctctctgcagagttcactgggtttcctaaaggcaattcactatttcaaaagatggtgtgaggagcatgtggtgtccctaaaggagaattctgagccagggcacaaccactttatactgagctggatacactggtaggaatatactctgtcagctcagatagaaacctccctgcatggttggggctgggctgcagggggcgctccggatacacccagcacaggctcccgccccagagcaggtgcacaggaggctggggagaggttcctcccagggcctgggacttcctttaaaaatatctaaaataagtatttcacaaagactgctgaagtttgtataaatatctattcaattgtgagcatttatcaaactggatgttgtaatgagaaccacttttacaatggggatttcaaactctgctggaggtcaggaagagatcctttcttataaataaatgcaatttttggataaacacagtcattccctaaataacgcattcacatattatggtctagaaatgatgcaagttgaccctgagacagtcaaatgtggtttcaaagtgaggtgctgtccttgaggagcttgttctccagtgggggaagctctgtcaacacagagttcagggatgtgtaggggacacatggcctctaacaggattacggcttgaaccctcagcttctacagttgtgtcacccatgtgtctgtttctcatactgggtcaggaattgggctattaaatagcatccttcatgaatatgcaattaactgaggtgactatagtatctccgttccctgagagcctcacccaacaaccacacccctcctctggagaagcccctagatcacagctcctcaccatggactggacctgaaggatcctcttcttgatggcagcagcaacaggtaaggggctccccagtctcagggctgaggaagaaaccaggccagtcatgtgagacttcacccactcttgtgtccactccacaggtgcccactccctgcagctggtgcagtctgggcctgaggtgaagaagcctggggcctcagtgaaggtctcctataagtcttctggttacaccttcaccatctatggtatgaattgggtatgatagacccctggacagggctttgagtggatgtgatggatcatcacctacactgggaacccaacgtatacccacggcttcacaggatggtttgtcttctccatggacacgtctgtcagcacggcgtgtcttcagatcagcagcctaaaggctgaggacacggccgagtattactgtgcgaagtacacagtgtggaaacccacatcccgagagtttcagaaagcctgaggaaggaggcagctgtgctgagctgaggcagtggtacagcagttttctgaacttccatagtatctcattttgcattgagttccgctttaatattagccaagaatatgggatagacgggtgctcctaagagatccttaacttgcccattttgatgggttttcccaaagacgtgagaagccacttttttcgcaaagcatcccaaagccatgccctgctccagaaacacgtgtatccatttcctggtctttgattaactgacaaactctcatcagcgcacctgggctaatttcacatcaggtagaaatatgtgctttaaagcaaggctaacgttgtaatagcaattcctgcttaataaccttcagcattgttgttgtgtgctccatcaactaattacgttagttcaaggttctcaatgggagtttctaataaatataagggatgtatagaagttcccctaattaaaacaattgtgaagacaacctcagtgttcaaccatatttcaacccttcaccacaaaggaactttcatctctcctggaagttgggttcattttcaaattagtttttttattttaatatctcaagattattgtatgtgactattttagcagaaagtgaattatgggaacttgaactaaccaactgaaaatacattcagaactaattaaacaagatgccagaatgtgattggctccaggcattttaaattcaacaggttatgtaaccaggctttaaatttgcacatcttcgtgttaccttcatgacacagtcaactcccattatgtaagaaatggtgagtgcattcccaagggtcttgcacagttataaaaatagacttgatgaggtgaggagttgtttaaattcccctctgaagaagcagcatcaacccaacaaaccactctcttccctctgtgactagagctctgtcacaggccacatggacctaaatccttgatggagattacaggactacgtaaattggactgatcgtttttatgctgttaaattaataggtgagtctgcactccagcctgggcaacagaataatcttgtctgtaaaatacaaaagaaagataaattaatagatactgactttgacatttcggataataatattttcataaaccgaatttaattatacccacattgttacctacaccttcactgaaaagttcctagttatgttgagttccatcaacactccacatgttcaaatctggacatccaagagagtctagagaataaaacgcaatgagggcagtgaaacttgcgtatattcagcacctcttaactcaggaggactcaatacaccctggaacactctgcttttctgaatggctcacaatgactccagctcactctccaacctcctcaaacatctggcctctgtttgccctaagttcacgctctgctcttagtctatgttctgaagtctttgtagaggtgaaaatgagctgtcagatggatcttccttctcactgcaacatggaatttgctatttcacttaatgaccactctttccacaatggttgatttcttttggcctgttcattactggtgattttcaagggaatctcagttgaatctttactgttttgcattttgtctccatgacaatgttgggaagtttttcttctagcagcataacatgatctagtgacctgacacatttgcagcaaacaatacctacaaattcagaagctctttggttttctttccacgaaatataattcttgctcttctgtgtatgagcacatcctagcatccctgtacacacccaggtagatgtaaacacgccgatgaaatattccctgtaaataaaaaaagtatctcagtttctctcaatgttcataattctcctgagggtgaggaaggtacttctgggtctgctcaaacaaatggcccagagaccacctggtaggtaggtaaggagctcacctcgctctggatattgagtctgtctctttccctctgtcgtctcatagaaggccagcccacttgttcagctcctaagaagagagcccaggtttatccagattatacaacacaaccagcttctgatgactctcctgttacaacatccatggagatattttgtgtattatataattcaccaaactaatgtgaaatgcccaagttgcaatactgcacaccctagggtatgttcttgcaattcagcggaggagaaattctttcagagacagatggatctgaattggtaaatatgtgggtacgaattctgggtttgagtgtcattgtccagccatgtttcacaggtgtgacctgtcagggaagaaccagagttccttgttctctcagagggtagagctcacagaggtcctctctggttcccaggaaaggtaatttcactaatcttggtgatgagactatcctccagtgctgatgtactatagagttttcatctgaagctgtcactgctatccccaatgtacatcttttcacacagaaatgtttagaggtcaggccatattctcagggttacacattgagaaggatggagatatattctactaccttctcctgagatctcacacacaatctcaaatttcaaaaggtctcagaagggcagctctcaggtactatttaaaaataacccacttcctgggacaggtagcatccttctaaccatgatggatgttctgaactacagtacacattgcatggatccaggtttgtctcaattcactgtgattattacactcagcagctgtttcaatatgtctgaaggggtaaatgacaatttaggtgacctgggtgtatggttggtgttatatgaatctttaaatgtagaacagtattaactgtattccaaaatctgtctttgatccatgatcacacttgtctcccagaccagctccttcagcacatttcctacctggaagaagaggactctgggtttggtgaggggaggccacaggaagagaactgagttctcagagggcacagccagcatacacctcccagggtgagcccaaaagactggggcctccctcatccctttttacctatccatacaaaggcaccacccacatgcaaatcctcacttaggcacccacaggaaatgactacacatttccttaaattcagggtccagctcacatgggaagtgctttctgagagtcatggacctcctgcacaagaacatgaaacacctgtggttcttcctcctcctggtggcagctcccagatgtgagtgtctcaggaatgcggatatgaagatatgagatgctgcctctgatcccagggctcactgtgggtttctctgttcacaggggtcctgtcccaggtgcagctacagcagtggggcgcaggactgttgaagccttcggagaccctgtccctcacctgcgctgtctatggtgggtccttcagtggttactactggagctggatccgccagcccccagggaaggggctggagtggattggggaaatcaatcatagtggaagcaccaactacaacccgtccctcaagagtcgagtcaccatatcagtagacacgtccaagaaccagttctccctgaagctgagctctgtgaccgccgcggacacggctgtgtattactgtgcgagaggcacagtgaggggaggtgagtgtgagcccagacaaaaacctccctgcaggtaggcagagggggcgggcgcaggtactgctcaagaccagcaggtggcgcgcggcgcccacagatcccgaggccgggtccggagcaggtgcaaggagggcggggcttcctcaacagctcagtggtctgtctcctcgccagcacctcagatgtccccaggactctctttctttattatctgtggttctgcttcctcacatccttgtggcagggaagaaaggaggaagacaatttttctgtttactgttgaggtttcaccaattactagaaactttcctacaagttcctgcatgactcattttgccatatatggattctcaccatctcttgatttgtttcatcaatcgaattgtgccctatttgaaattaacttactgaaaccttaaatccaatggatctatactggaattttaatgatgtaattgaggttaaatgtggtcaaagtgtgagaccctaatgcaataaaccgttgtctttataagaagaggaagagacaccagagacctctcacttttcacgtgcacacagagaagaggccatgtggagacgtagtgcactagaaggtggccctgtgcaagccaggaagaagccatactaagaaccaattttgccagctccttgatcttcgacattcagactgtagaattgtaagaaaatcaatatttgttgtttaagccacccaatcctgttgtcttcttacgaagacccaaactgactaataccacctaactctgttagctctgtctcctggagggagaagcagccccctgaggctgggcactgcatctctcagatttccacgtgaagtaggcaaaaatagtagttctcatataaaaatgtgtcatggctctgttggccatttttgagcatggtctctgaaaccagccctggtgtgtgtgtgtaacaaatgtcccttatcttttatttggacataacaaatagacgataggtaccagctggatggagattggccactgatcatcttctgttctccttagtatgtcacagaaaaccacaccaacatcaccagcatcactgtttttcttctaccacctcaaacggactacagaaatgatccctgcagtatggtctatttcttcggctttcgaaatttgcactgaatctcttcctaaatggggagctacatggggtctgagttttgttcctttcttcccagtcttccccaagtaccaaggacagaatagacttaaaatttggccatcaatgcccccaaacaccacatcactttctaaaatccacatcctgcatccatccttctctggacacccctcatcaggctacccaggaatggccagaatctggtatcagcttatgggctgaggccacgagttatacacatgtgtgatttcagtcacacacactctacttcaggaccacacctgtgttctgaggagctcaggcacctgctgatctcagtaattctctaataaatcacacacctcttattaataaaggtccagatggccccatcagctgcagagcagtggagtaaagctcatgggtgggtccatcaggcagaagtcagacaatggaagggatggctggtcacttccattttcactgatgttcgcaatgaattttaatggaataaaacaatattaactacaaagagacagaaaagaagactggctcgtcaagatatttaaggacaaggaactttatttggggggaaagtgaaagacacttctaaatggaaatccctaaagcacatacagcagctgacagagtggccactgtgcacatgagggctgaggagatggatggtagagtccattcctgcaacatgtctctgggtgtgtgatggttagactcctcatgcatatgaatataagagctggactcatggagaaaaaaagggccatatcccataggaaaggaagaaaaaaaaacagatgggcacccctggagagagctcattagatttggtgtgtttaagatgaaaatttcttccaaaaattgtaatgttctaagctaaatatgaatctcttcaataaactgagaataggagaatggagctaggacttgagagaggaaacaaatcttgagagagcagaaagcaaatccacaaaaactgtcacatgacagaggtcagaatggagctgatgtagctacttcactattctgcagacttattgaccatgtggagaaggggcttgaacaaatggagacgttctccaaccttctgaatcagcctccttcttatgcatgagtagaaatcatagttctgggggtgaccttcccaattttcctgtccatacctcttcccccaggggtagagtgtcttcccaaccacaatggtttctcaccagtgttctcagcttctcctccattgtacttaccctgcagattaagaatttcttctagatggagttctttgggaattttctgttttctttagtttctgttgactccaccacacccccataggatacaggttttattggatttcccctggaaatagtgggggtggatccaggcgttcaacagtcctcgctgttcttcccttcctgtcagcaccacaggacagcagataagggagttgactgtggatttttcaaattcctgggaaaagcctgcaaggactagtagattcacactctaataccattagcacatgtatccaaaaagaaacctcactaaatatttccaggttagcctgttcctctctcagtgccatccagtggcacctgccctgggttcacgaacatgtgggccccagtcctctctgctggcatctctctcctcacatttcagtcttctcgttagctctgtgaaagcagctcagatatgttaaaaggttttcttcttcatttattcagtttttcaggtttactgttaaggaggtcagaataagatcatagtttcctcatttttcacatttgcacgctgagtagccactttctatataaaagccagaaactaagggaacaaatcaaatatccatatccactacaggtgaacgttaaaaaatttgacatatgattatggactaaagtacaatgcagaattagaatcaaggcatcctcattctcataaaagcatgtctacattctcaaataactctgctgagtgaaagtagctgaagaattaagagtgcacttcataaacttctaattgtataaactgcagaaggtacaactattctaaagtaacagagcagatttgaaatttgggagaaatgggtgttgaaagtaattgggtggtgagatgaaattacagagaagtgacagaaagatttaggggttaacttaattgtacacaacctgattaaagtttgcacacatacgttaccattttccaaatggtgcagtgtagatttgaattaattattaattgtacttaaagcagtaacaaagaaacaaatgaatatgttggttgaggaggagcaaaaaatagatgggtatgaacactcaaaacatctcagactcttgaaagtacacatgcttgaacactggttttctctgtatactttaggtaaagagcagaatacattaaaagaaaacagagatgtcctggcgggggtggaatcctgcaaacctcactaggcgtgtcccacactgccctggagttgtctcaggggagcagtctcctctagtggtcagagacacaggcatggataatggggctaatactgtccagctgtgtgaccttgaacacattgtataaacactgttccatatgtaatttatcttccttaaaatgtaacattgacacttgcattaaatgtattctacaaatatgtcaaaaagaagatgacgactgctaaatgattatcaaggcacaatcatataatataatgatattttcctgagtgataagatgactaccaatctcccccagggcactttgtttgctctgagccctgcgcctcctcaggattcccatcccagagcttgctatacagtaggagacatgcaaataggtttctccctctgctgatgaaaaccagcccagtcctgaccccacagctctgggagagaagcgccagccctgggattcccaggggtttctatttggtgatcaggactaaagacagaggacccaccatggagcttgggctgagctgggttttcactgttgctgttttaaaaggtgaactagagagattgagcgtgagtggatacccttgagagaaatggtggattatgtctgggagtttctgaccaggatgtctacgagtttgcaggtgtctagtgagaggtacagctcgtggagtccggagaggacccaagacaacctgggggatccttgagactctcctgtgcagactctggattaaccttcagtagctactgaatgagctcggtttcccaggctccagggaaggggctggagtgagtagtagatatacagtgtgatggaagtcagatatgttatgcccaatctgtgaagagcaaattcaccatctccaaagaaaatgccaagaactcactgtatttgcaaatgaacagtctgagagcagagggcacagctgtgtgttactgtatgtgaggcaccaggtaagaggacatcagtgtgaacacagacacagtttcctgcaatgacaagggaggaggctgggctaaaaggggcactcaggacccactgaaaacgggcagctctagggcaggtacagatggttatcatgggctgctttccttcagggtctgtggcctcctctgcatctaccagttcccctcggagcctctggacatttatgtttctgtggccacccctgacatctctggattagaaaagtttattataggaagaggaaacattctcatttgtcccaaagcagatgtaagtaatggaagcaaaaaatgcacaggaggccaggcggggctgtagatactgtcaccccagaatgtcaatctcaccactagtactggagagggaagggagtttgatggaccttccctaacaaccctgtggtccaagataagtccaggaagaccattggtgcctcccagagcacagttgtccatcagggatgtccaatgcgtcccagcagcagccatgcctcagtgtctccactgtgcacagccactgtctgggaggagctcccaggatgggtgtctttggcacacaccaggtggcgggtgttagagtgcagtgcagcagctggctgcctgttctattgggctccctgatgctggagagatgggaggtgcattcgcagggccagcaccctgtttgtgaatttttatataaaaaccctgattttacttcatttttgcagatgacatagataactaaaaacagaatctgcaaagaaattgtaattttcaactttaccccaaattcattgtttcttaattctgtgcaagatccagacatattattgccttcctcatgataatttattctatgtaaaaccgaaatcattttttctcctactctttgtttctgttcaagtacagagatcttgagcaaagtaagttgggttctttccacacactaaccctcaccttccccagagaatgagcagagattgtcctcagtctgagtctaagggaggagctgtttctgcacaactcagagcctgcagagacccccaggtgcagcttcagtgaagtcagacatttctccatgtgggcgacctccagtgcctgtgactgctgctcaggcctaattgttggttaagtattacgacaccctttaggtgatcacatctcaagcctattctgaaaatcaccatgaacagagatagttcaatggccattctcctgacataagtttctctttattacttggttccaagtatggagaaaaatgtgaccctatatttgtctgaatccaacatcagcatccacggcattacgctaggagactcactaattgagcacaagtgagctcgttattctcatagaaatgtaagtatttggaaatttcagcgtgttctccagaacctgtggctgccaacaactgtatttctcggtgcactcttggcctggtgaagccttcacagaacctctccctcacctgtgccatctctgcattctccatcacaaccagtgtttccttctggagctgcatccatcagcgcccccatgggaggtactggagtggatcgggtgcataggtcatggagggagcacagattactcccctcttctcaagagtccagtcaccatctccagatccatgtccaaaaagtacttcttcttacaggtgaactatgtgagcaacaaacacatagccatgtattttagagcaaaagacacagtgaggaaaccacagtgtgaactcatacccaagcctcccctgtgggggtgcataggacagccagggttactcaggacaccaggctccctcaggacaccaaggggcactcaagaccattgtagaggcatgcaggtagctgggggctctcaggaaccatgggggaaaatcaggacaccaaagggtgcttggtacagcagggggctcaggattattgtggggattcagaaagagcaggttcaaggctcaacctcagggcatgtgcagctggtgtgaaaaggggctggatgaggcgttttgtgtcaccatcatgtttcaccaccagacaccctccactacctctattctaatgcatgtgtttgtatgattagaaaatgatattgatataaatatataaccatagctaggtgtgtcaagttgtcctctccatcttatatcagccttgtctgtaaggactaattccccataattacttgagaacctcataaattgtggtcaattatgtaggattcctctctttttctgccttccttcctccctccttctctctctcacacagaaacttatatacagccaccccacaacacacataaatctataacttttattacctgatgtattgataagtaatctaaagttacataaaaatcagtagttcactgtcaatattgtaggagaagggaaggtctaggaaggaggaattacagaacaagaggatattttgagggtaattgacttgttatctatgtggataatgataatgtctatgaccatatttgtaaaattgaacacttcgtgtggagactattatttttttatttaaccccatgccattattttgccgtattctagcatttctctaaaaatacagaaatgttcagcactcattcatgtgtatattcaggagtttctgacttttcatgtattttatttatctctgtctaattgctttgataccaaattttacctagtataattagtactacctttagcactgattataagtctcactcctccatcatctccttttttgccacacaagctgaatctagtttggactcataggagctgcttcattcaatgccagtgggagtttcaaaccctatcaacccccctataaactgtcattaagaaagtttatcaaactccaccagtcatgtgatattagttcgttttcacagtggtataaagaactacctgagacgaggagtttacaaagaaaagaggtttagttgactcacagttctgcatggctggggaggccacaggaaacttataatcatggtggaaggtgaaggcgaagcacggcacatcacacagggcagcaggagagagagggggaagtgacacatagttttaaactatcagctcttgtgagaactcactcactatgatgagaacaacatgggaaaactgccctcatgatccaataacctctcacctggtccctcccttgacatgtggggattagaatttgagatgatatttaggtggggacacaaaacaaatctatagcacatgtccagctgtgtcctggagttgtttcagggatccagtgtgtactgttgatagaaacagtgatcatcattctagccggtgtgagatggtatctccttgtggtttagatttgcatttctctgatggccagtgatgatgagaattttttcatgtgtcttttggctgcataaatgtcttcttttgagaagcgtctgtgaaaaaaaaaaagaaacagtgacaccaagctcacaccatccgttgtagttgacaacatgcaaagccaagagatctcaactgagatttagtgtgtgtgtcatgtctgatgaagtcataagctcagagcaagtgaatatggaaaagtgtattatctgcacagtgtaggtgtctgctgagtgcagggcaggtctcgcaggaaaatctaaaatggcttgaaagaagaggaaaggagactggctcagggtttttataatggtttagtggtggtggcacagtgaggcttcccactcacagatcggggtttataaggtttgaaactcccactgccattgaatgaagaagctcctgtgagtccaaactagattcaccttgtgtggcaaaaaaggagatgatggaggagtgagccttaagtaatcaacaggcatgcaccaaaagatagagcgacaacttattctaggtagcaagaataaaaataatgaaaaagaaataagggttcagtatgggtggacaagacccagatctacagaaatgagatgactttagaaatataaggaaataataatgagaaaaagaaggaggggatggggaattagggtcctggcctaatgtcttgggtagaagcttctcacaatcaaggactatcagcttattctgcaggtcttgggtcacacgtctgcttaaaaacatcagaaatgccaggcaatcaatgaggatgctcagtttagcatctcctatttgagtagatttacagttgtgtggaattcttaattgattctttttggtttgtttttagaggcaggctctcacactgttccacagcttaaagtacagttgtgtgatcatagctcactgtaattttgagctccggactcacgtaatcttcctgtattagcctcctgaatatctagaattagaggggaacgccacccctcacctgcttattctttaaaatattttttcatagaaatagcatctctttatgttgcccaggttggcttcgatttcctggtctcatgtgatttccctcactttgcttctgaaagtggtgtgattatagggaagatccactgcatctgtcctgaattgattcttcagttgtaaaacatgaagccaataattaactgcctgactgttttgtgcagtgagttagttaaaagtttctgataagattccttccaatatgattcaagagcagtattttctgctgatgttcctttcagtttccttgttgaagatcagaagacactgcggaaaagatgtagtaaaaaggcagttttaactcttcatgattggagtggatatcacataggaatccctttccgtattttgtaacacatgcatgcaatagaacaaagatgatcccttggtgtaaaatctataaacgtatgggccttttagctaccaagtcatagggtaataactgatggaccctgaggagtgaaccatgattccatagtgctagtgggagaacccttggccaaggaagtttacattttattaaaattgataatttttatgtagcgatgccattttttaaacattcccagaaggttgtgagtgggattgactctgtcttctgtgaacaatgacagtgccctccatggttagataatattttaaactagattgagctagagtggtttctgtattgaatcactatatttttttagcttcatgttagctttttgtgtgttagcatttgctttaaaatgatattaatcagccctctagtaggtagaaattcatctgagggtttcttcccttgttgtccatctcaataggatttccagaagacgtaagaaccctctctgtttctaaaaatattccaggctgggcgctgtggctcatgcctgtaaacctagcactttgggaggccgaggtgggtggacccctcgaggttgggagtttgagaccagcctggtcagtatggtgaaacctcatctctactaaaaatacaaaaattcgccgggcatggtggtgtacactcgtaatcccagctacttgagaggctgaggtgagaggattgcttgaaccctggaggcggcggttgcagtgagccgagattgtgccactgcacttcagcctgggcgacacagcgagactccgtctcaaacaaaacgacacaaaaaattccaaagttgtgcaccctctaaaagcatatgtacttaattctcatttttaatttattaaacatctctaataagttcaatgtttcctgccttctgagttgatttcctaacacatagaagaatatatcctaaatgaaagtttgtgttcttaatacaaattactagttaataacctttacttttattattgaggtattatacatcaatgttaatcaatcctctcaatgggactcttacctaaagaatatataaaatattttcctgatcatgacatataatagatgtgaacacattcttagcattcagccatgtctcttgtctattaatattataaaccacatgctaactttgattttattggtaattgttctaatttcttttttttcccacttctctggttgttttttttttaactttaagttttagggtacatgtgcacaatgtgcaggttagttacatatgtatacatgtgccatgttggtgtgctgcacccattaactcgtcatttaacattaggtatatctcctaaagctatccctcccccctccccccaccccacaacaggccccagtgtgtgatgttccccttcctgtgtccatgtgttctcattgttcaattcccacctaggagtgagaacatgtgttgtttggttttttgtccttgcgatagtttgctgagaatgatggtttccagcttcatccatgtccctacaaaggacatgaactcatcattttttatggctgcataggattccatgatgcatatgtgccacattttcttaatccagtgtatcattgttggacatttgggttggttccaagtctttgctattgtgaatagggaattgttctaatttcaaactagttaatttttatcttcatgcagctagattattatgtgtggctatttattccgagagggataaagacaacattaacaattttcactgcaggcatgtctaggcaactccctgtgcactatgaccctgggacgttggagattctatggggactcttccctacctgcctaggagagttctctgccttctacctctagcattttcctctttgaagaagtacatctaactgtcattagaatagagacaaagacaagtcttaactgcttccagctgaggagggatgctgtttggggaagatctctcttggaggtctaagggaccccaggaaaagggagccattatcccaggcttcagttgcatgaccatttggagtttgatggtctgaaaatgagaagaggcaaatctggttattagaagacatgtatgaaaaccaaacaaggtggcaaggacagcttgaaagaaaattccaaggctgctgacattcctagataactgcagctgtagttatgcctgctaaggtttgggcgcatggggcttggcttttgtcagctccctgggatttattttcccaaacaaagaaacctccaggttaggggcaccctattcattcccatcacctggcatgatttaaaggataattgcttagaattaaaatattgatccagattttttatattccccatcgctttttgtttcttctgggctgtagccagagatcattgattggcgctcaggaataagcagagttagtctaaaatgcaggcaaatacttaaacaactgaagagattagaatttaaagacaagtgtatgatatgttttgaaatacaatgtttctctttccagttttggtttttgtcggcagcaaataatgataagactgagttgtttgcaaaataaactttagtcttaaacttggcctgattatttgcataaagtgcagcaagaatattaataataattctgtaggaaaagcctgcaagcaccaggagcttcacagtctaacactatgagcacgtgcatcctcacgcaactcactgaatatttccaagccagcctgttccgatcttaaatgccatccagtggcatctgccccaggtacactaatacatgggtcctgcttctctctgcagcctcctctctcctcagatttcaggttttgtttattgtttgttttctctctgacatcaacacagatatgttgaaggttttcttttttttatttgtagttgttcagctttgttgttaatgaggtcagaataagctcatagtttacacatttttacattcccatgccgagtagctgcttttctctatcaaatccattaactgagagaacaatcacatttcgttacaggtgaacagttaaatagtttggcatatatttctgtgctggaatctaatgcagcttgaaatcaagtcatgcctcactcattgaaaaaaacatggctaaattctcaaagaattgtgctgagtgaaagaaactaaggaattaagagtaaattttacatgatacatttgtagaaattttagaagatgccactattataaattaacatggagaagatttaaatgtttctgagaatatgctattgggagtaatggggatgtgagttaaatttcagaggaataagagaaagatttagggattaattttttcaaaccttgattgaagtgctgagtaaatggttgcaaacataggtctacatttttcaaatcattcaccataaatttgaattatttattaattacactcgaataaagcaataaagaaactgatgagataatatttgactgaattgcatcaataaatagatcgatattaacacaaggaatataactgatttccaaaaacatacacatgaaccatggttcactctgcgtatttagataaattacagaaagttgtcataacagatggggaatcctgcagacttcactaggcatgggccatgctgccctggagttgtctcaggggagctgcctcctccagaggttagagcacaggcccaggtaataggactaaatttttagatgtgttatcttagacacactgcacaactgctgtgttctctatgtaaattatctcctgtaaaatataacattgaagcctgcattaaatatattgtgtaaatatgtaagaataaaagaaagttatgagagctaagtgttaatcaaggcacaagcatataagatataactatattttcctgaatgatggaattactaccagtctcccccaggacacttcatctgccctgagcccagcctctcctcagatgtcccacccagagcttgctatatagtgggggacatgcaaatagggccctccctctactgatgaaaaccagcccagccctgaccctgcagctctgggagaggagcccagcactagaagtcggcggtgtttccattcggtgatcagcactgaacacagaggactcaccatggagtttgggctgagctgggttttcctcgttgctcttttaagaggtgattcatggagaaatagagagactgagtgtgagtgaacatgagtgagaaaaactggatttgtgtggcattttctgataacggtgtccttctgtttgcaggtgtccagtgtcaggtgcagctggtggagtctgggggaggcgtggtccagcctgggaggtccctgagactctcctgtgcagcgtctggattcaccttcagtagctatggcatgcactgggtccgccaggctccaggcaaggggctggagtgggtggcagttatatggtatgatggaagtaataaatactatgcagactccgtgaagggccgattcaccatctccagagacaattccaagaacacgctgtatctgcaaatgaacagcctgagagccgaggacacggctgtgtattactgtgcgagagacacagtgaggggaggtcattgtgcgcccagacacaaacctccctgcaggaacgctggcgggaaatcagctgcagggggcgctcaggagccactgatcagagtcagccctggaggcaggtgcagatggaggctgtttcctgtcaggatgtgggactttgtcttcttctgacagttccccagggaacctcttaaatttagaaaactgtgcctaacaatgtcttctctatgcatatgaggaccttttctccctggcacaaaatgcagattgacgctgacacggatgaaaattcctcaaccatggtcacaaggatcagagtcctgagtaacctcagggcttcctggtgattcttctccaatcagacccaggacagggacctccgtgagattccctgactggaacagtctttatggatcctggtcacagacaatagagaggctgaaccagggtcagcgtcatgtagaacgtcacagatttcacgtctgatccttctcctgacacgaaagtatgcaaatcagtatcagcaccgatctggtgcttcttttgttcctaatccatttactttcttttttcgtcgtttttctcctttttccatttgtttttcctgctttttgcaaaaggaagatgttttccctgtgagatgcaggggatgacaattttgggagatggctggaacatccaatatcctcagggccgaccatcagtaagtgcaggctagaagtctcagaaagagctgaagctgcttaatcaccgtggagttttaccttctccagttctgctctgatggaatcagggccaagcaggttatcaatgataatctacctaacatagagtcaactgattccagtttcaataacgtctgttaaaaattcacaccaccacctggattactgttttgtcaaatcaatacacagtattgtccagctaagtagacccaaagacggaccgttgcccatggagaaaaacattaacctgagttctaggttcttacagtgttaaaggtgtaaaactgattattaaaaatgaggctatttttctttttgctgttgagttgtagaagtttcttttccattttgacatgaaaactttttcagatatatggcatattatccaattctgtaagttgtagttattttgttgctttgcagaatctttttcataatctattcccacttgttcaattctgcttttttttgtaggtgatttgaatgtaaaatcctgaaaaagattgctaattttttgagtgttgagagttttacaattagaggtattacagttagatatttgaggcatttggagtgaatttttgtgtttattctaacctaaaattcttaattcttttcatgggaaaatccagttttcataccaccctctttggaagacactacaatttagccatgttatattgatggttctcatgctaaaaatcagcttgtcatcaatatgtgggtttatatctaagctctatataggtatttaagccaaaactttctatgtttttaataaatgttgaggcctggaagtgaaatgcctaaagctttcttcttgccttgttacagatattgtaccaaaatattctaaccttttactattgagtgtaataatagctgtggcctttcttaacggcttttattatgttcaagttgttttcttgtcttcctactttgttcatagttttaataatgaaactgatttttttcaaagtctttttctgtgtctgatgaaatgttactgagatattttttctttagttttttaatgtgtaccaaactgattgatttgagaatgttgaatcaagtatgcatctcaggaagaaatttgagttggtcatggtgtatgtcttctaaaacactttggagcttagtttactattgttggggattaattcatgtctactaatgatattggtctgtagtttcctttattgtggtgcctttgtctattactggtaatactatcatggtagtctcatagaaagagtttagaaggtgtatggcagactacctttaaaatagattttatcagtggagaaatggtgatagttttttcttcacttttctgttgggaagaattttatgttgtttaaaagatattcagaatgacttaacctggtttatgagctttcattctattcctttcttccattctttttgaagaactgcttacctttcctatttatttttaagtttgtttttagacatatgcaatacattttgaggtgaaacctggtggaattttttccaataaattagtaaaaataaatcatttaattgactattttattcaggttgatttgtttaatatttgctaaaggccagttctttaagctatgacacataataaatcccaaatggcagtacctcattgtttacttagcttttgtacttatatttttcagaggaagaaccactactgtaaattgtaaatagccaatacataattgtattgtatgcaaatctgtgactgtttacagtgtcatctctgagaaacataaagtttatttactatatatatataaagagtttggaaggtggactccaccaatttttgaaagagttacagaagggctgctattacttctttaaatgttaaggttccattttatgatgtaacagataacctatcatggagaatgttcaatgtgttccttgagaaggatgtgtattacgtgactcttggttggaaggttctgtaaatatcattcagataaatttgttcaatagtgttgttcaagttccagaggcacattgagaattttctttctggatttgctaaacattatggtcatgaggtattaaggtcttgtgttatttttgtattgttttctatttctttatatctcttacagtttgcttaatgcagttatatttgtatttgtacacatgtgtaaaaacaaaaatcataattgctaaatgagttttatggcacagtcacattataagtaatatttttccaaatgctaccattgccactaaagtcctcctggagtctgacgtctgctctgggcactgccttcttctcaggcgtcccacactggagcttgctatagaggaggaggcatgaaaacaggcccctccctctcctggtgaaatcaagcccagacctgaccctgcagctctgggagaacagccacagccctgggattcccaggggtttccatttggtaatcaggactgaacacagagaactcactatggggtgtgaattaagctgaatttttcttgttggtattttaaaaggtgactcctagggaactagagtgagtgagagtgagtggatatgagtgagagaaacagtggatatgtttgccagtttctgaccaggatgtgtgtgtattttcaggtgttcagtgtgaggtggagctgatagagtccatagaggacctgagacaacctgggaagttcctgagactctcctgtgtagcctctagattcgccttcagtagcttctgaatgagccgagttcaccagtctccaggcaaggggctggagtgagtaatagatataaaagatgatggaagtcagatacaccatgcagactctgtgaagggcagattctccatctccaaagacaatgctaagaactctctgtatctgcaaatgaacactcagagagctgaggacgtggccgtgtatggctatacataaggtcccaagtgaggaaatatcggtgtgagtccagacacaacatttcctgcaaaaagaagaaaggagtctgggccgaaggggacactcagcactcacaaaacaggtgcagccccaaggcaggtgcagatggagggagggtaagggctgctttccttcagggtctgtggtttcctctgcttctaatatttcccctctgaacctctgtatatttatgttttgtgcccaccatgaggtccctggattagaaaactaatttaaaagaggaaatattctcatatgtcccacaaacagatgtaagttttggaggcataaaaatgcataggagccgcgtgagtctgtagacactgccaccccacaatgccagacccaaaactagtgctggagaagggtgggagtttgatggagcttccctgatgaccccgtggtccaagctaagtccagcaaggccattggtgcctcgctgagcacagttgtccatcagggatcctcccatgtgtcccagcagcagccatgcctcagtatctccactgtgcacagccatcgtctgggaggagctcccaggatgggtgtctttggcacacacaggtgatgggtgttagagtgcagtgcagcagctggctgcctggtctattgggctcctggatattggagggattggaggtgcattctcaaggccagcacgctgtttgttaatttttgtataaaaaccatgtgatttaattcattttctcagatgacatagataattaataacacaatctgcaaacaattgtaattttcaactttaccccaagttcattgtttcttaattctgtgcaggatccagacatggtattgcccttctcatgagaaattgttcgacctaaactgaaaccagttgtttctcatatactttggttctccccacatgcagagatcttgattagagcaagtttggtactttccacgcactcaccctcacctccccagataaagagcagaagttctccttagactgagtctgagggaggagctgttcctgtaccactcagggcctgcggagacccccaggtgcagcttcactgagtcaggtgtttcactccctgtgattgctgctcaggtctaattgtgggctcagaattaggacagtcttcaggttatcacagatcaatcatattctaaaaatcatcattatcacacaccgtggtaataattcaatgttcatttttctaaacagcagtttctcttttttatttggttgcaagtttgaggaaaggagcatgtgataatactttttaatctaacctcaaaatctactgaattgttctaggagactcacaaattggacaagagtgagctccttgtgctcataaaaaatgcatgtatttgggaatttcaccgtgttgtccagaaactgttaacatcaacaactgtgttttccagtgcacttctggcttgagacatcctcacagaccctctccctcacctgcactgtctctggattccccatcataaccagtgtgtcctgctagaattgtatctgcttgcccctagaagatggacaggagtggatcaggttcatgggttgtaaagggagcaaaaattacatcccacttctcaagagtccatatccagatccaagaaacagttcttacagctgagctctgtgcccagtgaacacacaactacacattttgaagcaaaagacgcaatgaagggccttcattgtgagcctagacacaaacctccctgcaggggtgaataggagcagcagggggcattcggggcagtatgggggcttagcatgattgttgggggtcaagatgagcaggatcaaggctcatcatcagggcaagtgcaacagggcagaaaaggggctgtagatgtgggttgttctcaccatcatatttcaccaccagacaccctccactacatctcttctaatgtgtctgagtgttgatatgattagaaaatggcatttatgtaaatactaatgtatacccaaatggaggtgcatccagttgtcctctccatcttatgtggaccttgtccatcaagggctaagttcctgtatttacttgattacctcatacattatggtcaaaacaggtagggtctcattttggcatggtctctcctcctcccttctctctgtcgcacaaaaacacatgaactgacacacacagagcttcccaacttcaattatctgatgtattgaagcaaattgattagtgtgcagcttttctgctttgcctgctattcatgttatgtaaaaataagacccgtgtgtttctcagcttgttacttctctaagctaagtagcatctttgtttattatacccagagaccaaaagcgattcagctgttattcagcagcttaactggtaaacaaattgtggaaaattcatttactggaataatacccactgttacaatgaagtactgctggatacactcagtaccatgcttaaaataacaagtacctgaataagtaaaataagtcaaacaaataaaagtgcatacatatgattccacttctataatttctataaagtaaaaatgaacttaaagttacataaaaagatctgtagttgactggggacatggtacaagaagagaaggtatagaaaggagaaacgacaggagagcaaaaggaaatttctaggataattttttctctgttagtaaaagtgaggattatgtcactatttgtaaaattgtacactttatgtaaaggttcttatttgctaatttcacctcattaaaatattgcaaattttaaaatatctaatttggtagaaaaggtagtagagagagatgaataaaatacataaaattcagagagtcctgaatacacacatgaatggaccctgggtctcactgtacttttagggagacactagaatacaaaaacataatgacaggatttcagtacatgaaaggagcttctcagaccccaggaggcctgtccaactgcgtctgggagttaactcagggagcaggcatgtcctttggaaggagcaatgacaccaagctcccagcatccattgtagccgacaccatgccaatgccaagagatctcgactaaaattttctgtggatgttgagtgtgattatgccacacactcacaccaagtgagtatggaaaggatagttacctgcatccttaaggtgtctgctgagagcagggcaggtctctcattaaggtccaaagtggcttgatagagcagggaaggagactggctctgggttgttatcatggcttggtggggagcggggcagagcatcctacttgcaggaagggttttgtggggtttcaaggtcaaattggcatcaaatgagggagctcctgtgatttctaactagatttaccttgtatgcttaaaaaaagagatgatggaggaatgagcctgaagttatcagcagtcaggcctaaacacagagtctgatgacttactctaaatagcaagtatacaaatgatgagtaagaaaagagacaagactccaatatgggtggacaacagccaggtctgcagaaaatgagaagactgtttataagcaaagaataatgagtaggatatggaggaggattctggtccaatgtcttgtgtggaagcttctcatgatttgagatcatcagcttattctgaaggtcttaggtcacctgtcttcttcaaaatatcagaagtgcctgatgatatgtgaggatgcacagtttaacttcctctatttgagtagctttacaattgtgtagagttcttaattaattaatttttttttttggagacggagtctcactctgttgtgcaggttggactgcagtggtgtgatcataacatagctcacggtgatttcaaattcctggctcatagaatcctcccacctcaacctcctgactagcaagtagctaggtttccagggcccttcatctacacttggccggttcttttcattctttttttttttttttaggtggagtttccctcttcttgcccagactggagtgcaatggtgccatctcagctcactgcaatctccccctcccaggttcaggtgattctcctacctcagcctccagagtagctgggatcacaggcatgtgacaccatgccccgctaatcttgtatttttatcagagatgacatttctccatattggtcaggctggtctcaaactccctacctcaggtgatctttccacctcagcctcccaaagtgctgggattacaggcgtgaggcaccgcaactggcctcttcatttttattcatatgttccttcagcagccactatgtcttcccactgatttcttcagtttctgccttttccttttgaataaggcattattcctaagggaagtcgggaggtgggcctggacagggacttggtgcattcctctctcccgtcccagttcttattggtttctccagtggctgtagaacagcagttttgatggctttacctctgcagataatttctcttgcaatgtagtgctgatggggaggtgtgtctggatgcacttcacctatagttgctgttttgctttcccagacagcaccatcccaaggggtagagggtggagcattttgtgatgtatccccagtactgaagaaaaaggcttcaatagcaggaggaattcctcaactgtatacactctgagaatttaaacaataacttctctatcatactcaaattgaaaccatccaatgaatatgtctactttaatcgtgtgctaacttaaatggcatttggcagcctctgtgccagaaaagattatcatctgctcctgtttatttccctgcaagtccttatctctcttcagatttcagatatattgtttgtcctataacatcaaaaatttgatgtatatgtgctaatttgcagatcagtaagtttagtagctgttgtaagaataataacatatttttatggggtgcttacatctccaagctgagaagcacctctatgtgtaatactaagaaactagaaatgatacaaatatcaagaagatacgtagataaaaagtaatggcatgctaatttactgtaataacatccatcatgagaatcaatacattgttgatgctcaacatgtttgcatcataagtagttatgtgcgagaagccacacaaatagaacacatactatataattcctgtataattcttgaaactcaaaactaaagcattaaatatgaaggactgactcagaatatggtggggaagaaaatatttgggaaggaggaattgtagaggaacacaaggaaacttttaagtgtaatttgtttgttcattatttggatggcttttggggatgcaaaggtgagcacgagtggaataacattttgttttgtttgtttgtttgtttttctgaagagatgtggtccttctctgtgacccaggctggagtgtagtggtgggatcatagttcaatgtagcctctaacttctggtctccaacaatactcctgcatctgccatctaagtagctggaactaccgttgtgtgccaggaggtttggcttggcttgagtacttattaaaccacacactttttgcaatatttaatgtatagtaataatgtctcaataagactattacaaatcaatgaatgaataatttgttcagtacagattcatggaaaaatagacactaacatgatgagtgtctgacatttatgaaaatacagctgcatgaaatgtgcttctctttacattcattaggtaaacacaatagtgcatacacatcacaccgtgctttcattacaggaagaaagttctgaaaatgtcactggggtgaaccacacggtgctgggcttggttcagggagcagtcaggcccagtgttgtgaccttcaaccacagaatccttaaaaaaaaaaaaaaaaaaaaaaagaggctgcctcaaagtccgcatcagttcccggactcgctatgtttctggatcgtatcagtgcatccggatctccctggtggctttagtgattccttgcttgccatgctgaggtctcgctgtagattatgttgggttttctaagaccgttttgctattgtaagatccactccctgggacagagcgattccctctaaacctgatagaggttctgaactaaaaataacattaagtgaatcctggtgtgtctgaactcaagtgattgttacattaagctgctgttccaatctgtttcctcacctgggaaaagaggagccaggacatagtgagttgaggccccaggaagataactgaattctcagagggcacagccagcatcctcctcccagggagagtctaaaagactggggcctccctcatcccttttcacctgtccatagagaggcaccacccacatgcaaatctcacttaggcacccacagaaaaccaccacacatttccttaaattcagggtcctgctcacatgggaaatactttctgagagtcctggacctcctgtgcaagaacatgaaacacctgtggttcttcctcctgctggtggcagctcccagatgtgagtgtctcaaggctgcagacatggagatatgggaggtgcctctgatcccagggctcactgtgtgtctctctgttcacaggggtcctgccccaggtgcagctgcaggagtcgggcccaggactggtgaagccttcacagaccctgtccctcacctgtactgtctctggtggctccatcagcagtggtggttactactggagctggatccgccagcacccagggaagggcctggagtggattgggtacatctattacagtgggagcacctactacaacccgtccctcaagagtcgagttaccatatcagtagacacgtctaagaaccagttctccctgaagctgagctctgtgactgccgcggacacggccgtgtattactgtgcgagagacacaatgaggggaggtgagtgtgagcccagacacaaacctccctgcagggaggcggagggggcgggcgcaggtgctgctcaggaccagcagggggcgcgcggggcccacagagcatgaggccgggtcaggagcaggtgcagggagggcggggcttcctcatcagctcagtgctctccctcctcgccagcacctcagctgtccccaggcctcctctttctttattatctgtggttctgcttcctcacatccttgtggtaggaaaggaaggaggaaggcaaattttcctcttacagtcaaagtgtcactaattactaggaactttcctacaagttcctgaatgtcccatttttccttcttaattaaaaaaaatatatattctaatacttctcaccatctcttgatttgtgtcatcagttgaattgtgctgtctttgaaattcaaatgctgaaaccttaaatccaattgatctatattggaattttaaggatggaattaaggttaaatgtgatcataagtctgagattctaatgcaatagatctgttgtctttataagaagtggaagagtcaccagagacctctcacttttcccgtgcacgcagagaagaggccatgtggagacatagtggactagaaggtgcaagccaagaagaagccgcaccaagaaccaaccctgccagcacctggaccttggacattcagacttcagaatggtgagaaaatcaatgtttgttgtttaagccacccactcctgttgtcttcttatgaagacccagacagactaataccacataactctgttagctcctggagggagaagcagctccctgaggctgggcacatctctcagatatccatatgaagtaggcagaaatagtagttctcatataaaaatgtgtcatggccctgttggccatttttttttgacggagtctcgctctgtggccaggctggagtgcagtggtgcaatctcagctgactacaaaccccgtctcctgggttcaggcaattctccttcctcaacctcctgagcagctgggactacaggtgtccaccaccatgccagcctattttttttttgtatttttagcagagacagggtttcactgtgttagggtggtctcaaatctcctcactgcatgatctgcctgcctcggtttcccaaagtgttgggattacaagtgtgagccaccgcacctggcccctgttggccattcttggggcaatgtctctgaaaccagccctggtgcctgtaccacaaaattttcttttatctttcatgtggatataacaaatggacaatgaggaccagctgcatggagactgaccactgaacatcttctgctgtctcctaagtaagtcacaggaaaacacaccaacatcaccaacataactgttttccttcaacttcctcgaacgaactatagaaatgatcccttaaagtatagtctattccttcaactttctcaatttgcactgaatcccttcctaaattaggagctacatagggtctgagttttgttccctttctcccagtcttccccaagtatcaaggacagaatagatttaaattaaatttggccgtccatgcccccaacaccacatcggtttctaacatccttgtcatgtacccatccttctgtgggcaccccacatcaggttggccaggaatggccagaaggtgtcatcaccttatgggctgaggctacaagttatacacacgtgtgatttcagtcacacacactctactgcaggacacacctgtgttctgaggaactcaggcgcctgctgatctcaggtcttctctaataaattacacacctcttatgaatgaaggtccagatggccccatcagctgcagagcagtggattaaagctcatgggtgggtcagtcaggcagaagtcagacaatgggataatagaagtcagacaatagtcactgaggttcccaatgtattttaatggaataaaacaatattagcaacaaaggggcagtaaagaagactggctcttgaaggtatttaaggaccaggaactttatttggggggaaagtgagagacacttttacatggaaagccctaaagcacatacagcagctgacagagtggccactgtgcacatgagggctgaggagacggatgataggttacgttgctccaagatgtccctgggtgtgtgatggttggactcctcatgcatatgaaaataagagctggactcagggagaaacaagggccataccccatagaaaaggaagaaaaaaagcagatgggcacccctggagagagctcattagatttggtaggtttgagatgaaaattacttccaaaggttttaatgttctaagctaaatatgaatctcttcaataaagtgagaattaaaagaagaatggagctaggagttgagagaggaaacaaattatgagagagcagaaagcaaatccacccaaactgtcacatgacagaggccagaatggagctgatgcagctacttcactattctgcagacctagttgaccatgtggagaaggggttcgaacaaacggggatgttctccaaccttccaaaacaacctccttcttatgcatatgcagtaatcatgattctcagggtggccttcccaagtttcctgttcttacctcttcccccaggggtagagtgtcttttccaacccacagtggtttctctgccatgtcctcagcttctcctccattgtacttaacctgaagattaaggatttcatctggatggagtttcctgggaatcctctgttttctttggtttctgatgaccacatcacaggccataggacacaggttttagtggatttcccctggagacagtggaggtgaatccaggcgttccacagtccttaccgttcttctcttcctgtcagcaccgcaggacagcagataagggagctgactgtggatttttcagatccccgggaaaaagcctgcaaggactaatagtttcacatctaacaccattagcacatgcatccaaaattaaaaaaaaaatcctcactaaatatttccaggttagcctgttcctctctcaataccataccgtggcacctgccctgggttcggtaacatgtgggccccagtcctctctgtaggcgtctgcctcctcagatttcagtcctcttttttgctccgtgaaagcaactcagatatgttaaaaggttttcttcttcatttattcataatttttcaggtttgttgttaatgaggaaagagtaagatcatggtttcctcatttttcacattcccatactgagtaactgctctctctctatgaaagccagaaattaagagaacaactcaagtatccatatccattacaagtgaatgttagacaatttgatgtatgattatgaactaaagtacaacacaggattagaatccaggcatcctcattctcataaaatcatggctgcattcacaaataactgtgctgagtgaaagtagctaacaaattaacagtgcacttcataaacttctatttgtataaactgcagaaggtacagctattctaaagcaacagagaagattacatattggtgggaactgggttttgaaagtaatggggtggtgagatgaaattacagagaagtgacacaaagatttaggtgtgaattgtacacaaattaattgaagctctgattaaagggttgcacacatgttaccattttccaaattatgcagtatatatttgaattaattattaattgtatttaaataaagcagtaacaaagaaacaaatgaatacatttattgaggtggagccaaaactaaatgggaatgaacactcgaaacatctctgactcttgaaaatacacaagcgtgaacactggttctctctatgtatttcaggtcaatagcagaatacactaaaagaaaacagagatgtcctggcaggggtggaatcctgcagacctcactaggcatgtctcacactgccctggagttgtctcaggggagcagtctcctctagtggtcagaggcacaggccgagataatggggctaactctgtccagctgtgtgaccttgaatgcattgtataaacactctgttctctgtgtgatttatcttccttaaaatgtgacattgacacttgcattaaatgtattctacaaatatgtcaaaaagatgatgactgctaaatgattatcaaggcacaatcatataatataatgatattttcctgagtgataagatgactaccaatctcccccagggcactttgtctgctctgagccctgcacctcctcaggattcccatcccagagcttgctatacagtaggagacatgcaaataggtttctccctctgctgatgaaaaccagcccagtcctgaccgcacagctctgggagagaagcgccagccctgggattcccaggggtttctatttggtgatcaggactaaagacagaggacccaccatggagcttgggctgagctgggttttcactgttgctgttttaaaaggtgaactagagagattgagcgtgagtggatacccttgagagaaatggtggattatgtctgggagtttctgaccaggatgtctacgagtttgcaggtgtctagtgagaggtacagctcgtggagtccggagaggacccaagacaacctgggggatccctgagactctcctgtgcagactctggattaaccttcagtagctactgaaggaactcggtttcccaggctccagggaaggggctggagtgagtagtagatatacagtgtgatggaagtcagatatgttatgcataatctttgaagagcaaattcaccatctccaaagaaaatgccaagaactcactgtatttgctaatgaacagtctgagagcagcgggcacagctgtgtgttactgtatgtgaggcaccaggtaagaagacatcagtgtgaacacagacacagatttcctgcaatgataagggaggaggctgggctaaaaggggcactcaggacccactgaaaacgggcagctctagggcaggtacagatggttatcatgggctgctttccttcggggtctgtggcttcctctgcatctaccagttcccctcggagcctctggacatttatgtttctgtggccacccctgacatctctggattagaaaagtttattataggaagaggaaacattttcatttgtcccaaagcagatgtaagtaatggaagcaaaaaatgcacaggaggccaggtggggctgtagatactgtcaccccagaatgtcaatctcaccactagtactggagaggcatgggagtttgatggagcttccctaacaactctgtcttccaagataagtccagcaagaccattggtgcctcccagagcacagttgtccatcagggatgtccaatgcttcccagcagcagccatgcctcagtgtctccactgtgcacagccactgtctgggaggagctcccaggatgggtgtctttggcacacaccaggtggcgggtgttaagagtgcagtgcagcagctggctgcctggtctgttgggcctgatgctggagagatgggaggtgcattcttggggccagcatgctgtttgtgaatttttatataaaaactctgattttacttcattttcgcagatgacatagataactaaaaacagaatctgcaaagaaattgtaattttcaactttaccccaaattcattgtttcttaattctgtgcaagatccagacatattattgccttcctcatgataatttattctatgtaaaaccgaaatcattttttctcctactctttgtttctgttcaagtacagagatcttgagcaaagtaagttgggttctttccacacactaaccctcaccttccccagagaatgagcagagattgtcctcagtctgagtctaagggaggagctgtttctgcacaactcagagcctgcagagaccccccaggtgcagcttcagtgagtcagacatttctccatgtgggcgacctccagtgcctgtgactgctgctcaggcctaattgttggttaagcattaggacactctttaggtgatcacatctcaagcctattctgaaaatcaccatgatcagagatagttcaatggccattctcctaacataagtttctctttattacttggttccaagtatggagaaaaatgtgaccctatatttgtctgaatccaacatcagcatcaactgcattatgctaggagactcactaattgagcacaagtgagctcgttattctcatagaaatgtaagtatttggaaatttcagtgtgttctccagaacctgtggctgccaacaactgtatttctcggtgcactcttggcctggtgaagccttcacagaacctctccctcacctgtgccatctctgcattctccatcacaaccagtgtttcctgctggagctgcatccatcagcgcccccatgggaggtactggagtggatcgggtgcataggtcatggagggagcacaaattactcccctcttctcaagagtccagtcaccatctccagatccatgtccaaaaagtagttcttcttacagctgaactatgtgaggaacaaacacatagccatgtattttagagcaaaagacacagtgaggaaaccacagtgtgaactcatacccaagcctccctgtgggggtgcataggacagccagggttactcaggacaccaggctccctcaggacaccaaggggcactcaagaccattgtagaggcatgcaggtagctgggggctctcaggaaccatgggggaaaatcaggacaccaatgggtgcttggtacagcggggggctcaggattattgtggcgattcagaaagagcaggtccaaggctcaacctcagggcatgtgcagctggtgtgaaaaggagctggatgaggcgttttgtgtcaccatcatgtttcaccaccagacaccctccactacctctattctaatgcatgtgtttgtatgattagaaaatgatattgatataaatatataaccatagctaggtgtgtcaagttgtcctctccatcttatatcagccttgtctgtaaggactaattccccataattacttgagaacctcataaattgtggtcaattatgtaggattcctctctttttctgccttccttcctccctccttctctctctcacacagaaacttatatacagccaccccacaacacacataaatctataacttttattacctgatgtattgataagtaatctaaagttacataaaaatcagtagttcactgtcaatattgtaggagaagggaaggtctaggaaggaggaattacagaacaagaggatattttgagggtaattgacttgttatctatgtggataatgataatgtctgtgaccatatttgtaaaattgaacacttcgtgtggagactattatttttttatttaaccccatgccattattttgccgtattctagcatttctctaaaaatacagaaatgttcagcactcattcatgtgtatattcaggagtttctgacttttcatgtattttatttatctctgtctaattgctttgataccaaattttacctagtataattagtactacctttagcactgattataagtctcactcctccatcatctccttttttgccacacaagctgaatctagtttggactcataggagctgcttcattcaatgccagtggttgtttcaaaccctatcaacccccctacaaactgtcattaagaaagtttatcaaactccaccagtcatgtgatattagttcgttttcacagtggtataaagaactacctgagacgaggattttacaaagaaaagaggtttagttgactcacagtgctgcatggctggggaggccacaggaaacttataatcatggtggaaggtgaaggcgaagcacggcacatcacacagcgcagcaggagagagagggggaagtgacacatacttttaaactatcagctcttgtgagaagtcactcactatgatgagaacaacatgggaaaactgccctcatgatccaataacctctcacctggtccctcccttgacatgtggggattagaatttgagatgatatttaggtggggacacaaaacaaatctatagcaacatgtccagctgtgtcctggagttgtttcagggatccagtgtgtactgttgatagaaacagtgatcatcattctaactggtgtgagatggtatctccttgtggtttagatttgcatttctctgatggccagtgatgatgagaaatttttcatgtgtcttttggctgcataaatgtcttcttttgagaagcgtctgtgaaaaaaaaaaagaaacagtgacaccaagctcacaccatccgttgtagttgacaacatgcaaagccaagagatctcaactgagatttagtgtgtgtgtcatgtctgatgaagtcataagctcagagcaagtgaatatggaaaagtgtattatctgcacagtgtaggtgtctgctgagtgcagggcaggtctcacaggaaaatctaaaatggcttgaaagaagaggaaaggagactggctcagggtttttataatggtttagtggtggcggcagagtgaggcttcccactcacagatcggggtttataaggtttgaaactcccactgccattgaatgaagaagctcctgtgagtccaaactagattcaccttgtgtggcaaaaaaggagatgatggaggagtgagccttaagtaatcaacaggcatgcaccaaaagatagagtgacaacttattctaggtagcaagaataaaaataatgaaaaagaaataagggttcagtatcgatggacaagacccagatctacagaaatgagatgactttagaaatataaggaaataataatgagagaaagaaggaggggatggggaattagggtcctggccgaatgtcttgggtagaagcttctcacaatcaaggactatcagcttattctgcaggtcttaggtcacacgtctgcttaaaaacatcagaaatgccaggcaatcaatgaggatgctcagtttagcatctcctatttgagtagatttacagttgtgtggaattcttaattgattctttttggtttgtttttagaggcaggctctcacactgttccacagcttaaagtacagttgtgtgatcatagctcactgtaattttgacctccagactcacgtaatcttcctgtatcagcctcctgagtatctagaattagaggggaatgccacccctcacctgcttattctttaaaatattttttcatagaaatagcatctctttatgttgcccaggttggcttcgatttcctggtctcatgtgatttccctcactttgcttctgaaagtggtgtgattatagggaagatccactgcatctgtcctgaattgattctttacttgtaaaacatgaagccaataattaactgcctgactgttttgtgcagtgagttagttaaaagtttcctgataagattccttccaatatgattcaagagcagtattttctgccgatattcctttcagtttccttgttgaagatcagaagacactgcggaaaagatgtagtaaaaaggcagttttaactcttcatgattggagtggatatcacataggaatccctttccgtattttgtaacacatgcatgcaatagaacaaagatgatcccttggtgtaaaatctataaacgtatgggccttttagctaccaagtcatagggtaataactgatggaccctgaggagtgaaccatgattccatagtgctagtgggagaacccttggccaaggaagttcacatttcattaaaattgataatttttatgtagggatgccattttttaaacattcccagaaggttgtgagtgggattgactctgtcttctgtgaacaatgacagtgccctccatggttagataatattttaaactagattgagctagaatggttgctgtattgaatcactatatttttttagcttcatgttagctttttgtgtgttagcatttgctttaaaatgatattaatcagccctctagtaggtagaaattcatctgagggtttcttcccttgttgtccatctcaataggatttccagaagacgtaagaaccctctctgtttctaaaaatattccaggctgggcgctgtggctcatgcctgtaaacccagcactttgggaggccgaggtgggtggaccctcgaggttgggagtttgagaccagcctggtcagtatggtgaaacctcatttctactaaaaatacaaaaattcgccgggcatggtggtgtacactcgtaatcccagctacttgagaggctgaagtgagaggattgcttgaaccctggaggcgggggtcgcagtgagccgagattgtgccactgcacttcagcctgggcgacacagcgagactccgtctcaaacaaaacgacacaaaaaattccaaagttgtgcaccctctaaaagcatacgtacttaattctcatttttaatttattaaacatctctaataagttcaatgtttcctgccttctgagttgatttcctaacacatagaagaatatatcctaaatgaaagtttgtgttcttaatagaaattactagttaataacctttacttttattattgaggtattatacatcaatgttaatcctctcaatgggactcttacctaaagaatatataaaatattttcctgatcatgacataaagtagatgtgaacacattcttagcattcagccatgtctcttgtctattaatattataaaccacatgctaactttgattttattggtaattgttctaatttctttttttttcccacttctctggttgtttttttttttaactttaagttttagggtacatgtgcacaatgtgcaggttagttagatatgtatacatgtgccatgttggtgtgctgcacccattaactcgtcatttaatattaggtatatctcctaatgctatccctcccccctcccctcaccccacaacaggccccggtgtgtgatgttccccttcctgtgtccatgtgttctcattgttcaattcccacctaggactgagaacatgtggtgtttggttttttgtccttgcgatagtttgctgagaatgatggtttccagcttcatccatgtccctacaaaggacatgaactcatcattttttatggctgcataggattccatggtgcatatgtgccacattttcttaatccagtgtatcattgttggacatttgggttggctccaagtctttgctattgtgaatagggaattgttctaatttcaaactagttaatttttatcttcatgcagctagattattatgtgtggctatttattccgagagtgataaagacaacattaacaattttcactgcaggcatgtctaggcaactccctgtgcactatgaccctggggcgttggagattctatggggactcttccctacctgcctaggagagttctctgccttctacctctagcattttcctctttgaagaagtacatctaactgtcattagaatagagacaaagacaagtcttaactgcttccagctgaggagggatgctgtttggggaagatctctcttggaggtctaagggaccccaggaaaagggagccattatcccaggcttcagttgcatgaccatttggagtttgatggtctgaaaatgagaagaggcaaatctggttattagaagacatgtatgaaaaccaaacaaggtggcaaggacagcttgaaagaaaattccaaggctgctgacattcctagataactgcagctgtagttatgcctgctaaggtttgggcgcatggggcttggcttttgtcagctccctgggatttattttcccaaacaaagaaacctccaggttaggggcaccctattcattcccatcacctggcatgatttaaaggataattgcttagaattaaaatattgatccagattttttatattccccatcgctttttgtttcttctgggctgtagccagagatcattgattggcgctcaggaataagcagagttagtctaaaatgcaggcaaatacttaaacaactgaagagattagaatttaaagacaagtgtatgatatgttttgaaatacaatgtttctctttccagttttggtttttgtcagcagcaaataatgataagactgagttgtttgcaaaataaactttagtcttaaacttggcctgattatttgcataaagtgcagcaagaatattaataataattctgtaggaaaagcctgcaagcaccaggagcttcacagtctaacactatgagcacgtgcatcctcacgcaactcactgaatatgtccaagtcagcctgttccgatcttaaatgccatccagtggcatctgccccaggtacactaatacatgggtcctgcttctctctgcagccgcctctctcctcagatttcaggttttgtgtattgtttgttttctctctgacatcaacacagatatgttgaaggttttcttttttttatttgtagttgttcagctttgttgttaatgaggtcagaataagctcatagtttacacatttttacattcccatgccgagtagctgcttttctctatcaaatccattaactgagagaacaatcacatttcgttacaggtgaacagttaaatagtttggcatatatttctgtgctggaatctaatgcagcttgaaatcaagtcatgcctcactcattgaaaaaaacatggctaaattctcaaagaattgtgctgagtgaaagaaactaaggaatgaagagtaaattttatatgatacatttgtagaaattttagaagatgccactattataaattaacatggagaagatttatatgtttctgagaatatgctattgggagtaatggggatgtgagttaaatttcagaggaataagagaaagatttagggattaatttattcacaccttgattgaagtgctgagtaaatggttgcacacataggtctacatttttcaaatcattcaccataaatttgaattatttattaattacactcgaataaagcaataaagaaactgatgagataatatttgtctgaattgcagcaataaatagatcgatattaacacaaggaatataactgacttccccaaacatacacatgtgccgtggttcactctgcgtatttaggtaaataacagagagttgtcataacagatggggaatcctgcagacttcactaggcatgggccatactcccctggagttgtctcaggggagctgcctcctccagaggttagagcacaggcccaggtaataggactaaatttttagatgtgttatcttagacacactgcacacctgctgtgttctctatgtaaattatctcctgtaaaatataacattgaagcctgcattaaatatattgtgtaaatatgtaagaataaaagaaagttatgagagctaagtgttaatcaaggcacaagcatataagatataactatattttcctgaatgatggaattactaccagtctcccccaggacacttcatctgccctgagcccagcctctcctcagatgtcccacccagagcttgctatatagtgggggacatgcaaatagggccctccctctactgatgaaaaccagcccagccctgaccctgcagctctgggagaggagcccagcactagaagtcggcggtgtttccattcggtgatcagcactgaacacagaggactcaccatggagtttgggctgagctgggttttcctcgttgctcttttaagaggtgattcatggagaaatagagagactgagtgtgagtgaacatgagtgagaaaaactggatttgtgtggcattttctgataacggtgtccttctgtttgcaggtgtccagtgtcaggtgcagctggtggagtctgggggaggcgtggtccagcctgggaggtccctgagactctcctgtgcagcctctggattcaccttcagtagctatggcatgcactgggtccgccaggctccaggcaaggggctggagtgggtggcagttatatcatatgatggaagtaataaatactatgcagactccgtgaagggccgattcaccatctccagagacaattccaagaacacgctgtatctgcaaatgaacagcctgagagctgaggacacggctgtgtattactgtgcgagagacacagtgaggggaagtcattgtgcgcccagacacaaacctccctgcaggaacgctggcgggaaatcagcggcagggggcgctcaggagccactgatcagagtcagccctggaggcaggtgcagatggaggctgtttcctgtcaggatgtgggactttgtcttcttctgacagttccccagggaacctcttaaatttagaaaactgtgcctaacaatgtcttctctatgcatatgaggaccttttctccctggcacaaaatgcagattgacgctgacacggatgaaaattcctcaaccatggtcacaaggatcagagtcctgagtaacctcagggcttcctggtgagtcttctccaatcagacccaggacagggacctccgtgagattccctgactggaacagtctttatggatcctggtcacagacaatagagaggctgaaccagggtcagcgtcatgtagaacctcacagatttcacgtctgatccttctcctgacacgaaagtatgcaaatcagtatcagcaccgatctggtgcttcttttgttcctaatccatttactttcttttttcgtcgtttttctcctttttccatttgtttttcctgctttttgcaaaaggaagatgttttccctgtgagatgcaggggatgacaattttgggagatggctggaacatccaatatcctcagggccggccatcagtaagtgcaggctggaagtctcagaaagagctgaagctgcttaatcaccgtggagttttaccttctccagttctgctctgatggaatcagggccaagcaggttatcaatgataatctacctaacatagagtcaaccgattccagtttcaataacgtctgttaaaaattcacaccaccacctggattagtgttttgtcaaatcaatacacagtattgtccagctaagtagacccaaagacggaccgttgcccatggagaaaaacattaacctgagttctaggttcttacagtgttaaaggtgtaaaactgattattaaaaatgaggctatttttctttttgctgttgagttgtagaagtttcttttccatttggacattaaaactttttgagatatatggcatattatccaattctgtaagttgtagttacttggttgctttgcagaatctttttcataatctattcccacttgttcaattctgctttttttttgtaggtgatttgaatgtaaaatccagaaaaagattgctaattttttgagggttgagagttttacaattacaggtattaaagttagacccttgaggcatttggagtgaatttttgtgtttattctaacctaaaattcttaattcttttcatgggaaaatccagttttcataccaccctctttggaagacactacaatttagccatgttatattgatggttctcatgctaaaaatcagctcgtcatcaatatgtgggtttatatctaagctctgtataggtatttatgccaaaactttctatgtttctaacaaatgttaaggcctggaagtgaaatgcctaaagcttgcattcttgccttgttacagatattggaccaaaatattctaaccttttactattgagtgtaataatagctgtggcctttcttaacggcttttattatgttcaagttgttttcttgtcttcctactttgttcatagtttttataatgaaactgatttttttcaaagtctttttctgtgtctgatgaaatgttactgaggtattttttctttagttttttaatgtggtgtaccaaattggttgatttgagaatgttgaatcaagtatgcatctcaggaagaaatttgagttggtcatggtgtatgtcttctaaaacactttggagcttagtttactattgttggggattaattcatgtctactaatgatattggtctgtagttttcttttattgtggtgcctttgtctattactggtaatactatcatggtagcctcatagaaagagtttagaagatatatggcagactacctttaaaatagattttatcagtggagaaatggtgatagttttttcttcacttttctgttgggaagaattttatgttgtttaaaagatattcagaatgacttaacctggtttatgagctttcattctattcctttcttccattctttttgaagaactgcttaccttttccttttaatttttaagtttgtttttagacatatgcaatacattttgaggtgaaacctggtggaattttttctaataaattagaaaaaaataaatcatttaattgactattttattcaggttgatttgtttaatatttgctaaaggccagttctttaagctatgacacataataaatcccaaatggcagtacctcattgtttacttagcttttgtacttatatttctcagaggaagaaccactactgtaaattgtaaatagccaatacataattgtattgtatgcaaatctgtgactgtttacagtgtcatctctgagaaacataaagtttatttactatatatatataaagagtttggaaggtggactcctcaccaatttttgaaagagttacagaagggctggcattacttctttaaatgttaaggttcattttatgatgtgacatataacccatcatggagaatgttcaatgtgttcttgagaaggatgtgtattacgtgactcttggttggaaggttctgtaaatatcattcagataaatttgttcaatagtgttgttcaagttcagaggcacattaggaattttctttccggatttgctatacattatggtcatgaggtattaaggtcttgtgttatttttgtattgttttctatttctttatatctcttacagtttgcttaatgcagttatatttgtatttgtacacatgtgtaaaaacaaaaatcataattgctaaatgagttttatggcacagtcacattataagtaatatttttccaaatgctaccattgccactaaactcctcctggagtctgacgtctgctttgggcactgccttcttctcaggcatcccacactggagcttgctatagaggaggagggagggcccctctcctggtgaaaacaagcccagacctgaccctgcagctctgggagaagagccacagccctgggattcccaggggtttccatttggtaatcaggactgaacacagagaactcactatggggtgtgaattaagctgaatttttcttgttggtattttaaaaggtaactcatagggaactagagtgagtgagagtgagtggatatgagtgagagaaacagtggatatgtttgccagtttctgaccaggatttgtttgtattttcaggtgttcagtgtgaggtggagctgatagagcccacagaggacctgagacaacctgggaagttcctgagactctcctgtgtagcctctagattcgccttcagtagcttctgaatgagcccagttcaccagtctgcaggcaaggggctggagtgagtaatagatataaaagatgatggaagtcagatacaccatgcagactctgtgaagggcagattctccatctccaaagacaatgctaagaactctctgtatctgcaaatgaacagtcagagaactgaggacatggctgtgtatggctgtacataaggttccaagtgaggaaacatcggtgtgagtccagacacaaaatttcctgcaaaaagaagaaaggagtctgggccaaaggggacactcagcactcacaaaacaggtgcagccccaaggcaggtgcagatggagggagggtaagggctgctttccttcaggatctgtggtttcctctgcttctaatatttcccctctgagcctctgtacatttatattttgtgcccaccatgaggtcgctggattagaaaactaatttgaaagaggaaatattctcatatgtcctaaaaacagatgtaagtattggaggcataaaaatgcataggagccgggtgtgtctgtagacactgccacccccaatgccagacccacaactagtgctggagaagggtgggagtttgatggagcttccctgatgaccccgtggtccaagctaagtccagcaaggccattggtgcctcgctgagcacagttgtccatcagggatctcccatgtgtcccagcagcagccatgcctcaatctctccactgtgcacagccattgtctgggaggagctcccaggatgggtgtctttggcacacacagttgatgggtgttagagtgcagtgcagcagctggctgcctggtctattgggctcctggatattggagggatttgaggtgcattctcagggccagcacgctttgtcaatttttatatgaaaaccatgtgatttaattcattttctcagatgacatagataattaataacacaatctgcaaacaattataattttcaactttaccccaagttcattgtttctgaattctgtgcaggatccagacatggtactgcccttctcatgagaaactgttcgatctaaactgaaaccagttgtttctcgtatactttggttctccccacatgcagagatcttgattagagcaagtttggtactttccacgcactcaccctcacctccccagataaagagcagaagttctccttagactgagtctgagggaggagctgttcctgtaccactcagggcctgcggagacccccaggtgcagcttcactgagtcaggtgtttcactccctgtgattgctgctcaggtctaattgtggctcggaattaggacagtcttcacgttatcacacgtcaatcatattctaaaaatcatcgttatcacacaccatggtaacaattcaaggttcatttttctaacggcagtttctcttttttatttggttgcaagtttgaggaaaggaacatgtgataatactttttaacctaacctcgaaatctactgaattgttctaggagactcacaaattggacaaagtgagctctttattctcataaaaatgtgtggttttgggaatttcactgtgttgcccagaacctgttaacatcaacaactatgtttctcagcacacttctggcttgagactccttgcagaccctctcctcacctgcactgtctctggattccccatcataaccagtgtttcctgctagaattgtatctgcttgcccctagaagatggacaggagtggatcaggtgcatgggttgtgaagggagcacaaattacaacccactgctcaagagtccatatccagatccaagaaacagttcttacagctgagctctgtgcccagtgaacacacaactacgcatttttaagcaaaagacgcaatgaagggccttcattgtgagcctagacacaaccctccctgcaggggtgaataggagcagcagggggcattcggggcagtatgggggcttaggatgattgttaggggtcaggatgagcaggatcaagttcgcatcagggcaagtgcaacagggcagaaaaggggctgtagatgtgggttgttctcaccataatatttcaccaccagacaccctccaatacatctcttataatgtgtcggagtgttgatatgattagaaaatggcatttatgtaaatactaatatgtacccatatggaggtgcatccagttgtcttctccatctgaggaggaccttgtccatcaagcactaagtccctgtatttacttgagtacctcacacattatggtcaaaacaggtagggtctccttttggcatggtctctcctcctgccttctctcttctgtcacacaaaaacacgtgaactgacacacacacagagcttcccaactttaattatgtgatgtattgaagcaaattgattagtgtgcagcttttctgctttgcctgctattcatgttatgtaaaaataagaaccatgttttctcagcttgtcacttctctaagctaagtagcatctttgtttattatacccagagaccaaaagcgatccaactgttattcagcagcttaactggtaaacaaattgtggaaaaatcacttactggaatcatacccactgctacaatcaagtaatgctggatacacccaacaccatgcttaaaatagcaagtacttgaataagtaaaataagtcagacaaataaaagtgcatacatacgattccacttctataatttctataaagtaaaaatgaacttaaagttacataaaaagatctgtagttgactggggacatggtacaagaagagaaggtatagaaaggagaaactacaggagaacaaaaggaaatttctaggataattgatttttttctctgttagtaaaagtgaggattatgtcaatatttgtaaaattgtacactttatgtaaagattcttatttgctaatttcacctcattaaaatattgcaattttttaaatgtctagtttggtagaaaaggtagtagagagagatgaataaaatacataaaaatcagagagtcctgaatacacacatgaatggaccctgggtctcactgtacttttagggagacactagaatacaaaaacataatgacaggatttcagtacatgaaaggagcttctcagaccccaggaggcctgtccaactgcgtctgggagttaactcagggagcaggcatgtcctttggaaggagccgtgacaccaagctcccagcatccattgtagccgacaccatgccaatgccaagagatctcaactaaaattttctgtggatgttgagtctgattatgccacacactcacaccaagtgagtatggaaaggatagttacctgcatccttaaggtgtctgctgagagcagggcaggtctctcattaaggtccaaagtggcttgatagggcagggaaggagactggctcagggttgttatcatggtttggtggggagcggggcagagcatcctacttgcaggaagggttttgtggggtttcaaggccaaattggcatcaaatgagggagctcctgtgatttctaactagatttaccttgtatgcttaaaaaaagagatgatggaggaatgagcctgaagttatcagcagtcaggcctaaacacagagtctgatgacttactctaaatagcaagtatacaaatgatgagtaagaaaagagacaagactccaatatgggtggacaacagccaggtctgcagaaaatgagaagactgtttataagcaaagaataatgagtaggatatggaggaggattctggtccaatgtcttgtgtggaagcttctcatgatttgagatcatcagcttattctgaaggtcttaggtcacctgtcttcttcaaaatatcagaagtgcctgatgatatgtgaggatgcgcagtttaacttcctctatttgagtagctttacaattgtgtaaaattcttaattaattaatttttttttgagacggagtctcactctcttgtgcaggttggactgcagtggtgtgatcataacatagctcacggtgattttaaattcctggctcatagaatcctcccacctcaacctcctgactagcaagtagctaggtttccagggcccttcatctacacttggccggttctttacattctttttttttttttttttaggtggagtttccctcttcttgcccagaccggagtgcaatggcgccatctcagctcactgcaatctccccctcccaggttcaggtgattctcctacctcagcctccagagtagctgggatcacaggcatgtgacaccatgccccgctaattttgtatttttagtagagatgacgtttctccatgttggtcaggctggtctcaaactccctacctcaggtgatccttccacctcagcctcccaaagtgctggaattacaggcgtgaggcaccacacctggcctcttcgtttttattcatatattccttcagcagccactatgtcttcccactgatttcttcagtttctgccttttccttttgaataaggctgttactcctgagggaagatgggaggtgggcctggacagggacttggtgcattcctctctcccctcccagttcttattggtttctccagtgtctgtagaacagtggttttgatggctttacctctgcagataatttctcttgcaatgtagtggtgatggggaggtgtgtctggatgcatttcagctgtagttgctgttttgctttcccagacagcaccatcccaaggggtagaggctggagcattttgtgatgtatccccagtactgaagaaaaaggcttcaatagcaggaggaattcctcaactgcatacactctgagaatttaaacaataacttctctatcacactcaaattgaaaccacccaatgaatatgtctactttaatcgtgtgctaacttaaatgacatttggcagcctctgtcccagaaaagattatcatctgctcctgtttatttccctgcaagtctttatgtctgttcagatttcagatatattgtttgtcctataacatcaaaaatttgatgtatatatgctaatttgcagatcagtaagtttagtatttgttataagaatagtaacatatttttatggggtgcttacatctccaagctgagaagcacctctgtgtaatactaagcaactagaaatggtacaaataccaagaagatacatagataaacagtaatggcatgctaatttatggtaataacatccatcattagaatcaatacattgttgatgctcaacatgtgtgcatcataagtagttatgtgcgagaagccacacaaataaaacacatactatgtaattcctgtataataaattctcgaaactcaaaactaaggtattaaatgtgaaggactgactcagaatatggtggaggaagaaaataattgggaaggaggaattgtagaggaacacaaggaaacttttaagtgtaatttgtttattcattatttggatggcttttggggatgcacaggtgagcacgagtggaataacattttgttttgtttgtttgtttgtttttttctgaagagatgtggtcctactctgcgacccaggctggagtgtagtggtgggatcatagttcaatgtagcctccaacttctggtctccaacaatactcctgcatctgccatctaagtagctggaactaccgttgtttgccagcaggcttggcttgagtacttattaaaccgcacactttttgcaatatttaatgtatagtaataatgtctcaataagactattacaaatcaatgaatgaataatttgttctgtacagatttatggaaaaatagacactaacatgatgaatgactgacatttatgaaaatacagctgcatgaaatgtgcttctctttacattcattaggtaaacacataggtgcatacacatcacaccgcgctttcattacaggaagaaacatctgaaaatgtcactggggtgaaccatattgtgctgggcttggttcaggaagcagtcaggcccagtgttgtgaccttcaaccacagaatcctaaaaaataataaaagaggctcccccaaagtccccatcagttcctggactcgccatgtgtctgggccgtatcagtgcatccggagctccctggtggctttagggattccttgcttgccatgctgaggtctcgctgtagattatgttgggttttctgaggccgttttgctatttaagacccactccctggcacagagcgattccctctaaacctgatagaggttctgaactacaaataacgttaagtgaatcctggtgtgtctgaactcacatgattgttacattaagctgctgttgcaatctgtttcctcacctgggaaaagaggagccaggacatagtgagttgaggccccaggaagataactgaattctcagagggcacaaccagcatcctccttccagggagagcctaaaagactggggcctccctcatcccttttcacctctccatacagaggcaccacccacatgcaaatctcacttaggcacccaagggaaaccatcacacatttccttaaattcagggtcctgctcacatgggaaatactttctgagagtcctggacctcctgtgcaagaacatgaaacacctgtggttcttcctcctgctggtggcagctcccagatgtgagtgtctcaaggctgcagacatggagatatgggaggtgcctctgagcccagggctcactgtgggtctctctgttcacagtggtcctgtcccaggtgcagctgcaggagtcgggcccaggactggtgaagccttcggacaccctgtccctcacctgcgctgtctctggttactccatcagcagtagtaactggtggggctggatccggcagcccccagggaagggactggagtggattgggtacatctattatagtgggagcacctactacaacccgtccctcaagagtcgagtcaccatgtcagtagacacgtccaagaaccagttctccctgaagctgagctctgtgaccgccgtggacacggccgtgtattactgtgcgagaaacacagtgaggggaggtgagtgtgagcccagacacaaacctccctgcagggaggcggaggagccggcgcaggtgctgctcaggacgagcagggggcgcgcggggcccacagagcaggaggccgggtcaggagcaggtgcagggagggcggggcttcctcatcagctcagtggtctccctcctccccagcacctcagctgtccccaggactcctctttctttattatctgtggttctacttcctcacatccttgctgcaggttttaacagtcactggcacccttttttcaacaaattcccacaaggcccattttaccttcttgacaagcaaaatattctaaggcttctcactatcccttgattggcgtcatctactgcatcgtgtctttctcttaaattcatgtgatgaaaccccaatcccagtggctctgtattggacagagggattttaagagggcaaataagttaactgtggccataaatgtgggaccctaatccagtaggactcttgtccttatgagaagtggaagacatcagaggcctctctctccacatgcacacagaggagagtccatgtggggatgcgctgcatgagaaggtggccctttgcaagcctggaagaggcctctcaaaaaacttaccctttctgcacccagatcttggacgtcaagactccagaacaataagaaaattaatatttgttatttgaaatagcctagtctgtggtatcttctcatggaaagccaagtagattcagagattcaattgtgttagctccgtctcctgcatggagtagcagcccaccgaggctggacacatctctcaaattattttcataaagaaaaatagatccaagatgaaaaccccaccacatttctgctgagccattcacttagcagcagtctctgagatcagccctgggggtatgttctaggtcgtgtatctcactttccactatgagaatccatgtagataatgagaaccagccagatggagtcctgatccctgcccaccttctgcttccccccaagtgacacacggtcacagaaaaccactccagcatcaccctgtgtcttgtactctctaaaatcccactaaagctgaccctaaactaggagctatttggggctggactcattctgttcttagtcttccataaggtccaggtgccgagtagagcctcagtaaagagtgagcttcaattcccctaacccacatcattcccttacatccttgtcatgcacctgtcctctgcaggcacccagggcaggttacacaggaattgcctgaagctggtctcaggtgccctgctgagaccactggttatgcacacgtatgatttcaggtcatgcaggctcttctgcaggacagacctgtgtcctgtagagcacagacacttggtgacccaggccctcctctaataactcatacatctcatgtcagtgtatatccaggtgccccctcagtgcagcacactagggtgattaccctcacaggtggctttttcaggcggtgaacagaaaatggggtgggcacgctggtcattcccatcatcggtgatatccaagtgaattttaaataaatgaaacaaaactaacaacaaaggggaaggatatgtacctgtatctgggaggtagactgggtcccagaactgtactgggagtgggtgtgaaaggcccttttgtgtgggaagccctccagcatgagtgaaagctgaaggaatgatcactgtaggtggagcctgatggagaagctggcagggtacatttcctgaagctgttcccgggtgcgtgatggttcaatggcccatgtacatgaagaggagggctggactcatgtaggatcaaggaaactaccccatggcaatggaagaaaagaaaatggagatggacacccctggaggcagcttattagctttggtggaggaacgatgggaatttattccaatgaccccagcatcttcagctaaatatgagttgcattaacagacagaattatgaagggaagggagaaggagtttatagagggaaaaagcagaacagaaaaaaagaactacacaagtctatcaaatggcagatgacagagtgtagctgatgcagctacaccacacttcccggaacctaccagagaccttgacacccctgtaaggcaggtctagtggtgatgcacttgtccactttttgctttttggagaaacgtttgaaacatcctacattactgaagaaaagctttaattagtgtaatatttttacttgacagttttattggttttgttttattttcagcaacttgaatagaatcatgcacatcatgatatttgggtgaacaacaggccacatacacgataatgatctcattaaattataatactgtattttcactgcatttcttccatacttagatatgttcatatatatacatacctaccatggtgattcaactgcccacagtattcactacacttacatgatgtacagatttgttatctaggagcactatgctatcccacacagcctgggtgtagcagggtatttcacgtatgttcacgtaaacacactctatgatcctcgcatgatgacaaattgcctaaggacacattgctcagatgtatccctactgttaagctacacatcattgtatctcatctctctccatttttggtctctgataaaattctcgtgttgtttttgcattcttctctgagctcattgaacacatttataaggtttcctttgaattttctgccaggtaatcaatatacctccttttaatttgtgtcagtttctagtgctttgctttgttacagaatttggactgctttttttctctttcattattattatcactttgtacattctctgttgctttctgctcattagaaggaaaagccatggtaaccactcttcacagaatatgctcagggcaaatgccatcacctgttagcccagtccatgatagtggtgtctcttaaaatttcatactggtccaaactttttgttgttgttgttagtggcactcagacctatagaggattttaagttttcccctactctaaattaggtggcatcaaaattcatcctgcaggcagtctctgataaagtggagaaattggacaaagttttagcatgtatatggttcataaaaataatatgagtttaaggttttctcagccagttgctacatattgatattttataatcatttctttgaatgtctctggagtttatcttttgaaaatttagatcagaatatataccaggtttgaggcttcttgtctggcttaacgatctcctataggtcagcgtgtgaaaaggcacagagtctatctgaagaggagaactcagggaagccccaaaacaacagaggagacaaaactgaggactttgaggaatctaaagcttctgggacctgcagcctccagacatgctcagcaccctcttgttatccacggactaatttctttctcttttctgagtggtattttctagggttcccgtcctccactttgacactttggtatgtccatgtgtgtccattgtgtttcagccagggacacagaaccaggaaaacatcatggcttttctagagggagctgacctgggtaatcaacagttggagtagaaagtgcctttgtccatgtgtcacaggcctaagggccatgggcaggaggtcaggaagagaggatgaccagacggctggggaaaccaggatgaacaaagccactctccttcctggtgagaaggggcatgtggaagcctggtgtccctgtagggctgaaccacactcacctgcccactgctacctgccagcgaggtgacccacagagcagcagcagctcctgagtcactcacagaggctgcctcctcctccaaaccctccagtgtatgtgcttccataagtgtgagccccagcagatcccaaagttttcaatgggttcatctagctagtgtctgtcctcagccccatccccaggctcctgccctggttggtgtccacagtgtcccagcagcggtgacagtgacagccagggcctgcactttccagagcagcaagtttggaagaatcaagtcccagaaccagcctggatttggggcaaacacacaaatttcactctgaggggaagtgctggaaagtagccttgagtcttcctcagctcacctgtggctgatcctctgcatcccatcagcgatacatgagccctccccaaccccagcgtggagctgtttcaatcgcagcaggatgggaatgtgtcttctttctggggactttttaagcacagctcttatgttcctgagatttgaggtttataaaggtgtgtcagtcacccacagagtggacctgcacaagtaagacaaggacaggatccccaggagaggcacctcatatgagacgggacaggcaggtcccatcacagacactggtcctcagaaaccctgaccagctactcaccttcccaggtcacctgtgtgtgatcagttcctgtgtttgctcctgaaaagatccccatcaagggtccccaggtcctgcccccttccttgatgtgcctctgggagtggggctggctgggctgtgggtctgctgtgactttccccacaggtcagcggctcagtgcaggctgcgccaactcggtggggctgggctgtggccgaccctcccagggggagcctggatgcttctcgggggcatctgcaggatcccaggttctgggagaacagggaagccacagtgtgtgcagggccccatctccaggtgtaaagtgtttgctgtcactctgttgacaagggcatatccccaggcgcaggggcactgtgggtgcacaaccaatgtggtagacacagagagtgaggcacatatccctcccattactgtggggaatataggcactgtgtgtgtgtgtgtgtgtgtgtgtgtgtgtgtgtattaggagttttgcagtgggctctgagccccgtgattttgtaggtttagaaattatctgatgagatgttcatccacaggaaccgacaagagattaggtgttctcccaaagcccctgggagctcctggactcattgtgagtgtggactgatccattgcttccagagctccacagaaggggctccctggtggtttcatagaatccttgcttggggtctttctgcagagttcactggctttcctacggccagtttagtattgtaagagatggtgtcagcagcacatggtatcacatgtcactaaatgagcattctgagccaggacacagcatcttcatactggggggagggaaatgctttgggagcccagacaggagcctctctgcagtgcaagggctgggctgcagggggcgctcaaggcccacccatcacaggctccacccccagagcaggtgcaccggaggctggggagggattcctctcaagatctgtgtcattcttctaaaaaaaatctaaaatgagtatttgacaaagactgctgaacattctataaatatcctattcaattgtgagcatttatcaaatttgatgttgtaatgagaaccacttttatactagatatttctaaccctgctagatatcttaatagtatgcagctggaggttaagcaagcttttcttttatataaataagtgcaactttggagaaacacactcatcccccgaataagacattcatgtattaaagcctagaaatactttaaattacctctgagccattcaagtgtgtgttcacagtgaagtcctgttctagggaaaattgttctccagggggagaagctttgtcaacatagagcttagggatgtatcaggaggcacatgacctctaaggggattatagcttgaacccttagcatcctcctgttggtaatacatgtgtcactctccaatctttctcatgcagtatcaggtatgaaataggatcgctcatgaatatgcaaataactgaggtaaatatagatatctttgtgccttgagagcatcatccaacaaccacaactctcctcagaagaagcccctagaccacagcacctcaacatgtactggacctggaggatcctcttcttggtggcagcagcaacaggtaagggacctcccagtcaccgggctgagagagaaaccaggccagtcaagtgagacttcacgcactcctgtctcctctccacaggtgtccactcacaggtgcagctggtgcagtctgggcctgaggtgaagaagcctggagcctcattgaaggtttcctgcaaggcttctggatacaccttcacaagctatgctatcagctgggtatgacaggcccatggacaagggcttgaggaaatgggatggatcaacaccaacactgggaacctaacgtatgcccagggcttcacaggacggtttgtcttctccatggacacctccgtcagcatggcatatcttcatatcagcagcctaaaggctgaggacacgtgcaagaggcacagtgtggaaacccacatcctgagagaaccagaaatcctgagggaggaggcagctgtgctgagctgaggcagtgacagggacaacgtggctgcaccctttgttgacatagggttatacacatacatatatatgcacccaacactggagcacccaggtatatcaagcaaatacaattagagataaacagagagatagacccaataccataatagctggagactttaacaccccactttcagcattggacagatcttccagacagaaaattaacaatgaaatcttagactaaatctgcatgacagaccaagtggacataatggatattgatggaacacttcatccaatggctgcagagtacacaatcttttcctaagcatatggatcattctcagggatagaccacatagtagaccagaaaatttgtcatttttaattaaaaagatatcatgtaccttctctgatagtaatgaaagaaaactaaaataataagaggaattttgaaaacacatggaaattaaacagtatcctccttaattaaacaatgtgcttccaaactgaactatatgctctaaaatgggttaataaagaaacaaacaagaaaattttacaatttattgaaagaaatgataatgaaaacacagcgtatgaacacctatgaaatacagtgaacatagtactaagaggaaagttcacagctataagcacctatgttaaaaaagtagacaattataacataaacatcttaggaatatctctcaaaaaaaactagaaaagcaagagcaaatcaaaatccaaacatagtaaaataaaaaagttaagatcagaacgttaataaataaaattgaaataaataaaacaataccaaagatcgatcaaatgaaaagttgttttttaaaaagataaaagacatctataaacctttaaccagaccaagaaaaaaaacaaagaagaccaaagtaaataaaatcagaaagaaaactggaaatattacaaccaatagtgcagaaaatcaaaggatcattagaggctactaggagcaactaaatgccaataaatcgaaatatctggaagaaaaggataaatttagagacacatacaacctaccaagattgagccaggaagaaattgaacaggatcagtaacaagtagtgagagtgaagccataataaaaggtctcccagcaaagaaaaaacccgggacttgatgacttcatcactcaattatgacaaacatttaaagaagagataatacctaatctcactcaaaatattccaaaaatagataaaaagtagataaggaagggaagaattcttccaaacttactgtacaaggccaatgttacccttatatgaaaaccagataaagccataccaaaaaaaaaagaaaactacagttcaatatcactaatgaatatggatgcaaaactcctcaaggaattcttagcaaaccaaattcaataacatatcaaaagagcattcatcatgaccaagtgtgggttatcccagagatgcaaggatggttcaacctatgcaaatcaatcaatgtgacacatcgtatcaacagaatgaagggcagaagacgtaagatcaggccttaccttgttctcctcactcaaagtctaccattagttctttggtcctcttgaccagtcctgctgtacttggtctcccgtgattctgttcccaggtcctgaaacactgggcttctgcacacctggagtctctctctttgaacatggagaccctgtatcctcagagagggatgatgcctcattgtggctcccatgccccatgcaaacaattcttccaacacagtcatgatttttcctgttggaaattgaaaggggatgtgggaattgatgtgtgtgtgtgtgtgtgtgtcctcaggcctgttgggcctgttgagaacacagcagggctctatgtacaacaggaaagcaatgttttctctataccatctattttcttataaagtgttcataggtaatcaaaaggaaatgaatcacagtttataagatgttgtggactggactgatgttgtcactcaaggctactatgggggctccaggaaaagaaacctagaaaaggataagactgtgagcaaagaagcaaaacctgggaagcagcagggagagggtgagcaggggtgactcaactggggagggataacaccacttaccacagagggtgaaaactccgtgctcagcaaagaggagaacttactcagcatttcccctaatcctccctccagaagcgcgactgccaggaaagttcacaatgtatcatctccagctgggaacccaaaagaaacaggagattttagggcataggtcctgggcacaaggtgtttccctggttcctaccccttccctctctgtccagcaaaactgcttgtttctatcacttgccttcctgtccttggggtaagaatggatgctttgacactcagcagagggatgctctttcagaggaggaatgagtttgtgttatctgatgtctgagcaggacactcacctctgggaagaggctccaagacagaaggtcgccgtggttcctgccccttatatgtgaggggctcttgacacatgcacacttttcctcaaactctgtttataccccagcaacaatgctgggtgttgtcagcctctctcctccccagatactgctctatcatcagcttgagcacagtttccccatgaaaggcattattctctctctcaagaagatcaactttttacatgtcttcgatggatgacagtttctctgtgtgagaatctagaaataagaaatggggtaatggggacaagtgagctctctgtgtgactcactaggaagtccactgttattccaggtgtcctgtcccaggtgcagctgcaggagtcaggtccaggacccatgaggccctcagacactgccctctgcctgtgctgtgtctggattcttttttttaccatggatattatttgagatgaatccaccatcccgtgggcaacaggctggaatggctggggcacagttactagactggatcatcaaggaatacacatcatgcaccctccacccaggtccatgtccccatcaacagtgactcaaccaagagccagttctctgtgaagctcagctccatgaccacctaggacacggctgagtattactgtgaaagactcagtgaggaggtgtccttatgagccctgacacaaacctgtcagggcacttaggacctccaggaagactcaagaccaccaaggggactcacgaccacttggggaagggcaggttgcagtaagcacagggccagccccagagcaggtgcaggtggagatgagaggctggtttactgtcagggtctggggctgcttctccatttagatgtttccttcagagaccctcccttatttcatgatgctctgcttagctgtaagtctctgaaatatcacagttttgttgtaccaggaggaaaccttctctcaggtgctaaatgtagaacaatctctctgccagtggttgccagggtcacagccctgtggaagctgaagggtacccagtgagtcttctccagtcacattcaggacaggaaccttagtggggttccctgaggagaacagtctttaggaattctaacctcagccaagagaggctgggccagggtcagtgtcaggtagaacctcacaggatttacgtctgaccctcctcctgacactaaagcatgcaaatcagtatcagcactgatctggggcccctttggctcctagcccattctatttcttgttagttgtcttggttgttgattttcctttgggtgttcctgatccctgtaaagtggagacgtggttcctgctgtaaaaattccagggcctcaagccctttccctgcagctcaggtggggctcagactgtggctcctgcaaccacgtgggagaggctgatgggactatcttctctcccgttgctcagaaccctccagtgtgttgtgtggagactcacctgggaatgcaagtggccaatagttgtgaaaggtatgcgcttgtttggtcaaagtggaatgtggatgtggaatttatcctgtgttgtgcaaactaacacaggttcaccttcctcacctgtagtgttagaaagagtgtgaaagttgtaagaatcaaaacagagccacttgtgttaacaccctgacaaatggacctaggaatgaacatgaaggagggttcttaggcccatattcctgataacaaaaactatcataaatagactctgcttagccaccatcttggatagaagcccaccacaaccttattaaaaattacacttgcaagaacatcagctcagaaactggctgttcaaccttacactgatgccaccattgctattgattctacaactatatgataattatctcaaaacaacttttgtgacccacctcattttcacttcataaacctgtggattgacatgttggagttactgctgcatttgtagataatgataaataataaggccttttaacaatgtttgaagctgctattctctgatatctcttctaaaataaagaatttccaagtggatgacaatgaaaaaattgttagaaatatttggtggtaaggcatctttaacatcctgttgaatgtttctgcatagcacatcaatcccttaaaatactttgctatatctgcatttaatgaatgagtctaatattgaggtgcaattgaaaatacctgggcctttgatgaatcagctcatagggtgataatgtctgggtccttgagaaagcagaccctgtgttgtaagttttagtagaagtaccttttgcaaagaaagttcatgtgtttctgaacattatgctacttttaacttaagaatgcaatatatgatttatttttacttcaaactgggtatatacccagtaatgggatcgctgggtcaaatggtatttctagttgtagctccttgaggaatcaccacaatgtcttccacaatggttgaactaattttcactcccaccaacagtataaaaatgttcctatttctccacatcctctctagcagctgttgtttcctgacttggtaatgatcaccattctaactggaatgagatggtatctcatcgtggttttgatttgcatttctctaatgactagtgatgctgaacattttttcatttgtctgttggctgcataaatatcttgttttgagaagtgtctgttcatatcctttgcccactttctgatggggctgtttgttttttccttgtaaatttgtttaagttctttgtagattctggatattagccctttgtcagatgggtagaatgcaaaaattttctccgattctgtaggttgactgttcactctgctgatagtttcttttgctgtgcagaagctccttagtttacttagatcccatttgtctattttagattttgttgtgattcatacttggttaatttttaattgcattgttttcttctgattagttgtaagtatacctgcatattgatcaaaaaagccgtttaacaaatcaaaaggaaacatttaacaaatacgtgacttggaagtattttctccaagtctgttgttgtcttttactcccttgtcagtgtgtattgcagaaaaatatgtatgtgtgtgtgtgtgtgtttacaaattaaagaaacaggtataatttcatttatccatagatcacgtctttggcattacatctgaaatctcatcataaaatatactaatagtgatttttttttccatgtctctaatctcaggccacaatctactcatgagtgtttaaacatcacctacttgattagaggactatcaccctaagatatttggaatatttctggaaggagatgtgttctttttcccattatttcctctatttagtcatttattaatatccgtattggtttatgaatgtctatttcatactctgaagtaaatccatgctatattattcattttattgttcaaatcaccacagctttattatgtgcttggaactcatttagtttggatgctgcatccttacagcacacctcatcattttgtttttgaacactttcctgtttcctggtattacaatacattctaagcccattttctatattaactttttcatacatagaatcagacatttttctaaagattgcttctttctgatgttaaaatatagtattaaaataaaatttgtgatactgggtatatgtgttgttaatgtggtataagtacttttaggacctctcaaccaactggcctagtaaatgtgcatgtttatatgaactcatgtttaaggacacattgaaactatttatgtatcttatattctgtaactttattacattaaaaatgagaatacactggtctcctcacccaactatgttaccaccatatcgacctttctaggcttccttgactgtccataatcacccactgcaaagtgaggaaccccatcccatcatatgccattgtattactagctgcacatttcaggacacatgcattgcagcatcagaaatgtaaagctgtacccttcttggagccatttttatctactagaatagagtgcttatgtgcagtttctttacactttaaacttatagaatttcctcattttcaaagttccttagatcagcaacttcgttttccactttcttcatgaagtcatttcaattacactgtataatttctttatttgaattctgtaaaagccgaaaactacagtcaagtaaacatagagaggatattccaggaatttacagagtgggtatcaaataagttaaaaaggcaatgtttaagaagagtaaaactatttttagtgatatgcgatggttgagacatgacacaattaatttgtctaagctcataattttgtgatgaaaaatataaacctaaatatatacaatttaaaatgatgtttagcagtacattatccctaggatcaaatgcagactgtataaaattatctaataacttatttggtgaggatgccatgagacacatgcaacggaggatgaactaattttccttatttgcatataagatgttgacattcactaaagatctttaatttaaaaaaaaatcaattttctatgtgacccaggttttttcttccagacaagcaaataacccacaggattattttctttccttgattgagaaagattttccccaaacttcagctcagttcaggcatatactgtccctaaatgggcatttaccctcagatgagtccacacacctgtcaacacgtggagtcttctgtcagacaaacacacctttactgatgtggattcttccctcagacaaaaacacatgtccccacatggacactttcctcagactaccatgtatgtccttacatttacgctttcctcagaaaacagacttttcctcatgtggactcttgtctcagacaagcaaatatgtctccatgtgaactcttcactcagataagtacacatatgtccacatttactgtttccctacacaggcacatatattcaatgttgaattgttttgtggcaaaatgatctcaagataatggtaattataaaccccctccctaataaagtgtagatctgtattttttttgttgtaacctaactttgccttattgtcacaaacagtaatttgcagctctaaatgcaccagttagagacaggtgtccattttctctggaaatgtatttttattttcttactggacatatttgttgataatgttgctactatgaagatacctgaacagtatccacattaaagaataaaaaagagtaatgggcagaataaccctgtgcatccagacccagaaatccgttgaccctgccctcccgaaatgaagacacagaggatggatgagcagtgctgagcagtgtacccatgaccacaaacatgaagacatggaaatgtgtccccactcctcctcatgaaaggcagctcatgccctcttccttcaggccctggtatggagccaccccatgtctctgcccttccttagtgtccacaccatggggtctgcactgatctggattcccttctcatccccctcaatattagtgtgccttgtgaatcaggtccagctgtggctgttctcagtctgtttcctctgtattcacagaagtcctgtgtgatgtttactgatggagtcagaaggagaaaaatttaacagcccagcagttcactgagactgtcctgcaaagcctctggtttcgggtttactgggtgcagcatgagcttggtccagcacgcttcacaacaggaattggtgtgggtagcaacagtgagagatcatatgggagttctaagggttactctccatgagtacagataaatcaacattcccaagtgacaccctttcaagtgcagtctaccttacaaggaccaacctgaaagccaagggcaaggccgtatattacagtgagggacacaggggagggaagatctgtctgagcccagacacaaaaatctctgcagagagacaggagggaactgcgtggtagatgctgctcagaaccaccatggggtggccaggaaacaaggggtgcttaggacctctagggagcgctcaggacgccaggggggtgctcagaaccactaggggacgctcaggacactaggtggcgctcaagacaacactgctgcactcatgtcaccacggggtactcagaaccaccagggggcgctcagaaccaccagagggcgctcagaaccaccaggtggcgctcagcaccaccagggggcgctcaggacaccagggggcgctcagaaacactcggggacactcaggacaagagggggtactcagaaccaacagggggcgctcaggaccaccaatggttgctcagaaccacaagggggcgctcaggacataggtggtgctaaagacaacaattctgggctcaggtcaccagggggcgctcagaaccaccaggggacgctcaggacatgcaggttctcttaggaggcagctgcacatcaggagcttcagaggctgtgatttcctttcagaccctggaaattcctgacctggtcaagcaaaagtcttccccaggatgtctgatttttccttttaattccatgatttcttttacctacaaaacactaacttagaacagggatgtaatgcaacttttattgctgcgtattttctgagtaatactagcaatgatctctcgggacaattattaaaataggttatttatatattttaattattaaaaataatactattattaaaatagtaaaattttttaaatcacacttgtaatcccagcacttggggagactgaggcagacagattacttgagctcaggagttttagaacagcctggcaacatggtgagatgctttctatacataaaagaagaaatagctgagattggtgcaaccagctacttaaaaggctgaggagggaggattccttaagcctgggaggttgagcctgcagtgagctatgattgtgcctccacacaccagccttggtgacagagtgagaccctgtcttagaaaaaaaaatgcatatcctcaatacagactatttccatgaatagagttttgtgtttttgtgctgtaatagtcaaacaattgtatatgttttctaacgttaactcagcatatgcatggtgttgttgtttctttttctttcatctgctgtttgtggagaataaacagcactttaaaggctctgtttctccactttgtttggcttccagtgtcctgtttttcagactgtttctccaccttcccttcttctttgaaagccatttatcttcctcagtctccatgcagagaaagaaagtccctttactttctgtcttccaagtctggtgaatcagttcccttcttttcataatcactgaagccaaccaagtttagaagtataacagttctccttagaatacgctcatctacctgcactctctgccctcctcatccttttctaggtccctccagacatcaccctcatcccataccctcccttccttaagtaccacagagtgggctcttcacctcctgctgccctctatgtgctcagccctggggctcactagtcctttgattatgaagtccaaatccctatgtgcttgcacactctcacgccaccctctaggaagctgccattgtgagagagtcctgaaaagcagggctgggtttagttccataatgccatattatgggtcaattagttatcctagtgaacatcctatttaattaatagatagagttaattaaatagagttattcctatttaattctattaaactattaataaattagttattcaatttattaataccaggccaatatttaaaataaataccattgcacgtttaagtgacatatttgacaataattgcatttacatacagttttaccaaaacatgtatcgaagtgtatttgtttttttaaatattggaataggcagacatacacataggaaaacattattttgtactacaatctcaaactgcaaacacaatttaaatgccattaaataattagaataatatgaaacaaatgggcatggtgttttggtgtttaaatatacattcatttcacctgatcatacttatgtgtctttgctgggctgctgtgcatgtatgtgtatttgtatgaccatgaagctttcagatacatcattaaattacataaagtgttaccatgcacttccctcttttaggggacaaagtaaatctttcagggcaatcgcagggaaaatgtgtggttggatcttccacacagagtccctaccatgacattgccaagtagagctatggaagggggctaccaacctccagaccccagaatggtagatccacaggcagcttgcagctcgagtctggaaaagccacaggcacccagctccaacccatgagagcagccttatgggctgcattagggaagtcacaaaggtagggctgcccaaggccttgggcacccacccttgcaccaggtcacaagacatggagtcaatgattattttagagccttaagattgaaggactgtccgactaggttttggccttccataaaaatctttacccaatttttgggccattttctctttttagcataggactcctcacccaatttctgacccatcattgtactttggatgtaaataacttatttttgatttttcagtctcataggtgaaaggaacttttccttgagtctgaactttggattttgaattaatgccaaaacaagttcagattgtcagggaccactggggagggattattgtatattgcaatgtaagaaagacataaggggcagaatgatgtggtctggatgtgtgttttctccaaatcttatgttgaactgtgaaccccagtgttggaggtgaagtctgctgggaggcatggcattaggggcatatccctcatgagttacttcgtgtcatccccttggtgatgaatgagttatcagttcacatgacagctgattgaaagagcctggtaccactcccttctcttatcttcccccctattgtcatgtgacactcttgctccccttcatcttctgccttgactgtaagctttctgaggcactcagcagaaacagatgtcagcaccacacttgctgtacagcctgcacaactgtgagccatataaaacctatgtcctttataaattatccagcctcaggtatttctttacaattcaataatggacaaacaaaaaaattatttaattgtgcagcaaattaggggtgtggaatcattaaaatggacttaacgcctgtaaaggtaaaaacacaaaagtctctctctctctctctctctctctctgtgcccttctctgtgtgtacatacacacacacacacacacacacacacacacacacacacacacacacgctccacgtgaagatgtcatgtgaccaaatagcaatatggtggctgctatgagccaacagtagaagcctcaaaataaaacctatcttgccagcatgtttatctttgaatttccagaattgaggaactgagataaaattaaggttgtgtaagttaccaagtatgattgtttttaatgtttgaactgactaaagagaatttgggatgaagaagtggggttctgatgttacaattatttcaacactgtggaaagtgccttggaattgggttatgtgtaaaaggctggatagttttgacatgcataaagaaatttatatattaagtgtcattctgatagattaaaatgagtagagtgctattggaaactggataaatggtgatctttgttataaagtgacaaaaaaaacttgtctagactatgttgtgatatttagtaaaagagaactttgagcagcaaaattgaatatttagctgagaacatttctaagtaaaatgttgaaagtgtagtttggtttctcctgggcatttataataagaaatagatgaattgaaaatgaaattataagggagaaaatatccaaaacttaaaggcttggaaaattctcaatctatctgtgttgcaaaaatcagaaagtgcgttctgaagagaacagtgagtatgaggctgtaatatcacttgataaagaatttatggtattaaaagagaataaatgcaggttttaaagaacaaggatggagatgagacaaaatggacgaatactgtcagattcttcagatttaagaggatggagctacttggttgcaaatgtgcaccattcttccagaacaaagaaaaataaaccttgaatttatttagaagtaatcatgaccactaccttggtttcaacagaccagaccatccatgcttaaaaccttgaggaaaagacctcctaccactgcctggaacttaggaactcccagtgagccttgtgtgtaggcctgcatggggtctttgggatgggaccttaacccagcagttacccattggtgcctctacttaaagcattggaattaattctgctgctccaatgagctgggaaagaagaagcttggcccagagaagattccacttgagccttaaggtctatggtaatttgttttgttatgtgttgtacttgctggggacacatcacccctcctttcttttctatttttctctttgggggagaaaatgtctattttatgcctaactcaccactgtattttgaaatcaaataacttgtccagagctatggactgaatgtgtatgcaactccaaaattaatattgtggaaccctaatccccagtgtggtgtaattggggtgtgggccatttaggaggtgatcaggtgaaaaggttgaagccgtcataaatgagattagtgctctaataaaaagtcacgggagagcttttctctcttgcttccctgtcatgagatgatacgataaaattacggccatctgcaattcaggaaggaaacctttacatacacatgattggctgtcttgggcttcccagcattcggcactgcacagaataaatatgtcttgttaaagtcatgcactttatgacactttgttaaagcagccccaataaaataagatatctggttttactggctcagagttggagagaaatttgtttcagaaataattctacctcaaatcttactcatgtatggtttagttaatatttaaattatgttttaaacttgtttagagttgatgatgaaatgagttaagagtttggggactgttataatcaaatgaatgaactgcgaatgtgtaaatgccatgcatttgggggatggtcttttctattctgggtctttcatgcctacgtgtgaattgaaggattgcttttcttatttctgtgaagaaggccattattattttgatagataatttatctaatctgtaaataactttgggtagtatgaaaatttcaatactattaattcttccaatccataaatgtggagtatctgggatatatgtcctatttatgtgtgtccatttcattttctattaccaataatttatagttatcctctagaaatctttctcttatttggtaacatttattcctaggtatattttgcagctattgtaaaaggaaaggcttcatggatttcattctcagatgttttgctgtcaacatatagaaatgccaccaattattgtatgtagatgatgaatcttacaactttacttaatttgcttatgaattctaatagtttgtgagaaggctttagttttctttttttaatataagatctttttgtctgctcacaggaaatctgacttccacaattccaaatttgaggtcatttccttttactgttaactaaatactctggctagcatttcagtactattctgaataaaagtgataaaaatggttattttggtcttcttccacttcttagatgaaaatttcccggtttttccatgcttcgtgtgatgaaagctgtgtttttctcatatatgcgctttatttttggagatatccttcttgtatacctaatttttgataatttctatcagaaatgaatgttgaattttattctatgattttctaaaatatcttgactacacaataacacagtaatatgcaggtcaatacatatcaactgaatttcacttaatatcatcccaacttctaatatttattttttagtattagaacatgcctgtttccatattatatttgctcacaggtattggtacatattttagctaatttgtcattattttactctaagaaataactcaaaaaatcatttttattatgaattgaaaggtaacatcggcaaaattagcccaatcttaatctttcccagactttgaaacattattgaagacaatgaaggggaaagtcagctttagttgagcttctaagaggtaagtgaggtaaaaacccagggcttattggctacgactttgaatgttactgtcttcttttccataagccacatccagaccattttctaaatctaagaaaactaattttatctcactgcttcttagtcttgtttcctgcagctgacaaccaaaactgtcagcgatagagcccagtgtaaatcaccagcctttaattattgcagaactatgattttacaacaacattgtgagttacataatgatcctactttatggccgcggtgcaaatgcttaacttccactaaatcacagagctcagaatggctagcatggaggtgtatatgtatatgtgcattgttctagaaatttccaattactgtatattattgtttgcagtaattaggtcaatctgaactgacaaaagtctccatggccttataagcacagagaccacctccacggcaggtggaaatcaaggctgggaacaggctaccagctgctcccctgggattcctccaattaccctgtttaaagcctctgctcactcatgcgctggaagagggatgtcagagatgcagcctactcttcctaaagggctgacagggcataaagacaagactgattatccatggaacattcctataggaatgcacctatgtgcaggcacactaataagctgtgtgtcttgcagtgtgtaaatggctgagatgccatttacacttctttacacaatacatttttaaatgtttgggtgatgtattctctatcattcaaaaaaatcatcactttccccctaaacaaagaggatttttatcagaacacttatgggaagccccttgctctcccagattcccaccctcatttctcctgaaggaagaaagaaaaccatctctattgatttccactctcatcctctaggactaaaaccagaaagctgcatgctccctgggtgagccttagagaagaccctgtctgtaggagcaggaatctcagagccttggctgagaggcatggtcctgaaatgagatggagtcccccatggagatcccacgtggacgcccacacctgagggctcactgctcctcaccacagatgcactcccctactgagtcctgagacctgagtgcaccccatagagtaggactcagatgagggaatgcaaatctccaccagctccaccctcctctgggttcaaaagctgagcacggggcctcgctcagtgactcctgtgccccaccatggacacactttgctacacactcctgctgctgaccaccccttcctgtgagtgctgtggtcagggacttcctcagaagtgaaacatcagttgtctcctttgtgggcttcatcttcttatgtcttctccacaggggtcttgtcccaggtcaccttgaaggagtctggtcctgtgctggtgaaacccacagagaccctcacgctgacctgcaccgtctctgggttctcactcagcaatgctagaatgggtgtgagctggatccgtcagcccccagggaaggccctggagtggcttgcacacattttttcgaatgacgaaaaatcctacagcacatctctgaagagcaggctcaccatctccaaggacacctccaaaagccaggtggtccttaccatgaccaacatggaccctgtggacacagccacatattactgtgcacggataccacagagacacagcccaggatgcctcctgtacaagaacctagctgcatctcagtggtgctccctccctacctctgcagaacaggaaagtgtgactgagatgccatttcctgccagggcttgtgtttcctataccaaccagactcagagccctgtctgttttcctattctgtactattaaatggcatgttccctgttagtgattcacgcaagcagaggctgtatcctgtttgacaaagattgagcatgaaagattcccattacctgggccacatgcatcactgatatgtggccacttatttcttgagctcatatccttccaaggggctgaatacaaatatctataacataggccatcttaaactgcaggaagtaatgttggagaagaatgtggagataaaagagcaggatgattaattaaaatccagataccatctttttttgcagagaaaaatttacactaataaagtaattttatgaaacaacaagaaagatggaatgtgtcctcatcatggagtgtctcacttgcagtgcacaaataaatttctaaaaattttatagggaagatgtgatagatgaggctgatttccacacagggagtgattaaatacccaggtaagtataaaatccaacacttggaaaggaaaatgcctcagcttgacatcagaaacccagctcagtaagtctgaggagcaatgcggaaaagaaatgaaaaattcgacaacacttttcttatgaaatccctagctcatgtttgaacacgaaaacagaattgtccacaattttaggacagccatcgcatgacaacaaaccactacaatgataggagcatcactgagtcaacggagttcaagcagtgagcagatcagtactgaggccccaggagaaccaaggctctttggtacattttacagaacccagaaccgagccacataatctatggccaagtgatctttgacaaagttaacaaaaattaaccaacgtatacaccagggaaaggacaccccattcaataaagggtgctggggatattggatagctatatgcacgcgaatgaaactggacccccaccctcaacatgtaaataattaacacaaaatagattaaaggtttaaatgtaagtcttcaaactgtaaatgtattcaaataaaacaccaggacaactcttctggacaaaaagcaaacaatagacaaatgggacttaatgaatctaacaagtttcttcacagcaacagagtgaacagacaaagtgcagaatgatagaaaatatttgcacactgtgcatctgacagagtactaatatacagaattaacaagaaactcaaaccacaacaacaaaagaaaacaagaaccaaataaccccattaaaatgagcaaagaacatgagtagacatttttgcaaataacacataaaaatggacaatagatatataaaaatgctcagcattactaataatcagggaaatgcaaattaaaactagtgagatataccattcacaatggctgttattaaaaagtccaaaataacagatgttggagaggatgaaatgtaaagggaactcttagacactgttgatgagaatgtggacgagtacgacctctatagagaacagtatggattcagtatgatattgactgtgcatttgtcataaacagctcttattattttgagatacattccatcaatacatagtttaatgagagtttttagtattaaggggtgttgaattttattgaaggcctttgctgcatctattgagataatcatgtgttttttttccattggttctgtttatgtgatggattatgtttattgatttgcatatgttgaaccagccttgcatcccaggtatgaagccaacttgatcatggtggatttgaaaaccggcacaagacaaggatgtcctgtctcatcactcccattcaacatagtattggaagttctggccaaggaaatcaggcaagagaaataaataaagggtattcaaatagaaaaagaggaagtcaaactgtctctgtttgcagatgacatgattatatatttagaaaaccccatcatctcagccccaaatctccttaagctgataagcaacttcagcaaagtctaaggatacaaaatcaatgtggaaaaatcacaaacattcctatataccaataatagaaaaacagagagccaaatcatgactgaactctcattcacaattgctacaaagagaataaaatacctaggaatacaacttacaaaggatgtgaaggacctcttcaagagaactgcaaaccactgcccaaggaaataagagagggctcaaacaaatggaaaaacattccatgttcatggataggaagaatcaatatcgtgaaaatggccatactgcccaaagtaatttatagattcaatgctatccacatcaagctaccattgactttcttcacagaattagaaaaaaactactttaaatttcatatggaaccaaaaaagagcccatatagcctagacaatcctaaggaaaaagaacaaagctggaggcatcacgctacctgacttcaaactatactacaaggctacagtaaccaaaacagcatggtactggtaccaaaacagagatacagaccaatggaacacaacagaggtcccagaaataatgccacacatctacacccatctgacctttgaaaaacctgacagaaacaagcaatgtggaaaatgatcccctatttaataaatggtgttgagaaaactagctagccatattcagaaaactgaaactggatcccttccttacaccttatacaaaaattaactcatgatggattaaagacttaaacatgagacctaaaaccataaaaacccaagaagaaaacctaggcaataccattcagtacataggcatgggcaaggccttaatgactaaaacaccgaaagcaatggcaacaaaagtcaaaattgacaaatgggatctaagtaaactaaagacttctgcacagcaaaagaactatcatcagagtgaatgggcagcctacagaatgggagaaattgtttgcaatctatccatctgaccaagggccaatatctagaatcttccagggacttaaacaagcttacaataaaaaaaaaacaaccccatcaaaaattggcggaaggttatgaacatacacttctcaaaagaagatatttattcagccaacaaacataaaataaagttcaacagcattggtcgttcgagaaatgcaaatcaaaaccacaaagagataccacctcacaccagttagaatggcgatgattaaaaagtcaggaaacaaaagctgctggagaggatgtaaagaaataggaacgtttttacactgtggtcggtagtgtaaattacttcaaccattgtggaagacagtgtggtgattcttcaaggatatagaactagaaatgccatttgtcccagcaatcccattatttggtatatacccaaaggattataaatcattctgctataaagacacatgcacacatatttttattgcagcactgttgacaataacaaagacttggaaccaacccaaatgcccatcaaagatagactggataaagaaaatgtggcacatatacaccatggaatactatgcagccataaaaaggatgagttcatgtgctttgcatggacatgggtgaagctggaaaccatcattctcagcaaactatcacaagaacataaaaccaaacaccgcatgttctcactcataagtgggagttgaacaatgagaacacaaggacacagggaggggaacaaacatcacacaacagagcctgtcggggagtggggggctggaggggatagcattaggagaaatacctattgtagatgatgggttggtgggtgcagcaaaccactatggcctatgtatacctatgtgacaaacctgcacattctgcacatgtatcccagaacttaaagtatagttaacaaaaaagagagagagagagaaaggaaacagtatggagactttccaaaaaatgagaaacagtactggcctttattctaccaatcccactactgggtagctacccaaagagaaagaaatcatatttcaaaaagatacccacacttctatgtgtaccacaaatctattcccaatagcacatatgacaacctgagtgtccaccaacagatgattttataaaagaatatagcatatatgcacaatttaatactagtcagccacaataaggaatgaaactgtgtcttttgcagcaagatgcctagaactggcggacattataattagtgaactaactcacaaacagaaagccacatatcacacattattacttataagtgggaggaaaacagtgtgtacacaagatatggagagagggattatggacattggagacttagcagaatgggagggtaggagttggcagcatgatgaaaaatcacctaatgggtacaatgtacgttacttgggtgttggttacactaaagccaataccactgtgtaatatttccatgtaacacagttgcacccatagcccttaattttatacaaataaagataaaaccaattacaatttaaaatataaaattattaatagttgaccaaagatcttgaaaattaaaatttaaatcatgatcaataaatgaaattattatcagttgaactccatttaacttaaaatcctgtggtcctcaagtgatttcaagaaaatgaatgtcaagttttagatgaggagatttgcaaatcatatcaccacctatgtaattatagtaagaaccctcaaaactcaacagtgaataaaagaagaggcaacccattgataaaataggcaaaggtttgtgcaggcatttcattaaagaagatgtacagattacacataggcatataaacaggatctcaacaggatttttcatcacagaaattcaaatcaagaccacaataagatacccaaacaccctttttagaatggctgaaattaagaagaaagatggatcataccgatgctggtgagcataccaggtttctagagtctaaaacattgctaatgggaatgcacaatgaaacagctacacaggaaaataattcttagtttcttgtaaaattatatatgcccttaacacattacctaaaaatccccctcctgtaatacagtaatacatggctgtgtattactgtgaaagaggcatagtgtgaaaacccacatcttgaaaccctgagggagaaggcagctatactgtggctgaggagattacagggattatttgattaaagacttttttagaaagtgaggttaaatcagccgggcgtggtggttcacacctgcaatcccatcactttgggaggccgaggtgggtggatcacgaagtcaggaatttgagaccagtctgcccaacatggttaaactccatctctactaaaagtccaaaaaattagccgggtgtggcggtgtacacctgtaatcccagctactctgggcgctgagacaggagaatctcatgaatcggggaggctgaggttgcagtgagccgaaatcgacccactgcaccccagcttgggtgacagtgcaagactccgtctcaaaaaaacaacaacaacaacaaaaagaaagcgaggttaagtcattgaaaaataggaaaatataaatgtgtatgcactctaattatttgggaaattttccatacaacttgtattctgtaaacaaaattcagggagtggaaaacaaatcaaattaataaaactgatataagaattcctctgaagatattagtgtgagcactaacacacacttttgaatgggtgttgtaaatattttggaacacacctcttaggtcacattttaattctacatttatgtaaattatataaaatatcgaaattttttaatgtctccattttgtgcagttataattttggtttcatgccagcaatgcatgatagattccgttcttccacatcctcgttgccatttggcactataagcattgtgtattttaaccattctaatctattggtggtgatagctcattgttgtttaaatgcacatgtctctaaaattttatatttaattattttatataattgtgatgaagtgtttgttatggtatttggctcatttttgatagcattgtttatttttgatcagttgtaagtttctttacatacccattatataagtcacttaaaaaagtacttagctggtcatgaaccccaggatgagatgcagactgtatagaaatctctagcaatgttactcagtgtgggcagggatggcatgagatgcggggaataaagaataaagtaactttctccatttggatataagatgtgtccattcactagagagttttctttcagaaggttcccatgtgagccagtttccttcctgacaaggaaatcacccagaggattctcataatctcttaagtgagaaaagttttcctcaaactccagctcagtctagctcacactgtctctaaatgggcaattactttcagacatgtacacacatctgtcccaacgtggactcctccctcagacaagcacacacattgcaatgtggactctcccctcagaaaaccacacatgccccacaatgactccttcttcacataagcatatatgcctgatgctgaactgctgtgtagcaaaattagctcagaatacaagcacttatggactctagccataacaatgtgtagatctgcattttattttaaattctaaatgaacattttgccttcttgttaagaacagtggtttacagctctacatgtagagactacaggcagatatatgtttcctctgggaaaagtttattttcatgtatttactgggttattttgttgataaacattcatctataaagacacctgaaaagtgccctcattagagaaaaagaaagtgtagtttgcagattaactctgagcatccaatcccaggaatcctttgatctgccctccctgaaatccacaggcagaggggggatgatcgctgataagtagcaaacacatgtccacaggaagggagacatggaaatgtggtcactcccacactcaagaggagcagctcatcccctgtccgtagtggtcctggtgaggagccaccccacacctgtgccttcctcagtatccacaccatggggtctgtgctgatctgggcttcccttctcatcactctcaatattagtgtccttgcggatcaggctcagctgtggctgctccagatgaggctgttactcagtctgttccctctgtgtttgcagaagtcctgtgtgaagttcaccgggggagacagaggaaataacggtgcagccgggggctatctgagtctctcctccaaagactctggattcaccttcactgattgcagcataagcttggtccagcaagctccaggaccagggttgatgtgggcagcaacagggagaaattgaagaggaagctctcagtggtgccctccatgaatacaaagaatcttcacagtccccaggacacccttacgtgcatggtctcactgatatctttacttcttttatcacttttgttatgtaaatcacaatgaatagtgtattcctcatctattatacatttgttaagtcttttttggtgtctttaaaaaaactgataactttatagtatgtaatatccttaagtcctgaaagtgttttttgatgtctaccttgtcttaaatttatacagctactatagcttttcttggttcatgttttctcatatttatcttttctatttgtgaatatgtagagaaactttcttgtacatagctaatagttgtgtattgcttttttattttggcaggccttaaatattctaattttttatgatactttaagttttagggtacatgtgcacaacatgcaggtttaaacaaacaacctcatcaaaaagtgggcaaaggatatgaacagacacttctcaaaagaagacatttatgcagccaaaaaacacatgaagaaatgctcatcatcattggccatcagagaaatgcaaatcaaaaccacaatgagatatcatctcacaacagttagaatgacgatcattaaaaagtcaggaaacaacaggtgctggagaggatgtggagaaataagaacacttttacactgttggtgggactgtaaactagttcaaccattgcggaagtcagtgtggcgattcctcaggtatctagaactagaaataccatttgacccagccatcccattactgggtatatacccaaaggattataaatcatgctgctataaagacacatgcacacgtatgtttatagcagcactattcacaatagcaaagacttggaaccaacctaaatgtccagcaacgatagactggattaagaaaatttggcacatatacaccatggaatactatgcagctataaaaaatgatgagttcctgtcctttgtagggacatggatgaaactatctattgcttttttaaatcaactataataaattctattttttttttttgagaaggagtctcgctctgtcgcccaggctggagtgcagtggtgcgatcagggctcactgcaagctctgcctcctgggtttatgccattctgctgcctcagcctcccgagtagctgggactgcaggcacccaccaccacgcctggctagttttttgtatttttagtagagatggggtttcaccgcgcttagtgaggatgctctcaatctcctgaccttgtgatccacctgcctcagcctcccaaagtgctgggattacaggcatgagcaataaattctatttttaaaccaacaatatttttttccgttaatttttgtttaaattaacatttagtaatgatgcttatttctctattaacatggtatttaattaccttcctataaatattgtatagttaccataagatttacaataaaaattgtgtgtaattagattctaatgtaaatcctgtgatggccttgatatgaagaacacagatagtgtaactgtgtgctttgaattcctccttctcgccactctttcttgtttattctgtttgcacttacatatgctgtaaaatagaatatgtaatttattattactttatacagtcatatcttatagcaattacaaatgttaaagagtacaattcatctagattttcccatttttacaatctttatttcttcgtagagatttctatttgagtgcatatcacatggctactcgcagagaatctttgtaaaatgtgccctgaaacatgaatgtgctgacaacacatattctccagatctttttttctgacagaattttatttgccattcacctttaatgaaattttaatgcatgtagaatttcagtttgcatttcacctgtaatttattttcttgtaattattattagtttttcctggagatgatcacacattacattctgctgggcctttattaaccatgtttctgcgaacctagtcaggcttgggtttcaagtgtatggttgccgtggctatcagagttgaaatcagcttctcctgttcacaaaaacttcaggttcctctggtgatacctgcgtttgtgtccctgtttggctttggatcttcacatttcattctccccaaagaaaggctgtctctttcagctgtggcaggtgcatcctgctgacacatttacttggtgactttttgtgggatgaaggggcttggacacaggggcacgttttccaaccttctggctgagcctccttcttagctatgggtggtgagactggctctgatgcatgatcttccaagtgttcctgttccttcccttcctcagtgtcacagtgtctcttcccagtcatgctgttttttcatcagtgtcctcagcttctgacccactgtccttaccccacagattctggatttcattcctcaggaaacagacgggaggtgattctgggtagagtttccctgatgtcctctgtttccttgtgttctagttgattctaccagtgcccacaggacacaagatttaataaatgtctcctgcatataatgaagggggattcagcattgaacggagctactgttcttcctccccagtcaacaccacaggacagcaggtgggtgagttgtctggggatttccccaattctgtaggaaaagcctgcaagtgccaggagtttcacactctcacaccattagcacacacgtcttcaagcaactcattaaacatttccaggttagctttttcctatcttcaataccatgccatgagtggcacctgccccaggtactctaataaacgcaccctagttctctctgcgggcccctattttctcatatttcagggatttttttctctgtgacatcaactcagatatggtgaggggtttattttttgtaattcttcatgttttttgttaacgaggtcagaataatatcattttctcaatttttacattctaacgcttagtatctgatttctaaataaaattcagaaactaagacaacaaatgaagtatccattatttggtgcattgttaaacaatttgagaaatattcatgtactgaaatagaatgaaccactgaaatcaaggcatgcctcattcacataagaacatgagggcattatcaaataattttgctgagtggaggaagctaaagaattcaccatcaatttcatgtgatttcatttgtataaatcacagaagatgcaatattctaaattaacatagagaagatctgaatttctctgaaaatagggtgggcagagtaacaacgtggtgaaataaaattatagacaagttagataaaaaaattagaggttaacttaattgctaaaacatgattgaagtgctgattcaatgactgcacacatatatcaacattttccaaatgcttcactatcaatttgatttcattattgattgtttttttaataaagcagtaataaaaatgaatatattggctgagaaagagcaagaaatggataaataccgacacttgaataatcaaggactcctgaaaatacacacatgtgaacactgattgtagatttcaggtaaacactagaaaaggcaaaattacacaaagttgttatgacaggagggacatcctgaaaacctctctaggcatgtcccacaccaccctggagctgtctcaggggagcagtctcctccagtgtttagaggcacaggcacgcataatagggctaactctggccagatgtgtgatattggacacattgcacaactgctctgttctgtatgtaatttatcttctctacaaatgtaacattgacagttgcattaaatatattctgcaaatatgtaaaagttaaataagctgatgtctgctaaatgattaccaaggcacaatcacataatctgaagttatattttccagagtgataggattacctccagagttttccaggacactctcatctgctccgggcactgccttctcctcagccgtcccacccctgagcttgctatatagtaggagacatggaaatagggcccactctctgctgataaaaaccagcccaaccccgaccctgcagctctgggagaggagcccagcccccgaattcccaggtgttttcatctggtgatcagcaccgaacacagaggactcaccatggagtttgtgctgagctgggttttccttgttgctattttaaaacgtgatctatagagaactagagatattgagtatgaatggatatgagtgagaaacagtggatacgtgtggcagtttctgaccggggtgtctctgtgtttgcaggtatccagtgtgagatgcagctggtggagtctgggggaggcttggcaaagcctgcgtggtccccgagactctcctgtgcagcctctcaattcaccttcagtagctactacatgaactgtgtccgccaggctccagggaatgggctggagttggtttgacaagttaatcctaatgggggtagcacatacctcatagactccggtaaggaccgattcaatacctccagagataacgccaagaacacacttcatctgcaaatgaacagcctgaaaaccgaggacacggccctctattagtgtaccagagacacagtgaggggaggtcagtgtgagcccagacacaaacctccctgcagggccatgcgggtggtttcctttctcagctgcaggaggcgggcttattgttgcaggactctggagacttattaggttgtgatattttactatggttatttatcatgaacttttttattgggaattgtgttttattaatttttattttatatgtaaggttatttttttaaaatacataccttcaagaaataattcttcctaataatttgcacttgttctttttagagttttgttaacatctgttgatatcagctactacatagctatagggacattaatttacatctatagacatatgtgtaaatacacaaacttatacatatatgtggtcttttatatttaatgttataataaaattattataacaattataaaatacatcctaaagaatgaaacatatatagtaatccatattcctttcaatcattgcctatagtttacataaattgatgtctatttgtaaccttaaacatagtgtattggtcattttcaaacatccaagaacaaatttcaaatgtccttgtcacacacacaaaaataaaaatttgaggatttgaggtgatatatatgtcaatcagctcgattcaattattccatattgcattcataaatcataacatagctttattcactataaatacatacaaccaaaatttctcaattttcaatgaaattttaattatacatattttatctgtcctaggtcatgaatgtttttctccctgtccggatgtgattagattgtcctgagaaacaaattcagcttcctgcctcctgaaggcttcaggaagcagctcctagatggggtgaagcaggcaacccgtgtgtgtccacaggacccggagcctctctctccttggattaggccccctcctcaggattacagggctcttcagttttctcaacatgctgttataccagagaagcacaaaacacttaatttcattatatttttcttcaatttttcaaaacaacacaaaggtaataattttaacaataaacatattacaacctactatacatgagacccttcctgtgcttcgaggtttcttctcaggactttgtatgtattacatgttttcagtttttttctgagatggaatgttgacgtctccttattacagattattcttttaatttgtctcttagaataattttttccagagctcctgcccgcccgcgcctggcggaatggagcggcgccagggctgagccaggcgcgcaggggccgccgcacgtgccgcgcggggagcggatgcccagcgggcggagagccagcgccagaggccgggtcggagcggccgctggagcagcgtcagaatgggagaacagcccatcttcaccccccgagcgcgggtcttccagattgaccccaacaccaagaagaactggatgcctgcgagcaacaggcggtcaccatttcctgtttctatgatgtcacaaggaacagctatgggatcatcagtgtggacagcgccaaggtgaccataaacaacacaattacacagaatatgaccttcaccaacacgtcacagacgtctgggcagtgggccgacagcagagccaacacggtgtttggtttggggttttcctctgagcagcagctgacaaagtttgcagagaaattccaggaggtggaagaagcggccaagacagccaaagacaagacccaggagaacatggagccctcgagtaatcatcctgagaatcagggcgtggagccccatcttctactccggcatccagtgtcaacgggacggacgatgaaaggcctctcaggccgctgcagccgacacgcacctgcagtctgggaaccacaagctgaaggcggcctcgacgcagagctgcccacgggaagaggtgggagatggagctgcagacccggcgggagaccgacttccggctgcccacggcgctgcaggagtcgacggccagtgcggagcagaggaagaggccgtgagtcagagtgcgactgtgtctctgagaagatggaggcggcagagagaggatcaaaacctggaagataaagtgcgttccctaaagataggccctgaggagagcaaatcccgacagcgccacctggaggcgcttcctggtggcgctggaccggaagatccaggcctgcataacttccgcccaggcctcccaggctgggcaccaacaactagggctggcagaggcccgggatccccaacgtgagtcctaagtatgtgtgcgagaccagatggcgctaggacgttccctgtgtgcgttgcttctgtaaatgcaggcgccgtgtgtcgtgtttccaaaccagttgtgccatccactcactcctttccagaatagaaatctctcgcttctctggccttgtgaggttgtggacaactggaagattctgactgaggaaaccagaaccaggtctaccttcaacatttacgcagtcaggccagggatgtttatatcgttcataagggttgttggaaccatatgaactgaaaaaaagcattttctcatccaaatattgatattctttacaccaggccatcgggctccttttatccgatagcattcagagtatttgaaggtcctccaggtgccagccttgggggcacagggagaacaacattcctctccgaaaacatggggaagctttaaaataactgtttagtggagacttgcccagagatggaaaacaggtttctggtgagtacattttctggtttgggaatcacctgcatccccgatcctgccccgtgccccccagtttgtatggttgtgacaatgttccatttctttgttttaatttctgagcagttgactgtggtgcgggaacagcacacagtgagggtgcctagcacaatgcctggcgcaaagtaggtgctttataaatatttgttcaattaaaaaaaaagagggaggctgaggcaggagaatcacttggaagctgggaggcggaggttgtggtgagccgagatggcgccacttcactccagcctggcaacagagcaagactccatttcaaaagaataaaataaaataaataaaataaataaataaaataaaaaatattttttccaagccccactcaaaaccatggtattgttagaggtgtaatagttggaccaacattgaaaatacattccatttagttcatgggcgtgcaaatatccttttttctttaaaaattgttctcagttgtaatattacaaaaaatattggtaatttataccaatgacacaggttaaaatgttgtataaataatttaatgacgtttgattggaaaaaatacatgtgccacatgtcgacaattttttccttctctatgaaatatatactcattaataagtttcagatgttacagttatctttttgatttctgggatttaattttagtaggtatacttgaatgcattttattaattcctataatgatgttgatatttcatgtaggattttaatactaattttactatttactgaattttaaactattctacatgttttatttatataagaaaaaaattacatatgagaaaaaatgcgtagacctgaaatgtatcactagagagtttctgtcaaatgtgaatacctttgttcccaacacctaaggtagcctgaagagcaagtccttccccacaacatgcgtctttttctgtgcttgcggtcagctcctgcatggggaaatgttttgatttctgacactatagatccattttttttctgttttgaactttatataaatgcaatcaaacattttagaccttaatttggtaatgggctacattgctattttttgaggttatttcctgctatttaaggtattaaattagatcaacatattatcatttattcaagtaatggactgactctgatatgaaacctcaaagttttcacatatatatggagagagagagagagagagagagatgagggagagaggttttatatctgagtcagtctgttaaataagtaaatgacagtattttgatttattttcctgtaaatcgactttaaatttgtttccagtttatgaatattataaacaaagctgttacaaatgtcttagtgtaagttttcctatgttgtcttccttttattgagaaaatatgaagtatgtatttattataagcttaaattttttcagttttattgaggtataattgaaatattttaataatgtatagctttaaggtgccccacttgacgttttgatgttgtattagtccattctcacggtgctataaaaaatgcctgagactgagggatttgagaaaaaaagtgtgtttaattggctcacggttctgcaggctgtacaggaagtgtagtggcttctccttctggggagagtcaggaaagttaggatcatggcagaagacaaaggggagcaggtgcgtcacatggccagaccaggagccacaggaagcagggaaggtctacacactgttaggcaactagatcttatgagaactcacacactgtcatgagaacagcaccaggagtttgttctaaaccattcatgaaagacccaccccatgtcccagtcatctcccaccaggtcccaccttcacaattgaggattataatacaacatgagatttggggcaggacacagatccaaaccacatcagatacacattgtgaaatgctcatcatggccaaggtaatttgtatatccattttctcatggagctaccattttatttttttaaaatgtactacatgtgtgtgtatgtgtgtgtgtctcatgagaacacctacgatctacccgttcagcaaaaatcacatttacaatacagcattaaatacaagaacattgcagtacattagatctgcagaactcattcaccctgcacaactggacctctacccttcgaccgacatcatctgatttccctctcctcacaggcctgggacccactattctactctctgctttcaagagcttgaatattttagatcccacatgtaaatgagatcattaagtctttctgcatctggcttattccactaagcatcatgtcctctagccccatccctgttgttgcaaatgtcagaatttccttcttttcaaagcctaataaaattcagttttctgtgtacacattttctttacacattcatcaatctgtggtcattaaattattttacaaatctacactattataaataatcttgcagtgaacatgtgtttgacataataattttatttcttttgaatatatgacaagaagtgggatcaccagagcatatgatagctttatttttcaatataatgaataaccaaacctaccacaccatgcttttgaagtcttagtcatattttatttgcctaggccaatgtcccgaaaaatttctcctacattttcttcagtttgtacatttaaatattgaatccatattcaattaatttttgtctatggtgaaaaactagaagtctagttttattcttctatgtgtggctgtctaagtttttcagcaccacttactgaatagagggttgtttctccattgcatatttttgtcagttttgtcaaagaacaggtggttgtagaaacttgtctttatttcttggctgtctattcttttacattattattattgttattgtttttagtagcagtaccatgctgtctttcttactgtatctgtgtagtataatttgaaatcagggaatgtggtgctttcagctttggtctttttccttgggatttcttttgctattcaggctgttttttgattccatatatatttaaggattttttttaaaacatgtaatcaattatattggttacttgataaaaattgcattgaatatgtatcttgctttggacagtgtattagtctactgtgcattgctataaattaatgcctgaggccaagtgatttacaaagaaaagaggcttatttggcttacagttttggaggctgtgtgagaagcatggcaccagcatctgcttcttgtgagggcctcaggaagcttacggtcatggtggaagacaaaggggaagcagacggtgtcctgtggtgagagggggcacagaagaggggaggagggtcgctagactgtttttaacaatcagatttcaaattagctaataaagaaataattcactaattaccatgggggtgataccaagccatacctgaaggatcttttccccacaatccaaaaactcctactaggacccacctcaaatattttggatcacatttcaccatgagatttggaagggacaatcacctaaactgtagcatttcactcttgtgtcccctggtctcaaatccttgtaagattgcaaaatcatctttttttaaaatagttcccaaaagtgttaacttgatcaacctccaactgaaaattacaaagtctcgccagggtcttaaggcaatttccctccagctgcgtgctggcaaaatgttttaaagagttatgtacttccaaggtgcaatattgccattgggtaaatattgtcaatacaaaaggaataaattggccaaaggccccacacacacctaaagcctagcaggacagatattaaatcttaaagctacaaaataatctatcttgactttatgttcttagtcagggtacaccaggacaaagtgggtcccaaaatcctcaggcatctcatccttatggctgggcacattccatggggctaataacacaggccagagtcaagtgccagaagtagttccaggttgggagtacaagctgcctttggatctaccattctgggatcttgagggttgtggctgcatttctgtagctccactatgaagtgccctagtggggactctgaatggggttccaaccccatctttccccatctttggtactgccttcgtagaggttgtttgtggtggatccagtcctgtagcaagcttcctcctgggcacatagggttctctacacatcttctgaaatctaggtagaaactgcccagcctccttcactcttgcattctgcatatctgccagaatccagttatcccagcaccatttactgaacacagaggtttttttccacattgtttgtttttgtcagccttatgaagtatcagacggtttaagtgtgcagctttatttctgtttcctattttgttccatttcttctgcatatctgctcttgtaccagtaccaagctgtttttgttaccatgtcattatggtgtagcttaaagttgggtatcatgatgcctctggcgttgttctttttgcttagcattgctttggctattcagggtcttttttggttccatacaaattttagaatagattattttttctaattctgtgatcaatgatgttgatagttttatgtaaatagtactgaatctgtaaattgctttagacagtatgataatttttacaatattccttcttctaatccataagcatgaaatgttttcccatttatttgtgtcatgtatgatttatttatttatttatgctgtgttttgtagttctccttgtagagatctttcaccttgtttgttacctgtatttccaggcatttcatttgtgtgtgtgtgaatattgtaagtgggataagactgtgttcttgatttcactctcagcttggacatagttgggtatagaaatgttagtgattcttgtacattaagtttgtatcctgagactctaccaaagttgtttatctattttagaattattttggcagagtctttagaattttctatgtgtagaattatatcatcagtttggacagatatatctacttcttttcccatttagatgttgtattagtctatttgcacactataaagaaacacctgagactgcataatttataaagatttttaattgtctcatggttctgcaggctgtacaggaagcatggctggggaggcctcaggaacccaacagtcatgacagaaagggaagcatcatgtcttacatggctggagcacgaaaagagaggaggtaggtgccaagtacttggaaaccacatctcctgagggctctgtcatgggaacagcacaaaagagggtgaagcatccccatgatctaatcatccctcaccagtccccacctccaacactgggaataacaatttgacatgaaatttgggtggggatgcaaatacaaaccatatcagctccgttttattttttctattgcctggttgctctgactacgatttccagtagtatgctcaataggagtggtgagagagggcatccttgtcttatttcagttctcaaggggtttgagcttttgctcactcagtataatgttgagtgtggttttgtcatagatggctgttattatattgagtttttttttttttttttgagacggagtctcgctctgtcgcctaggctggagtccaatggcacgatctcggctcactgcgacctctgcctttcggggtcaagcgattctcctgcctcagcctcccatgtagctaggattatggttacgggcatgcgccatcacgcccagctaattttttgtatttttagtagagacagggtttcactgcgttagccaggatggtctccatctcctgacctcgtgatccgcccgcctcagcctcccaaagtgctgggattagaggcgtgagcccccgcaccaggctattttgaggtattttttgatgcctagtcttttgagagtttttatgagtgaatgttggatctcatcaaaagctttctcagcatgtattgagaaaatcatatgttttttgcttttattttgcttacatggtgaatcacagttactgaattgtggatgttgaatgaaacttgccttccaggggtaaagcctacttgatcatgacgtatcacattttaaagtgcttctggattctatttgttagtattttgttgagaaattttaggtctatgttcaccaagaatattcatctgatgttttcttttttaattatgtatcttcctgattttgtatcccaaggacacacaatgaaggaaggacagtctcccaacaaatgatgtaaaaactggacatccatatgcaaaataaataaaattagaccttctctaacaccatatacaaaaatcaacaaaaataaacataacatgaaaccataaactcatagacaacatggaaaaataattcatgtcattgattcagaaatgatttatttgaagttaatcccaaaagcaagcccagcaaaaaactacatgcaattatatatctgacaagaagttctatcaaaatgtataaataatccatacaactcaatagcaaatatcaaatgacctcataaaaagagcaaaaacctgaatagattttttcagaagacacatgcatgaaaaacagagcataaaaatgtcctcaagatgactaattgtcagaggaattcgaatcaaaagcacaatgacatatcacctcacaccacttaaaatggctattatcagcaagacaaaagataagaaatgttggcaagaatgatccacagccataaagagagctttgattggccaagagactgatttcagtaactttctcctgtgaagagaccactgaccatggacttgtcctggccaatttccagaggctgtgcactgtgtgtctttctgcccctgcacaaagcccttttgatatgcaggacccaactgtaattcatttagttcttaagtcctcaccccaaagcaaagctgaaatgcatgtatcatgtgtgtttgcttattagacatgagagcctccactccatgtgaatatccatagctccttctatagcctgctgagtgtgtacactcgaccaatccatttgcacaaatttgtttctcatctttccctctcttaaagtgcctgctcacagtctctgtgggaggctttccttcccagcctgttaagatggccatcctgcagcttcaaccctttctgagaaataaagtctcctttctaaatttataaactgggtgattcttccgttgaaagcacaagctgttgggaagagttatatggcaattccataaatgcctggaagacaagtgtggatagggtagggtaagaagtcctgggggctgcacaccccactctgatggaatttccctccagaaacttctgggttctcaagatgagaatccaaacagattccctcatggctctgtcatcaggagaactatactctgataagtatgcccagaacttcctccagacagaccctatagggaaaaaatacttttcaagatctttattctgtgaggggaagggattcttttccatcccagacagcttcatcttagccttcctgagtcatgaaaaggagtataattaataaaacatctggggtcagattcaagaaaataatctgtggatgctgcagccaggagggggagtggaggacggaggaaaatcagctgtaccactgaatactccttgtaaatggtacagcctagagaaagaatagcaagaaatcattggaattcaatttccagaacatatactgctcccctacccaccacatcacctcaccaccaatatgattatctggattaaagagaaaagtgtggaaaggcacagactccatctaaggactagaatttagggaaaccaaaggcagtgggagagaaaaagtcaaggacagtaaagtgacttaaaacctcttagaccaacagcttcaggaacaaggtcacatcctctccctcactgaaattagatttacctctcatggggcatctgcagggtgcgcaggtgagaactggcaaagagaacatgaaggcactttccaaatctccattagtacctagctcgctttagctgtttggaaaaagcaaaaccacaacaaacataaccaggactaggatcagtgttggaagcacttttcactggcaagacactaagaaggagggcaaattcgaggccagttactatgcaaatatgccactgtgagtgtgtgtggtggtgagctttgagacatagggtctgtgggtaaagttataatcgataaaatcttcaaccacagaatcctaaaaaaaagagccttccccaaagtcccatcagttcctggactcgccatgtgtctggaccgtatcagtggatccggagctccagggaaggggctccctgatggcttttatgattccttgcttgccgtgctgaggtctccctgtagattatgttgggttttctaaggcctattttctattgtaagaggtggtgggggaaacaatttctgtcactgaaagagcattctgagccagggcacagccccttcctactgagcttgagattctgggaggaaaaagttctctgacaggaggaaaaagttcccagacaggaacttccctgcagggcaggagctgagcggcagggggcgctcagggagcacccagcacaggacccagccctggggcaggtgcacaggaggctggggcagggttttctctcaggaattgaatgttccttatttcaaagcaataatgacctaacatttaaataagaatttagcaagtactgatgtgcctgtaagtattttattgtatacgcagcctatacctaacccaataatttaatgcaaaccggatttaaaaggagaaatgtctaggtctttcaaatgtatttctagttaggaattgaggggtggttttattaattcaatgggtgttactgtccggagacacactcatcccagaagttagatgtgcagagggcaaggctcaggaaaagttcaggtagacagtgagccatatgaacagggaatcacattgaggaccatgtcctgtgagattctgggtttctgtgagaggagttctgtcttcatggacttctgggcatgtcagaggacaaatattaaacaaagttcagggcagggagctcagcatcccactgtggcgtggtccacatgtcacctatcttcttcctcagggtggcgtggcctgagctatgaaaaacctgcctcatgaatatgcaaatgcactgctgtctaccgaggtaaatacagatctttccttgcccagagaccatcacacaacagccacatccctcccctacagaagcccccagagcgcagcacctcaccatggactgcacctggaggatcctcttcttggtggcagcagctacaggcaagagaatcctgagttccagggctgatgaggggactgggtccagttaagtggtgtctcatccactcctctgtcctctccacaggcacccacgcccaggtccagctggtacagtctggggctgaggtgaagaagcctggggcctcagtgaaggtctcctgcaaggtttccggatacaccctcactgaattatccatgcactgggtgcgacaggctcctggaaaagggcttgagtggatgggaggttttgatcctgaagatggtgaaacaatctacgcacagaagttccagggcagagtcaccatgaccgaggacacatctacagacacagcctacatggagctgagcagcctgagatctgaggacacggccgtgtattactgtgcaacagacacagtgtgaaaacccacatcctgagagcgtcagaaaccctgaggaatgaggcagctgtgctgaggctgaggagatgacaggatttatgaagtttaaatctgtttagaaaatgggttgagtaattgagtaaaacagcaatggaaagatgtgtacactgtcattatgtaggaaatagtattttcaactgtcaccctataagtaacactcacagagtgggaaaggcagccatcaatcaagctgatgcaaacattcccatgggggctttgtggggacatacattttataattggatcctataaatcattagaaacaggattgcttgatctcatggtaagactaaatataatttccaagaagtggccgaaatttcttccaaaatgtctttgcccttccttttacattgaatttattttaaaggagttttaggatcacaacaagtttgagtagaagaaacagagttcccatgcactcctgccccccgacgctcagccttctctgctatcaacaccctgcaccagtgtcataaatcggttacagaggatgaatctccacagacacattggttgtttccttttctggtggtccctggtataacaagcctcaactatcttgaagcaccccaggttcaagtggattcttcaagtgggttactgggaatgatgccaggtagaaggaaagtgggtgggaccattcctctttgcactctttcctcaaggatccataaaatgtacatttacatggagctcctctttctcctggttttatatgcctcttccccaatggtaaggtttcccagtgtttacagcgggggtccccagtccccgtgctgtggatccgttaaggtgtgcagtgcgttaggaactgggccacacagctggagatgagtgggggcgagccagcatcgctgcctgagctctgtctcctgtcggatcagctgtgcattagattctcctacgagccgaattcactttttttatatatatactttaattctagggtacatgtgcataacgtacaggtttgttacataggtatacatgtgctatgttggtttgctgcattcatcgaattctattgtgacctgcacatacaaggggcctagactgagcgctccctatgagaatctaatgcctgacgattgcagggggaacaagttcatcccaaaaccacccaccgccatcatccatggaaaaattctcttctaccaaactgttccctggtgccaaaatggttggggacactggtgtagaggcaggtctgtaccttggaaagccagcagcttctggtgaatcccataattaatgtcctttaatgagaagtggagactttggtcatgagggccttcgtgaataatgccctacagttggattcaaaacattgtaagctcttggggggtgtttctggataaagccctttgtgcagaaaatgcagacacatccatgggatccatgcaggaaaaaagcttcctttacaaagtggtttggcacctggaaggagctctcagggttgggcactgtaccctttgctggctgcactttagccagaggcttaagcctgattggtcttgcagtgggagagccttcctggggtcaaaggttacaaaaatgcctgtcatcttccagctgagcaagcccatctgcgtgcttgtcagtgtcaaccccatgaagggtgcactctggaagatgacaagatgcacacaaacctcctcccactgattatccactaccacacactcagctgcaacccgtgctccagaaacggacaggggcctgcaaggataaacagaatggaagtattttattacctgggaaagcactgccaaatgccacgtttcaggaaggttaactcataagtgttcaggaagtgactgaagggcagtggtgggtgaggtgacgggactgcctcagggctgcacatgaggagggctccctcccacacagccttttcctccaggagctgcaccaggaactcacagaggatcaggaaggattctgagaacattcttctgtggcgctgactagaggggcaaaataaattataaaaaataaatcaattctaaatataatatgatgtttgttattagaaactatttctggatcctgtgggaaccctgacataagccaccattctctgtgaacaaacatttaacctctccttccatggggaggtcgacgagcttggattggttctttcatggatagtatcccccaaactcctctccactccctgcgtatccccgggtctctcagtgacaagttctcctcagtggaatttggttgatgtagtgagatcttcaaatttcctgtcgtctgtgttctcatgttctccccttatctgagattaagaaacgcacctgcatgtagtaaattatagcctactgtctctcatggacaaaataatggccacgccaaccaaccttgtggctgacagcaaccactggcggccaccatcccctccacagcctgtgttggaacatcacctgagagattgtgttagcaactttccttcagaatcatcttaaaaactttgtgtcccatttcacatggagacgtcatttttccatttcatcttcatagagaaatagaaggagaagaataccaaatacacttcctatctccagattattcaaatataattgtccctttatcaccttctgatttctggtcttcacagaatactctacaaatttttctcactggcgttataccaaaagttgtgaagcaccagatactgggattaatttaaccaacattattattctaataattcttagaatttagaattacaattatcatcttttcgtatacggataaactaacctatgcctttgaaaataagcccttacatgagagtgaaaagctatagatttggaggatttccttgcaaatccaatatttggaaaacggattttatcacaaatatacaaattaacttacaattgaacaacaaaaccacagaatttaattttaaaatgggcagagacctgaatagaaaccatatccaaaaaacaaacataaaaagtgatcaacttgattttcattaggtgtacttatgtttaatatttaaaaagttctactaaactatgagaatgggtaaaaattacaaggtagacaatatcagatggtgatgaggaagttgaaaaacaggaactttcaccccttgctggtgggaatgccgaaatggcacatagaaaactacagttaataatttattgtatatttcagaatagctacaagataagatttggaatgttcataacactaagaaataatcagtgatatagatgaaggatatcctagttatccagatttgatcactgcacataaaatgcttttatcaaaatatcagttgtaccacctaaatattttgaaatattgtgtatctatataaatcaaacattaaaaaacaccaatgcagtggaatccagctaattgcagattcccattagatgggatgtgctgcatgatctgtaaactaatcagaatctgtgggtttgtaaaggactttagaaatcaactaggctgcttgtttctaaagataagtctccctagtttaaatattttcttaatgggtggcgattttgaacatagaagaaatagtaatatttgtgtcttgtaagttttcttcttctcgtgtcacgagaaaaggtttgcagggaggaatctgggaccatctttcaagtctcaacttcactgtgattacctcagtaagtattttctgatacccctgactaagataagtctcgtatctgtcctagaaactaaaagtagaattctaagcatctacctgaccagatggaccttcctcttcaccaaggagttccagagacacttttaaacctagctccggccgtgttagaaatagaggatcagaaatgcctcattataccctcctccctttggaattcaagcacaactaaccagcatttttatgaaaacagagcttaaggctcagaaaacagattatttgtagcagtaagataccaaattctaaccttattcgagaatatcatcacaggacagagagcaggcattgaaaggaatcaaaggcttttaccctaaaatatattcctttgacatattttaaaatagccaggcacagttatcttttgtgagagagatttacattctgtagagaatctccttccctttccaggtctttttcttataccgaggagattagctgagggtctagcttcttttaaaggtcttaggagaaaacatttcccagctattgcctctaaaggtggtcacataagagacttcatctacatagtaagaatcttgttctccaaaacctgttatcttaacctagaaacatttttctaccggtttcaggtctttagaaaaaagcttaaatctttcaatcaattgtcaatcagaaaatattcgaactcactgtaagttgtaatccccgccacacactgcctcacttctagctgttttgtctttatggaccaaatcaacatatatctcacatgtattgtttggtgactgtctctctagtacactaaatttaagctgccatcaagccactttgggcacatgttctcaagatcttctggggctgttcacagttcatggtcctcacattcgcctcagaataaatctctctaaatattttgcaaggttgctttttcatcagtagttctaacagaacctactctgtggtttttgttaaaagcattatattaatatagtattagtaatattagtattagttataacacatgttggaaaattcttatgaagttatgcatagactaacaatgggatcaagtgtaaatgtttcaaagtatttaagcaagttatttcaaaatttatcttctgcagatacttctatcagattcattatatcagctaattacttgctttatgatttttgcattttattgtagatgatcacaccctatattttcttggcctttattgtagaaaattgtgtgaaactagtcagggctacatttgcaagtaattgtcgcagtggctgcctgaattgcagtgggtttcctctgcagccaccagtcactcagattactccaatgacaccttaattttgtttcctgcttggctttgggccttagtcttgtgctctccagacagactctgtctttcatctcccctaggtcaggccagagccacatggacctgatgattgtcaatatggtgggaagggtcgcactgaacgggcactctctgtccttctgagggagccatactgcaggcagacatggcagtcctggctcagggtgtgtccttccaagtatccctgcccttccttcaggtgtgatgctgatccatgcatcttcctcccattcctgggtagagggtctccttgttctttccccaatcttctcccagcagccactatgtcttcccactgatgtcttcagcttcctcttttctgcccttcccagcagatgagtctgttattcctgagggaagagagaggaggtgggagatgaggctttattcctgaaagaatggacagagctttggagcttttctttcttctaccccagtttctacgagttcctccagtgcctgtaacacagagctgtcagtggctttgcccctgcatgttaattctttggtcatgtagtggtggtgagggagctgggtctggatgcatttcagccacagctgctgttccacttccccacacagaaccgtctcaggaggaagaggttggagatttttctgatgtgtcctcaatcctgggagaaaagttttcaatagcaataggaatctctcagttgtatgtccgctgagaatttaaacaataacttctttataatactaaattttaaacaatccaatgaatatatctaatttaattttttattagcttatgtgacatttgctggcctctcccccagataaggtcatattctcttcctgtttgttcctgcaagtcactgaatttcacaagatgtaaggtctcttgattatactataacatcaataatctggtgtactaaagaaaatgtgctaatttgcagcttactaaaattagttgttttagtaaaaataatatatttgttatagcatgcctacatctccaggctgagtagaagctttgtttgtaatactcagaaactgcaaataacacacatattaaggagctttctaaataaatactatgggtgaattctttaactggaatactgttcctcattagaatcaacacattctttatacacaaccaaattactgactcacaagtaattatactgagcaagaagccacacaaatgaaattgaaaatataagatttcactttaacaaaatcttgaaaaatagatctgaattaacaaagatgagaggttgactcagtatggtgagagggaaataatggggaggcaggaatgagaggaacacagggaggcttttaactgtaatcatcgttatctcgattgttattttggatacacaggtgagcacacgtgaaattacgttttttttccttcggagacatggttttgctttgtcgtccaggctggagctccgtggtgagatcatagctctctgcagcctcagaccctgggtctccagcaatcctcctccctctgccctatgtagctgggactacaggtgtgcaccaccatgctcggcttcagtgcgtattaaaccgcacacttcaattatgcagtatttattatatagcaataatgcctcaataagggtattacaaataagtggatagataatttgttaaagattgatggaaagatagataccaacatgagaaatgtatgacactcaagaaaataaaactgtaggaaacttgcttttctttatatttgttaggtaatcaccacagtgtgtacacatcacaccatgttcccattacagagaaaaggttctgcgaacctcacgagctgtgacccctgtgtgctgggcttggttcagggagaagtcaggtccagtggtgagaagcacaggcccagatgcccaggctcactctgaccaaaagtgagcactggggacattgtaaaacccacctgtgcttttgctgataatttttcatctttaacatggaaataatattgatactatataccatggtttctctgcgtatgtaaaaataaaagatgattggtgctaactttaaaaatatgcagtttatgtagatctatggtacctcaataaaactgttttaaaataaaaattacaaaattataagatttttaggttttaaggtttaagtttatcacaaaacaaactgacaataggaaagcacaatttcccaatgctttcaatatcacagatctccccgaggacattctgacatgctctgagccccactatctccaaaggcctctcaccccagagcttactatatagtaggagatatgcaaatagagccctccgtctgctgatgaaaaccagcccagccctgaccctgcagctctgagagaggagcccagccctgggattttcaggtgttttcatttggtgatcaggactgaacagagagaactcaccatggagtttgggctgagctggctttttcttgtggctattttaaaaggtaattcatggagaaatagaaaaattgagtgtgaatggataagagtgagagaaacagtggatacgtgtggcagtttctgaccagggtttctttttgtttgcaggtgtccagtgtgaggtgcagctgttggagtctgggggaggcttggtacagcctggggggtccctgagactctcctgtgcagcctctggattcacctttagcagctatgccatgagctgggtccgccaggctccagggaaggggctggagtgggtctcagctattagtggtagtggtggtagcacatactacgcagactccgtgaagggccggttcaccatctccagagacaattccaagaacacgctgtatctgcaaatgaacagcctgagagccgaggacacggccgtatattactgtgcgaaagacacagtgaggggaagtcattgtgagcccagacacaaacctccctgcaggaacgatgggggggaaatcagcggcagggggcgctcaggacccgctgatcagagtcatccgcagaggcaggtgcagatggaggctgtttcctgtcagggtgtgggacttcatcttcttctgacagtttctctagtgaacctctctaacctcagaattctgtgcttactaatgtcatctctacgtattttttaaaagatcattttaatatgagcacctattctcacacgcaccaaatgcagattgacgcttacagagatgaaaagttctcaaccatggtcaccaggatgagagtcctgaggaaattcaggggtgcctggtgactcttccgcaatcagtcctgggacagaaacctcagggacagcctttatgagttttgatcacatctaacagagaggatgggccagggccagagtcatgtagaacctcacaggttccacgtctgacccttctcctgacactaaagccaatcagcatcagcactgacctggtgctccttttgctcccaatccatgttctttctttggagagtttcttctcccttttttatttgcttttcctctttcctgaaaaagaaacagatggtccccttggtccacattccagggctcaaggcattttcttggagctcaggtggggctcaggctgtggctcctgcagccacgtgggagaggctgatgggacttccttctctccccattttctcaggaccctctactgtgttgtgtgtaggctcatctgggaatgcagttgaccattaatactgaaggggacaaactcatttgatcaaaatgggatgtggatgtggagttaaccctgttccgtgcacagtgtcagagtcgtctgcttcagaagtagtgttagaaagagctggtgaaatttatcagaatcaagatggagccacttgtgttaaagccctaatgaatgaagctggggaaggccatgaaggagggttctaacacacatattcctgataataagaactaccataaatagactctgcacaaccataaccttgcacagaagccaccacaacattaaaagaattacttctcccattgtatctgcccagcaactccctgttcaactttacaccgatgtgcccctgttattgatccttctagcccaggacaattgtcttaaacagctgatgtgaccctcctcatttttcctttattctttatcttcctataccaacctgaatgcacccatacatttcaattgcaatacacttcctagaatacatattattatattttagagtctctctctctctgttattcagggttgacaagctacagatggacatgccactttctttttttatgactttttttaaaaattttattattcttgtactttaagttttagggtacctgtgaacaatgcaggtgtgttacatatgtatacatgtgccatgttgttgtgctccacccattaactcgtcatttagcattaggtatacctcctaatgctctccctccccactacccccaccccacaacagtccctggagtgtgatgttcctcttcctgtgtccatgtgttctcattgttcaattcccacctatgagtgaggaaaaaaatgatgagttcatgtcctttgtagggacacggaagaaactggaaaccatccttctatcattctcagcaaactatcgcaaggacaaaagacatgccacttttctgtgagatgtggaggatgacagtttttggagatgtctgggaatacccagtgtccagaagatcatccatcaataagtgcaggctggaggtcccagagagaggcaaagctgctgaaacaccatggaatttcattttctccagttctgctctgatggaatcaggcccacctgttttgcttgtcttaagtaaattcacagcaccacatatattagtgttgcagtgaataactacaaagtctatcctaaccaagtgtaccatcaaatttaccattacccagagggaagaatctttaacatgagatctatgttcataattttttaaggtgaaaaagtgatcactatccaatcaggcaaatatgattttgctaatgagtggtagatgttgcatgtatttttggatgtcatccctttttcagatgcatggcttgcaattatattttcccattctgtaggttggaattatttccacactttgtagaatctttttgttgtgatgtagttccacctgtttaattctgcttttgttgtctgtgcctttaatgtgaaatataggaaatcattgttaatatattattttctgggtcggggaaattttacaattgcaggccatatgtttaaatatctggcccattcagagtgatttttgtgtttattctaacccaaaattcttaactctttgcatgtgtacatccagtttttctaacacattcatagggagagacttggtttatctgttttatattgtgggttcttatgctgaaaatcagtttgccattgatacatcagtttatttctgagctctttctacatatttatgccaactccatcctgtttttattattctacttttgttattacttttgaaatctggaagtaagatgtaagtttatttttgcctttttacagatgctatagcaaaatattttaacctttcactcttccatataaaagtatggctttaaataatgacttttattatatacaggttatattcttgtattcctaacttttagaggttttattatgagatcttgaattttttaaatgttattttctatgtctggtgagaagttaactgatgcttttcctttattctcttaatttaccacatcagatttattgatttgaagatattgattcatcagcgcatctcaaaaataatttggagcttgtcatggtgtacaatccttttaaagtcttatagaacttagttgactatgaattgggagtagcttgtttatatatactaagaacatttgtcagaagtttggttttcttcttttgccttgtctattactggtaatacagtgattggagcctcttagaaagagattagaaggtggggacctcacggattttttaaaaagttagagaacggttgtcatcacttttttaaacgctgagagtcatttgttatctaatatataacccatcatgaggaatatctctagtgtgcttgggaagcatgcatattacgctgctgttggttggaatgttccgtagatgtctgttagggcagtttgttcgagagtgcttgagtccacgggcttcctaagaatttttctgtggatgctctatacattattgaaggcgaggttttgaagtctcctaatttttttatagttttctatttctccttttatacatcttaaagtttcataaatgtagttatatttctagtttttcaaatatgtaaaagagaaataaaaatatttgcttagtaattttaatgagaaaatcacataacaagaaattatattttccaaatgctgccatcaacactaaactcctccaggagtctcacatctgccctgggctctgctctctcctcaggcatcccacctcagcatttgctgcagaggaggggacgtgaaaatagggccctccctttcctgatggaaaccatcgcagccctgagcctacagctctgggagaagagccccagtccagcattaccaggagttttgatttgacaatcagctctgaacacacatggctcaccatagagttagggctgagctgggttttcttgttgctattttaaaaggcaaataatggagaactagagatattaagcatgagtggatgtgagtgaaaatacagtgattatgtgtggcaggttcggaccaaaatgtccctatgtttgtaggtgtccagtgtgaggtgcaggtggtggagtgtaggggagagacaagagtcagaaaagtgtgcaggaggccgggtgaggctgtagacactgtcagcccactatgccaatcccaccacgagtgctggagaaggtgggagtctgatgaagcttactaacaaaccctgtggtccaagctattccatcaaggccattggttcttcccagagcatagctgtccatcgggaatctcccatgtgcccagcagcagccacgcgttagcaacttcactgtgcacagtcattgtttgggaggagctccaggatgtgtctctttgtcaaaaactgggtgatggtgtcagagagctgtgccgggtccctggtccacgtgctccctgacattggaggtataggaggtgcgttctcagggtggaaacaccttttatggaaatgtacataataaatcacgattttccttggttctcttagacgacatggagaagcaagcatgcaccctgcaaacaattgtaatttcctgctttaccccaagttcatgatttcttgtaaactttgatttctgtccaagtacagagatactgattagagtgagtttggttctttccacacactaaccctcacctcccccagatagagcacattgtcctcactctgagtctgagggaggagctgttcctgtacaactcagggcctgcagagacccccgtgtgcagctttgcagagtcagatctttcctcatgtgaggcgacctccactgcccgtgattgctgctcaggtctaattgtggattcgggattatgacaccctttgggctatcacaggtcaatcttattctgaaaatcaccgtaattatagacagaggtaataatccagtacccattcttctgtccgcagtttgtctttcttatttggttgaaagtttgaagaaaaaatgtgaccatatattcatctaattctaacctctgaatctgctatttgctctcggggacctacaaattgcaaaacagtgagttcttcattttcatcaaaatgtgcaaatttgtgaatttcaacatgttgttcagaacctgtgcatgccgacaactgtgattctcggtgcactcctggcctggtgaagccctcacagatcctccccctggcctgtggcatctctgcttctccattacaaccagtgcttcctgctggagctggatccgtcaccccccggggaagggactggagcgaatcaggtgcacaggtcatgagggagtgcacaatccaacccactcctcaagagtccagtcaccatctccagatccacatccaaaaaacagtttctcctacagctgagctaccttaacaaggagtacacaaccatgatttttatacaaaagacacagcgaggggaagccattgtgcgctcagaacactctacaaattttcctccctagtgttttaccaaaactggtatatatttcagatactgaaatatttacaacctacgttattatgctaagaattctaagttagaagttagaatgataattgtctcttttttttcctttttttttttttttttgatactgagtctcactgttgttgcctgggctggagttcaatggtgcaatctcggctcactgcaacctctgcatcccaggttgcagcaattctcctgcctcaaccccccaagtagttgagattacaggcgcctgccacgatgcccggctaatttctgtatttttaatagagacggggtttcaccatgttggcctggctggtctcaaactcctgacctcaggtgatccaaccgcctcagcctcccaaagtgctggaattacaggcaggagccactgcacctggccaattatcctcttttcatagatggataaactaacctaggcctttgaaaataaacccttatctgagagtgaaaagataagccatagatttggagagtttgcttgcaaatcaaatatttggaaaaggacttttattacaaatatacaaattaccttacaattgaacaacaaaaccacacaatttaattttaaaatgggcaaagacctgaatagaaagtgcatctaacaataagtataaaaagtgaccaactggattttcattaggtaaatgtatgtttaatattgaaaaaatcctagtaacctaatagaatgggtaaaatacacaatatagacaataccaaatgttgacgaggaagttgaaaaacaggaattttcacccattgctcctgagaatgctgaattggcacatagacaactacagttaataatttattgtgtatttcaaattagctagaagataacatttagaatgttcttaccacaaagaagtagtcaatgattgagatgaaggttgaaggttgtcccagttatccagatatgcacataattttctttttttcaaaatatcacatgtaccacataaaggttttgaactattatgcatctatttaaattacacattaaaaaacaccagtggaagggaatccagctaattgcagattgccattggatgggacgttctgtataatctgtaaactaatcagaatctgtgtttttctaaaggacattaggaatcgttatactagtttctaaagataagccttgcaagtttaattattttcctaatgggtggcgattttgaacattgaagaaatgttagtatttgtttctggttaagttttcttcttctagtctcaggagaaaaggtttgcagggaggaatctgagactatctttcaagtctcaacttcaatgtgattacctcagtaaatattttctgatacccctgagtagggtaagtctcatatatgtccaataaactaaaagtagaattttaagcgcccaagctgactgaatggaaccttcctcttcacaaggagttccagagacttgaaaacctagttcaggccacattagaaacagatcagaaatgcctcattataccctcctcactttgtaattcaagcacaactgaccagcattttcatgaaaacagaggactcaaggctcagaaaacggattccgtgtagcaataagataccaaattctaacctgactcgagaatagcgtcatgtgacacagagcaggccttgaaaggaatcgaaggcttttaccctaaaatatatttctttgacatatttttaaatcgccctgcacagttatcctttgtgagagagatttacattctgtagagaatctccttccctttccaggtctttcgttatactgaggagattagctggaagtctagcatctcttaaaggtcttagtagaaaaacatttgccatctatttcctctaagcgtggccacataagagacttcatctgcataatatgaattttgttctccaaaacctgttatcttaacccagacactttttactactgatttctggtctttagataaaaacttaagtctttcaatgaattgccaattgaaaaatcatttaattcacctgtaagcggtaattatctccccacactgcctcacttctagctgttttgtctttatgaaacaaatcaacagatatctcacatgtatcaattgatgttattaaatttaacctgcaatcaaaccactttgggcacatgttatcaggatcctctggggctgcgtcacagggcatctaccccacatttggctcagaataaatctctctaagtattttccaaagttggctttttatcgatagaatctactctgtggtctctgttacattcaaaagcatgatagtaataaagtattagttattaaaaataagcacatgttggcagtttcttacgaagttacgcatagactaactatgggatcaagtgtaaattttcaaagtatttatgcagttatttcaaaatgtatgttccacagatacttctatcagatcctttatattagataattatttgttttatgactttttttgtagatgatcatgccgtatcttttctaggcctttattgtagaaaattgtgtgaaaccagtcagggctacatttgaaattcattgtcacagtggctgcctgaattgcagtgggtttcctctgcagccaccagacacccagattcctccagtgacaccttaattttgtttcctgcttggcattgggccttaaattgtgtgttccagagagactctgtctttcatctcccccaggtcatcccagagccacatggacctgatgattgtcaatgtggtgggaagggttgcactgaacgggcactctctgtccttctgagggagccacactccaggcagacatggcagtcctggctcaggacgtgtccttccaagtatccctgcccctcctgcaggtgtgatgctgatccatgcatcttcctcccattcctgggtagagggtctccttgttctttccccaatcttctcccagcagccactatgtcttcccactgatgtcttcagcttcctcttttctgcccttcccagcagatgagtctgttattcctgagggaagagagaggaggtgggagatgaggctgttattcctgaaagaatggacagagctttggagcttttctttcttctaccccagtttctacgagttcctccagtgcctgtaacacagagctgtcagtggctttgcccctgcatgttaattctttggtcatgtagtggtggtgagggagctgggtctggatgcatttcagccacagctgctgttccgtttcccacacagaaccatctcgggaggaagagggtggagatttttgtgatgtgtcctcaatcttgggaggaaaggtttcaatagcaataggagtctctcagttttaagtcctgtggaaatttaaataataacttcttcattatacttaattttaagcaatcgggtaaatatatctaatttaatcttgcattaacttatatgacatttgctggcctctgcctcagataaaattatattcttttcctgtttatccttacaagtcactgatttgattttcacaagaggtaagttctctcatttgccctatacatcaataaactcatgtattaaataaaatgtgctaatttgtagctcagtaaggctagttgttgtaaaaataatacttttttattggatgactacatctccaggcggagtagaagatacatttgtaatactcagaaactggaaataacacaaatgttaaggagatttataaataaatgatagggttgtactcattaactggaatactgttcctcgttagaatcaacacctttatacacaatcaaattactgactcacaagtaattattctgagcaagaagccacacaaatgaaatggaaactaaaagatttcactttaacaaaatattgaaaaatagatctgaattaacaaagatgagaggttgactgagtatagtgagagagaaatgacgggaggcaggaatgagaggaacacagggaagcagggaagcttttaactgtaatcatcattatcttgattgttattttggatacacaggtgagcacatgtgaaattacattttttttctttggagacatggtcttgctttgtcatccaggctggagctcagtggtgagatcacagctctctgcagcctcagaccctgggtctccaatcctcctccctctgccctatgtagctgggactacagttggcaccaccatgctcggcttcagtgtgtattcaactgcacactttaattatgcaatatttattatatagcaataatgcctcaataagggtattgcaaataagtgaatatataatttgttagataaagactgatggaaagatagacacgaacatgagagatgtatgacacttaagaaaataaaactgtgggaaacatgctgttctttacaattgttaggtaatcacaaaagagcatacacatcacaccatgttcccattacagagaaatgcttctgtaaacctcactaggtgcaacccctgtgtgctgggcttggttcagggagaagtcaggtccagtggtgagaagcacaggcccagatgcccaggtcactctgaccaaatgtgagctctggggacactgtacaacccatctgtgcttctgctggtaatttctcatttgtaacatggaaataacattgatactacataccatggtttctctgcatgtgtaaaaataaaagattattggtgtgaacttcaaaaatatgcagtttatgtagatctattgtacctcaataaaacttttaaaataaaaattacaaaattataagatttataggttttaagggtttaccacagaacaaacttacaacaagtaaccacaattcccaaatgctatcaatatcacaaatctcccccaggacgctctcacatgctgtgagccccactctctcctcaggcctctcaccccagagcttactatatagtaggagacatgcaaatagagccctccctctgctgatgaaaaccagcccagccctgaccctgcagctctgggagaggagccccagccctgggattttcagatgttttcatttggtgatcaggactgaacacagaggactcaccatggagtcatggctgagctgggtttttcttgccgctattttaaaaggtaattcattgagaactattgaaattgagtgtgagcggataagagtgagagaaacagtggatacgtgtggcagtttctgaccagggtttctttttgtttgcaggtgtccagtgtgaggtgcagctggtggagtctgggggaggcttggtacagcctggggggtccctgagactctcctgtgcagcctctggattcaccttcagttactactacatgagcggggtccgccaggctcccgggaaggggctggaatgggtaggtttcattagaaacaaagctaatggtgggacaacagaatagaccacgtctgtgaaaggcagattcacaatctcaagagatgattccaaaagcatcacctatctgcaaatgaagagcctgaaaaccgaggacacggccgtgtattactgttccagagacacagtgaggggaggtcagtgtgagcccggacacaaacctccctgcaggggcgcgcggggccaccaggggggcgctagggacccactgagggcgggacaggagcaggtgccgggagaaggttttcctttctcctcagctggaaaagtcaggtttgtgtttgccggactctggagctttctaggctgtgacgttttattacttgtgtttattatgaatttattatcgttagtatttaaattttagtaatttaaaaattatatatatatgtttacactttaatgaaataagcattcctatttgcaccgattcttccagagttttattaacatttgttgacgtcagcagctacgaagctatagggacataaatttataaccatagaaagatgtataggccaggcgcggtggctcacgcatgtaatcccagcacgttggaagccataggtgggctgatcacttgaggccaggagttcgagaccagcctgggcaaaatagtgaaactccatctctactaaaaatgcaaaaatcagcttgtgcgtattggcatgtgcctttaatcccagctactcggtaggctgaagcaggagaatcacttgaacacggaaggcagagattgcagtgagctaaatggcgccactgcactccagcctgggtgacagagcaagattcgatctcaaaaaaaacaacaaaaaacaaaaacaaaacaaagaaagaaaaaatatataaatacaaagacatatgcatatatgtgtaggaattcataacaaacattacaataaagtaattctaaaaatatgtcctaaagaatcaaacttaatgatgagctaaatgtaaattatttgagtatttcacaattgattttggttatttttaattgtttccatcaattgatttatatttgttcatttaactactgttaaataatggttatttcaaatgttgtcacaataaataataagaatgtgaattgataaatgataattatcttaatcatttcttaattatcttagttatcccatatggtattcacaaatcataacattgcttcttaccttgtaaatataaacaaccataatgtgggaatttaaaataaaattttttattttaattttttaaaatttatcccagatcattatctttttcttcagctccagctctcatgtgatggtctcaagggcccatctgcacccctgtctcctgaaggcttctgggagtggctgtgggacagggaggaagcaggagcccatgtgagtccacacgacctggagcctccctctccttggattaggccatctcctcgggatcacagggctcttcattatcctcaccccgctggtggcccaaacaagcaacatcacacttcaattcatcacgcttgggtttaattttcttaatcatcgggaaggtgataatgttaacaggaaatgtttcactaacaaataggataagcccttttccatgggacagggtttcttacaaggacttgacatgtattatgtattttccatttctttatagatgagatactaatatctccatattggagacaattcctttaagtcatttcttaaaattaatttttcctaggactccaaacaaatccatgatatagttgaaaatttcaggtgtaagagctgggccaacattgagactatattaacatttataacatgtgcttgcaaatattgttatttttctgtcggctgtccccagttatggtttgatacaaaatgttagtaatttatcctaataaaacagtttacaatattatatcaatagtttattaactttgtataactaataatataaaatgttcaacatattttagccatattttacttatttgtgaaatgtgtgcttattagtttttcgttttaagatgtcacctttatcttttttatttctgggattttattctagtagatataactaaatgtctttaaataattattgtaataatcacatttatattttctatttgaattatcatatgcatgttattaagattttaatttcaataaaaatattttcctccaattgtctattttctgtttttatgagataacatatacaaaaatgcatagctcttcaatgtacagtttgagggtttctggcaaatgtgcacgtttgtctccagcacctaagttagggtgaggagcaggtccatctccacaagtgtcctctcagtgtttccagtcagctctcacataaggatttttttttaatttcaacttttaatttagatacagaggggacgtgtgtggacttgtcacacgggattattgagtgatgctgaggtttggaatccagattccatcaccccctccctccactctccagcagtccacggtgtcttttgttcttctatttatgtccatgtgtgctcaatgctgagctcccacataggagaatatgtggtattcggttttctgttcctgcatttatttgtttatgataaagaccaacagctccattaattttggggcaagggacatgatttcattctttttcatggctgtgtagtattatatagtgtagatgtaccatattttgtatattcagtctaccagtgatgtgcatctgggttaaactacgtctttgccactgtgactagcacagccatgaatacgcatgtgtaggtgtctctttggtagaattatttatttactttttagtgtataccctgtagtggaattgctgggtaaaatgatatctctgttttaagttctttgagaaatctccagtctgctttccaaagtggcaagactaatttatattctcatcaacagtgtataagtgttctcttttctccaaagtcccacaagcatcctttgtttttcgacttttttgtgataccattctgagtggtgtgttgctgctcacctacaatcatctcatatttgataaggctgatgaaaagaagcaatgaggaaaggactccctgttcaataaatgatactgggacaacgggctagccatatgatgaagattgaagctgaccctgtactttcaacatatataaaattaactcaaaattgattaaagccttaaatgtaggacctcaaaccataaaactccttgaagacacccttgaaaacactcttatcgacactagttttgacaaaaaatttttggctaagtatccaaggccagttgcaacaaaaagaaaaatagacaagtggaacctaattagttaaggagtttctgcacagtaagacaaacaaacaaacaaacaacaaacaaaactatcagcagtgtaagcagacaatctacagaatgtgagaagatattcacaagcattgcatcccacaaagccctagtatccagagtctgtagataaacaaatcaaaaagaaccaaaaaaaaaaaaaccctttaaaaattggctgatatggtttgctgtgtccccacccaaatttcaacttgaattgtatctcccagaattcccatgtgttgtgagagggacccagggggaggtaattgaatcatgggggctggtatttcccgtgctattctcttgatagtgaataagtctcatgagatctcatgggcttatcagggatttccgcttttgcttcttcctcattttctcttgccacccaccaggtaaggagtgcctttttcctcccgccgtgtttctgaggcctcccaagccatgtggaatgtaagtccaatcaaacttctttttcctcccagttttggatatgtctctatcagcagtttcaaaatggactagtacataggcaaacgacacagacacttctcaaaagaatacatgcaagtgcccagcaaatatattgtaaaaatgtttaacatcactaatcatcagagaaatgcaagtagaaaaatgttctgatttctgtcactataggaggtccctttttcttgttaagaacttcatatacatggaataaaatattatagatcatttttgtaaggggccacttttactatttgtgaggttcattcatgtaatagcatttatcaaggttttgtcatcatatgtataaatatgtatgtactcatacacatatagatatttcatatctaaatcaattacattaataaatgacagattattaaataaataaatctgtttattaagtaaataagtgacaatatgtatatctattttcctgttgatgggatttaaatttgtttccaaaataaacatcataaacccaaactattataagtatctttgtacaagttcttctgtttatattcacacattttattgataaaatatgtagatatataggtatgcattataacttttcagctttatggagctatcactgacaaataaaattgtatatatttagggtacaccacttgatgtattgatgtacctggggagatgctcatcatgatcaaggtaatcggcatgcctgtcctctcagagagttatcattttatgtctttaatttcctgtgtgtgtgtgataaaaacacctaatatctactcttctggcaaaagatacctttataatacaatatttattagtatagtcacattgctttacgtttcatctccagaactatttcaacctgtgttttagtccattctcaccctaatgtaaggaactacctgagactgggaaatttacgaagaaaagtggtttagttgactcgcggttctgcaggcttaacaggaagcattattgggaggcatcaggaaacttacagacatcatggaaagtgaaggggaagcaaggaccttcttcacatgctggcaggggagagagagagaaagagcaaggcgagatgagccacacttttaaaccatgagaccttgtgagatcttgcaagaatcacaaaggggaaggtcgcccccattattcaatctctccccatcagacccctcctacaacacttggggattaaaatttaacatgagatttgggtgaaaatgcagagacaaaccatatcattccacccctggtccatgacagatctcatgtccttctcacattgcaaaatatatttatcccttctcaacggtctcccaatcttaactcatttcagcataatcataaaaatctatagtctaaagtctcctctgacaaggtcagtttcttccccctataaatctgtaaaattaaaaaaaacttagttatttccaagatacaacgggggtgcatgtactaggtaaatgctcccaatccaaataggagaaattggccacagaaaatggattacaggtcccatgcaagtccaaacaccagcagggcagtcattaaatgttaaagctccaaagtaatttttcttttaccccatgtctcacatgcaggacacactgatacaagagatggtctcccaaggccttgggaagctccacccttgtggctctgtagggtccagcgcccatggctgctttcataagctggcattgagttcctgtggcttttctaggcacaccgtgcaagctgttggtggttctaccattctggggtctagaggatggtggccctcttctcatagatccactagacagtgcctcaatggggactctgtgtgggggatccaacatcacattttccttctacactggcctagtagaggtactccattagggctcagccccttcatcagacttctgcctgaatatccaggcattttcatatatcatctgaaatctaggaggaggttcccaaacctcagttcttgccttatgtgcaccaacagactcaacaccatgtggaagcaaccaaagcttagggcttgcaccctctgaagcaatggtctgagctggaacttggtcccttctagctatggctggcacgagacagacaggggtgtaaggtgccatgtctcaaggctgtacagagcagtgaggtactgggcctggaccatgaaatcatctttctctcctgggcttctgggcctgtgatgggaggggctgccacaaagatctctgaaatgccctgggaacattttccccattgggctcctcattacttattcaaatttctgcagccagcttgaatttctccccaggacatgggttcttcttgtctaccagatggtcaggctgcaatttttttccaaccttttatgctctgcttcccttttaaatatgagtttcaatttcagaccatcttttcatgaatgcataggacttatgttttcaggaacagccagggaaaatcttgaatgctttgctggttagaaatttattctgccagataccctaaatcatctctccctagttcaacatagcacagatctctagggcaggggcaaaatgccgctagtctttttgctaaagcataacaagtgtgagcttcactccaattcacaagaagttcttcatcttcatctgagaccacctcagcctggactttattgtccatatcactatcagcactttggtcaaaaccagtcagtaagcctctaggaaatttcaaacttttccacgacttcctgtcttcttgtgagccttctaggctttcccaacatctgtccattacaaagtcacttccccattttcaggtatcgtaatagcagtaccgcactcctggtgcaaattttctgtattaatccattttcccactgctataaagaattacttgagactgggtaatttatgaagaaaagagggttagttggcttacagttctgcaggctaaacaggaagtgttactgggaggcatcaggacacacaatgatggcagaaggtgaaggggaagcaagaacattcttcacatggtggcaggagaaaaacagcaagtgagcggggaggtgccacacttttaaaccatcagatctcttgagaattttatcatgagaacagcaaagaggaagatcacctcatgattcaatcactttatattagaccctttcttcaacatgtagggattacaatttgacatgagatttgagtgggaacgcagggccaaaacacatcaacctgcataaccgaaatttttaccctttgacctacatcgcccaatattttcctcctctcaggccctgggagctactattctactctgcttccaagagctgaaatattttacattctacatataaatgagatcatgcagcatttgtctttctgtgtctggcttattctaattagcataatgttctctatgatgctgaaaatgtaagaatttccttcttttaaaggttgaataatattcaattttatgtatgtatatgccacattttatctgttcattcataaatggatattgacttattttccatatctaggctattatgaataacctcacaatgaacatatttgatacactcacttcattttctctagatgtacacttagaagtgggtataccctatgttcaattcattcagtaatcttaatgttgtttttataatggctgtactaatttacattttgttccaaaccatacatggatacctttgtaccaaattttcaggtctacgtttaagtgttaaatccatttcttgttgatttctgtgtattttgtgagggaaggtcctttttttttttttccttagagttagaatctcgctctgtcacccaggctggagtgcaatggcatgatctcggggcactgcaacctctgcctcccgggtttaagcgattcttctgcctcaggctcccgagtagctgggattacaggtgtgcatcagcacgcctggctaatttttgtatttttagtagagacagggtttcaccatattagccagctggtctcaaactcttgaccccgtgatccacctgcctcaggctcccaaagtgttgggattacagatgtgagccatcacgcccaaccagtccatttaatttcttctacatatggatacccagttttcacaccacttgctgaagagactgtcctttgtctattgtgtgttcttggcaacttgtcaaagatcagtttattgagaagaagtgggttgattatcaggtgcctataatgttccattagagtatatgtctgtttaaatgccagcattatactgttttgatttatatagatttgattttgaaattatagaatatgatatattcagctttgttatactttccccaaaattactttggctattggaaagcttttgtatttgtatataaattggagcattttaaaaatatttttgtaaaaacatgccacggagattatttactttattgacaaataatagatatacctaatttatgggagcatgcaatatatttatacatttacaaatatgtgaagatcagatcaggattggtatatctatcacgttaaacaggtatattttctttatgctaggcacattggaatgactctcttctagttattttaacgtgtacattagattatttttaactatagtcaccttactgatctatcagacatttaggttgtatttctcctatataactatgtatctgaattcagtaatcaacctctctttatccccttctctcttgtatccacccaggcttctggtaaccaacaatctactcttcgtcttcaggaaatccaattttttagttttgacataaaagtaagaagatgccatatttgtctttctttgcttggcttatttaacttaacataacggcttccagttccattcatattgttgcaaatgacaagatatcgtattttatggctgaataatattctattgcatacatagattacattttctctatccatttgttcacctgcagacactgaggtgctttcatatctgggctattgtgagtagagctgcaaagaacatggagtgcacatgcctttatgaggcggtgattttatcttcttcagaacatacccagaagaggatttgccacgtcatcaggtatttctatttttaatttattttggagtcttcatattactttgtacaatagtggaaatgcaataggaatatccattataaaaagcagtttcagttttgaggtatgatccaaaaacaaataatgtttgaccatgattctcactgggagtctctaatgagcctggtggaaatgcaggaagttttctaaccttgttaagaaaattatgactttgcacatttttctttttaaggctggtaattggcgtgattccagatgcatactgttggcgggtttcagaatgatacagaaaatcattatgagaaggcaagaaaaagaatgatagagagagagagggagagagggagagagtcaggccaacaatgagaaaaaataaatttcacaagaggagaaagtgctggatatcagtgctgggttttggtcatagacacatctgtactgagtaagaaactatgaagtcaagggaggagtctagaatttgttcaagtgaagcatcagcatattctctgaggcacgtattgtcaccccatcataagggtgatgaatttttgaatgccatgaaatgtgagttcacggtaagtaatcatgtttccatgaaatttagttaaaatgccaagggtgtgttcagatcacccatgcacaaatacacaaaatttgcctttgcatttatagctatctagagaaaaagtgcattgagatgtcagcaggttacagagatctgtttaagtttgggatcccatgggagagtgcctcttagtgaaggttggtctattaattcagtaagtaaaaattctttctatgggagtagcttctaattgtgtggaaatttcaattccttattgagtttttaaaaaatatctcagggactgactccatggagttttactgctgtattgataaaaattatcatcaaagaccaagggtagataaaacccaaagatggggagaaaccagagcagaaaagctgaaaattctaaaaatcagagcacctcttctcctccaaaggaacacagctcctcgccagcaacagaacaaagctggacagagaatgactttgacaaattgagagaagaaggcttcagacaattggtaataacaaactactctgagctaaaggaggatgttcaaacccattgcaaagaagctaacaaccttgaaaaaagattagacaaatagctaactaaaagaaacagcatagagaagaccttaaataacctgatggagcttaaaaccatggcacgagaaatacatgatgcatgaacaagcttcagtagatgattagatcaactggaagaaaggttaccagtgattgaagatcaaatgaatgaaatgaagtgagaagagaagtttagagaaaaaagagtaaaaacaaatgaacaaagcctccaagaaatatgggagtatgtgaaaagaccaaatctatgtctgatttgtgtacttgaaagtgacggggagaatagaaccaagttggaaaacactcttcaggatattatccaggataacttccccaacctagcaagggaggccaacattcaaattcaagaaatacagagaacaccacaaagatactcctcgagaagagcaactccaagacacataattgtcagattcaccaaagttgaaatgaaggaaaaaatgttaagtgcaggcagagagaaatgtcgggttacccacaaagggaagcccatcagactaaaagtggatctctcagcagaaactctacaaaccagaagagagtgggggtcaatattcaacattcttaaagaaaagagttttcaaaccagaatttcatatccagccaaactaagcttcataagtgaaggagaaataaaatcctttacagacaaacaaatgctgatagattttgtcaccaccaggcctgccttacaagagctcctgaaggaagcactaaacatggaaaggaacagccagtaccagccactgcaaaaacatgccaaattgtaaagaccatcgatgctaggaagaaactgcatcaactaacgagcaaaataaccaactaacatcataatgacaggatcaaattcacagataacaatattaaccttaaatgtaaatgggctaaatgctccaattaaaagacacagactggcaaattggataaagagtcaagacccatcagtgtgctgtattcaggagacccatctgacatgcagagacacacataggctcaaaataaagggatggaggaagatctaccaagcaaatggaaagcaaacaaacaaaaaaagcaggggttgcaattccagtctctgataaaacagactttaaaccaacaaatatcagaagagacaaagaaggccattacataatggtaaagggatcaattcaacaagaagagctattttaaatacatatgcacccaatacaggagcacccagattcataaagcaagtccttagagacctacaaagagacttagactcccacacaataataatgggagactttaacaccgcactgtcaacattagacagatcaacaagacagaaagttaaaaaggatatccaggaattgaacgcagctctgcaccaagaggacctaatagacatctacagaactctccaccccaaatcaacagaatatacattcttccaaacaccgcattgcacttattccaaaattgaccacatagttggaagtaaaacacccctcagcaaatgtaaaagaacacaaattataacaaactgtctctcagaccacagtgcaatcaaactagaactcaggattaagaaactcactcaaaactgctcaactacatggaaactgaacaatctgctcctgaatgactactgggtacataatgaaatgaaggcagaaataaagatgttctttgaaaccaatgagaacaaagacacaacataccagaatgtctgggacatatttaaagcaatgtttaaagggaaatgtatagcactaaatgcccacaagagaaagcaggaaatatctaaaattgaaactaacatcacaattaaaagagctagagaagcaagtgcaaacacattcaaaagctagcagaacacaaggaattactaagatcagagcagaactgaaggagatagagacacaaaaaacccttcaaaaaaatcaatgaatccaggagctggtctttggaaaagatcaacaaaattgatagaccactagcaagactaataaagaagaaagagagaagaatcaaatagatgcaataaaaaatgataaaggggatatcaccaccgatcccacagaaatacaaactaccatcacagaatactataaacacctctacgcaaataaactagaaaatctagatgaaatggataaattcctggacacatacaccctcctaagaccaaatcaggaagaagttgaatccctgaatagaccaatgacaggctctgaaattgagacaataattaatagcctaccaaacaaaaaaagtccaggaccagacggattcacagccaaactctaccaaaggtacaaggaggagctggtaccattccttttgaaagcattccaatcaacagaaaaagagggaatcctccctaactcatttcatgaggccagcctcatcctgataccaaagcctggcagagacacaacaacaaaaaaagagaattttagaccaatatccctgatgaacatcgatgcaacaatcctcaataaaatactggcaaaccaaatccagcagcacatcaaaaagcttatccaccacaatcaagtttgtttcatccctaggatgcaaggctgattcaacatatgcaaatcaataatcgtaatccatcatataaacagaaccaaagatcacaatcacatgattatctcaatagatgcagaaaaggccttcgacaaaattcaacagcccttcatgctaaacactctcaataaactgggtattgatgggacttatctcaaaataattagagctttttatgacaaacccacagccaatatcatactgaatgggcaaaaaccggaagcattccctttgaaaactgtcacaagacagggatgccctctctcaccactcctattcaacatagtgttggaagtatggccagggaaatcaggcaggagaaagaaataaagggtgttcaattaggaaaagaggaagtcaaattgtccgtgtttgcagatgacaaggttgtatatttagaaaaccccatagtgtcagcccaaaatctccttaagctgataagcaagtttagcgagtctcaggatacaaaatcagtatgcaaacatcacagacattcctatacaccaataacagacagagggtcaaatcatgagtgaactcccattcacaattgcttcaaaggggataaaatacctaggaatccaacttacaagggacgtgaaggacctcttcaaggagaactacaaaccactgctcaatgaaataaaagaggatacaaacaaatggaagaacattccatgctcatggataggaaaaatcaatatcatgaaaatggccatactgcccaaggtaatttatagattcaatgccatccccatcaagctaccaatgacttttcttcacagaattgtaaaaaactactttaaagttcatatggaaccaaaaaagagaccacattgccaagacaatgctaagccaaaagaacaaagctggaggcatcacgctacctcacttcaaactatactacaaggctacagtaatcaaaacagcatggtactggtaccactacagagatatagatcaatggagcagaacagagccctcagaaataataccacacatctacaaccatctgatctttgacaaacctgacaaaacaagaaatggggaaaggattccctatttaataaatggtactgggaaaactggctagccatatgtagaaagcttaaactggatcccttccttacaccttatacaaaaattaattcaagatggattaaagacttaaatgttagatctaaaaccataaaaaccctagaagaaaacctaggcaataccattcaggacataggcttgggcaaggacttcatgactaaaacaccaaaagcaatggcaacaaaagccaaaatggagaaatgggatctaattaaactaaagagcttctgcacagcaaaagaaactaccatcagagtgaacaggcagcctacagaatgggagaaaatttttacaatctacccatctgacaaagggttaatatccagaatctacaaaaaacttaaacaaatttacaagaaaaaatcaaacaaccccatcaaaaagtgggtgaaagatatgaacagacacttctcaaaagaagacatttatgcagccaacagacacatgtaaaaatgctcatcatcactgaccatcagagaaatgcaaatcaaaaccacaatgagatgccatctcacaccagttagaatggtgatcattaaaaagtcaggaaacaacaggtgctggagaggatgtggagaaataggaacacttttacactgttggtgggactgtaaactagttcaaccattgtggaagacagtatggcgattcctcaaggatctagaacaagaaataacatttgacccagccatctcactattgggtatatacccataggattataaatcatgctgctgtaaagacacatgcacatatatgtttattgtagcactattcacaatagcaaagacttggaaccaacccaaatgtccatcaatgatagactggattaagaaaatgtggcacatatacaccatggaatactatgcagccataaaaaatgatgagttcatgtcctttgtagggacatggatgaagctggaaaccatcattctgagcaaactatcacaaggacagaaaaccaaacactgcatgttctcactcataagtgggaattgaacaatgaaaacacttggacacaggatggggaacatcacacactgggtcctgtcatggggtgggggtagtggggagggataccattaggatatatgcctaatgtaaatgaggagttaatgggtgcagcacaccaacatggcacatgtatacatatgtaaaaatcctgcacgttgtgcacatgtaccctagaacttaaaagtataataaaaagattatttaatatgattccttccagtgtttcaagaaaactttttctccaaaattttttccagcgtataaatttttctggctgaatattataagaggctgttgctaaaaagacatactagaatggcagctttaatctgttcatgataggagtgagcataatacatgatctctttgagtgttctgcctcatccaaatgcagtgtggcaaaggctaatattggaggtaaaacctctaaatgaattttttccagctaccaagtcataggacaatagcagatacgtccttgaggtagaggaccataatgccacagtgttagtagcagtacatttgtccaagggagttccagggtttattaaaattatgataattttaatgtaagaataccattcttttaaacttatgtggaagattgtaggaggttttcacaatgttgtcctttactatcagccatgcctcacataatcactttataatactttcatgggtgttcttcactcagttcatgcaaaccctggcagtttataggctaaaaacacaaaatacagaagcttttaatcaactgaaagagctgtagccttttctcaaggaattatttcaagacacggagaacacagatggatgataaataaagtacattcacatccccttaagggtagaaattgaggaaaatttacccaaaggtgtccaaagggccctgtgacttggtttctgtctaagtcccagtgttagggttcttccaggattttgtggctagctcgtcactcctcatcaagaattaacctctgctgtttcctcaaagtgtttatttaatctgataaccagtttgtctataaattatagagttgaaatgcaacaaatttcatttgaaataatctggcacaaattatctaagcaaagtcgataatgatgttttttcattcatttgtatttaagatcatcagctaagcgttgatatttttgataacacccatgtctctctcagcagttttgtcttctgaggatatgatctggcgtggcagttctcttagcttcagtgttacctctttttgccttgacttccacctttatatttgcccggaatctgggatataggagtgcctctaagagtcccctaacttgcccattttggtgagtgttctggaacctatgagatgctcttttgtttacaaagcaccccaaagccatgtactgtgccaaaaggtgtttatttcctagtttgacaaattagaaagttctaataaatacaatcacttctgccatctgggctgattttatatcagatagaggactgtgttctaaaggaaatcttacattagtaagagcaattttagtcattaacctagagttgtactattgaggtgcaagtcataagaaataatattaggtcgaggttctcagtgggagtgtctaaatgtcttgtgtgtacagggtctcctctattaacatgaagcatttttgagcacagtcagtttccagctatgcttctccctgtctcactatcaccacaaactaactatgaccccacctggaacctaggttaatttccaaataagtcattctttaatctttgtgcctctagattattatgtgagtcaatttcagtagaaacttaaaaagaacatttgaacggactaaacaacacagaaaaacactaataaaatgcaaagcctagatgtgagaggctccaggcctggataatggaacacttcatgtatgcaggtaatttcttttcccaattcaacactgatacacccagcatatcagcttcatgccccattttactcctattatgtagagatatggcaatgacattctcaaggtccacacacatatatgaaaattggtaggactaggggaggagatgagtctgcacttctcctctgaaggaccaggaaagcctggacagaccatctccccggcctccatgactgcacctcctgcccacatggacactcacccctgataggataagaggattccattgatgaggctgagtattttatgatataagttactagagagtgacattgaggtttcaaaaactaatatttataacctaaatttaatttcccccaaattgttacctctttcttcagtgaaaaattgcttgccgtgattgagatttaggtagattccaaatgttcacaactaagcttccaagagcgtattgggagcaaaaactgaatgagggtagagaaacccatcatcatgtattcaacactaaattcaagtggactcagcactgcctttgatcactgctgcttctctgcagagttcaggtttctacttctcacgattccaacatagactctctctctcccaaatgtttggcctccacttgctgtaaggtcgcactctgttcttagtttgttctctgaaccattttatgagggtggtgatgagccatttaatggaaattttatatcatttcagctgaatcccatgggggatcatgaattattcttctggttatagtaatggatttttcttggtgtgttcattaccagtaatattcaaagtcatttcatttaaatctttgatgcttcattttttgttgctatgacattctttcttctattgaatcttcccactaggcattataacatggatctagtatccaggctcagttgtcatcaataataaccacatatgtcaaaacctatgtcttctttccacaggagacatatttttctcttttcaggggatgaacacacactgctgagtgaccccactcacaagtacatatacacaattatgagatttttatttatttgactaataagatgtatcattctcccttaaaattcttcaacccccagaagcccgtgacaaactcttctgcatctgttcataccataaactcagaaaacaaaccacatggtgagtaaaagctcacacggttctggatatggggtccatctcttcccctgcaatgtcctgcagcacctcagaccacctgtcctggttctatcaaggaagtttacctccagcacagtaaagaaaacaattgaaggaggagagaacctgcagatgatagacaatattcaaaactattcatatgacaagggattactatcaagcacataaactcaactgaactgcaaataacaatatgattaataatgggcgaataacatggataaacgtctctcagaggaagacatgcaaaggatagatagatagatcgatagggatatatacatacatatattgctagaaataactaatatcaggaaaatgcaaattcacaatgagctatctttccttaatctttgctggaaagtctgttagcagaaagacaacataaggaaaacaaaagctggccaggcttcatggaaatgaacacttttatagaccacttgtggaaatgtaaattagtacagccatcatgggaaaaaaaagacaactaccatataaatcagcaatgcaactgctgagtgtgtgtgtgtgtatatatatatatatataaaattaaaagaaaaaactaatattgaagagatacctgtcgacccatatttattgcagccctaaacacaattacgatatgaaattaatgtatgtgtccatcaaaacgtgaatgggtaaataaaacggggtatatttacacaatggaatattattcagccttaaaaatgaaattccgctgtttgaaacaacatggatgtaactgggaaccgttgtgttgagtgaaacaagccagacacagaaaaaaaaatacctcattttctcaatgttatgtagaagtttaagaaagttcatcttctagaaggaaatagtagagtagtggttatgaaatatcagaaatgggtggaggccgagagataagaagtggtttgttaacaaatgcacaattacaggtagacaggtgggatacgctctagtgccctacagtgcagaagggtgactacagttaacaatatattgtacactttatgtttacaagtagccagaagagagaattttgtatgctaccaagcaaagaaatgttaatgtctgagctgatgaattagctcgttgttctgatttggtcaaaccacattgcacagatgtattgaaatatcacactgtaccccataaatataaacaatcattatctgccaacttaaaaaatcctttaattaaaaaagattttatttgcatacattacaaatgattcaacacagagccaggaaaatataacatttttatttgaaatagttaaattcctaacaaaatagttacattctttggcaccaaactgtgtatttgatcatggtaagtatagacagacttatgcaaagaataatatattttaaacttagacttctacttaatactataaataaaaataattttagaacagctaagtaaaaggaataaagttgaggaaatgtgtgtgtggtgtgtgatgtgtgagctttttcttgtaaccacactgtccatggtggatgtgtggtgtgtgtgtcttgtgtcttgtttgtgtttcctctgctaggggttctctgtgattctaggatctgtagctccagtgtgtttcaaaaaattgggaacattcttagccattactttttcaaatacttctctttatctgcaatttctccttttcagaattaaaatatacatatactacactttttgatattaatgtttagtttcttcagtctctgttcctttgcaatttacattgtgaattttctagagacaatttaagtgcatggtttcatttaaaagctgagccagctctactgaggggtatgcccaaagtttgctcaatgtttatactgcattgcttttggtttcttatgcacttccatttgattctttcttaatatttatatctctcagttccctatctagtcctgcattatgtccacagtttcttgaagagattctcacatatgaattacaggtactatacatatcttgtttaatcagatatttctaatatctgtatcatttacaaatctcattctgaacatttgtttattgtgactttagtatttctcattaatataggtaataattgttgttgataaccagacatgttgggtcagacaggggatattatcttattatttcattttatccattttctgcctgtatgtgaccacactttatctgtgccaggcctttaatgtggaaatgtctgaatcttctcagagctacatgtgacatttacttgtggagtggacgtcagagttgaagtctgctcttctgtgcccgacagagacttcagatcctccagtgataccttgtttttctttcctgcttggctgtgtctctacacctgttccctcctccagagaatctccttcagttccttcaggggggttaagatgttatattcaactgacaattgtaaaattgtcatagaataaagggatatttagaataaagggatattttctgacctttcatgggtccatattgtgatcctgagtctgggtgtgacctttccattgtttctgaacttcctccagatgagatgttggtctgtgtgttcttgctgttttccctgggtgagagtcctcttgttttccccagttgttccctcccacagctccaatgttctcttttggtgttatcatcttccagatttgctgacctgacccatagattaaggctctgattcagtatgaaagggggaggtacttctcaatggaacttaagtaaagacctctttttccatctcattttctaagggattgtcccagtgcccctaagatcctggttttggtggcttgcccctgcagagtaatttcttagttcctgcaatggggataaaggaggtgagtctgaatgcatttcaaagtgtgggttctttttctctcacagacagacacattggcacggaaagatttttgtgactctccacattattgggaaaactgattcaagaggataggaaagctcttcagtatgtggtccctgagaaattcatacaacaccttttaccacacttgacttcaagcaatccaatatatatatgtgtgtttttctcttgtagtagcctacattttacatgccagactctgcccagttcagctcatatcctggccttgttactgcctacaagaacttgcctctccctgcatttcagatttgatgtttttcttaaaacttcaagtatttaaagtatttttaaaactttgcaaaatcccattttgctctgtttacctgatattgttgatgttgttattgtaaaaagtaagtagaatatattcctcatctatgtacgtttcaaaactgagttgcagctttttttggtaagacccagagtcataaaagactgcaaatactgttaagctgcttaacagaaaaacaaatgctggtaaatgtgttcactggaatactacccgtcatttataataaataaatgcctgacacacagaacaacataaaatatctaagtatttataccgagtaaaatatgccaaacaaataagaatatatactatgtcatttcattttttataaatgctgatgaataaaaaatgcatctgaagtaaaataatgaggatccagtagttgctgggggaaatggtagaagggaaggggagaggaggaggaatacagcagaataagaggaagtgttgagaagaattcacttgtccactttcttgataatgacgacagttacatcacgtttattaattgcacattttaaatatgtgaagtttattatctttcaattaagccacataaaatgtattacaagcaaatggaaatttagacaagcacggagtaatagaaagatccaaacatatgttaaatgtcagaagtatctgaaaattagtgtgtctggaccctagttctctccatattttcaggtgagtgctggtggcaacatcacacatgctcttactacagaaagtgggttctgaaaaccacaccaggcacgtccagctttgtcctggagttggtttagggggatgtcacagccagtgacggaggagcacagggccagataccagcgttcacttatcccagacatgaactcctggatgcatacagagccccctccacttgtgggtttacttccacttctgtaaaaggagaaaatattgactcctacagaacataatttacacaaatatttacagatgaaatagggtgatcagggcaaagtgtttatcacagcacaatttcataagacagcatattttccaaataccatcgtcagcaaacatctgcagggcaccgtcttattatctgggtacagcctattcctccagcgtcccaccctagagcttgttatatagtaggagatatgcaaatagggacctccctctactgatgaaaaccaaccgaaccctgaccctgcagctctgagagaggagccttagccctggattccaaggcctatccacttggtgatcagcactgagcaccgaggattcaccatggaactggggctccgctgggttttccttgttgctattttagaaggtgaatcatggaaaagtagagagatttagtgtgtgtggatatgagtgagagaaacggtggatgtgtgtgacagtttctgaccaatgtctctctgtttgcaggtgtccagtgtgaggtgcagctggtggagtctgggggaggcctggtcaagcctggggggtccctgagactctcctgtgcagcctctggattcaccttcagtagctatagcatgaactgggtccgccaggctccagggaaggggctggagtgggtctcatccattagtagtagtagtagttacatatactacgcagactcagtgaagggccgattcaccatctccagagacaacgccaagaactcactgtatctgcaaatgaacagcctgagagccgaggacacggctgtgtattactgtgcgagagacacagtgaggggaagtcagtgtgagcccagacacaaacctccctgcagggtccccaggaccaccaggggcgcccgggacactgtgcacgggtctgtctccagggcaggtgcagttcctgctgagggctggcttcctgtcatggcctgcggcgccctcattgtcaaatttccccagggaacttctccagatttacaattctgtactgacatttcatgtctctaaatgtaaaacttttttgtcctttttgtttctttgtttttgtaacaggaggacacaccctcacctccacagaaaccacagtgtcactttgggggcagatgatccttctgtggtcagcaggatgaaagttccgaggaatctcaggggaacccgaagagtgtttgccagttagactcagggcagcgacctccacgggaatctctgattagaacaggctttgagttctgataggagccaagagagacgctcacacagggtcagggtccttaaagcctgatggttttcacagctatcccccctggtcttgtaaaactgtgtacatatgactcagactgattcacttgaccccctttctgctaatccattttccttctctgcatacttgattctcacaattccctttcttctcttccccgaaaactgaggatgtgttttctgtagtctaaattccagggctcaggtctgcaggacctgggtaggctacggggactttctcactcaccattgtctggactctcctgttgtcgtctgtgaacagagatgtttggaagatgaagtggacattagtcatgaagggaataatactagttttctccaatgggatactgatgtagagctggatcttgtgcttctcacactgtcacagagtttggactctcacccgtgactttgaggagagctgaggatggacactccattgtgctgtgagctctgggtaacaatagtagggccctggctaggcagcctaaggtcaatactgctggccttcaggaaagacaggctggaattcctgggaagacctgcatctgccgtccaccatggagtcccatcgtcttctattatgccctgattgaatcagccccacctaggttatctagaacactcttcgtgacttacgaaaaaataatgggaggctctactaacacctgtgttatgccatgggagcaacacctaagctagtgtgtgattgagtagatgagactgtggtctagtcaaggtgacacataaaattaattgttgccattataatattttattatatatttggcaatatagtcgtgctcatattataaatacttttgctacgttgttgttatgtcagaagcttttgaataagaacagcttcatcttgaataggggctaggaaaaataagactgagacctgctgggctacgttcccagtaagctaaggcgttcttagtcacaggatgagataggaggtctgcacaggatccaggtcataaagaccttgctgatgaaggttacagtaaagaagctggccacagcccaccaaaaccaagacagtcacgaaagtgatctctattcatcctcactactcattatatgcttattgtattgccttaacatgctaaaagacactccccctagtgcatgaccgtttacacatgtcatggtaacatcaggaagtttccctgcatggtctacaaaggaggggaggaaacctcagcttcaggaattgcccaggggactcatgaataatccatccgttgtgagaaatacattcatccctttgagagaaaatgcacagggggtggaatgaggctgggaagctgatggcacatggtggaagcctgtccctgagtgaaggagagggggaagctggattgggtggaaggtctctatatttgtgtgctgtgcaaggaagtgcaaaatataattgagttttgtgcaagtcagtgctgcctctcaggtgatccccatgactcccagaaatggctctgcttaggaatccctggggagtcagtcatttcattagagtagaccacaggacatgggcttcagcacacgccatgccacagatgtcagaaagcagctgctgggaacctgacccacctgcattttgctgcctgtaggaaaaggcagggaggtgcatcctcagggacaacacactgttttggatttctataaagaacgctgcttttactgtgttttattggaaaatacatgaacaaatgtgagcctgcaaacaattgtaattttcagttattttaattgcattcatttgtaattctgcatgatatgctgacacagagtcgcatttttcatagatattgttcaatgaatcaagaacatgcattttccactttcactggtttttctccgtgtgcagagaccttgagtagagcctgtctggcccttatccacactatctcttgtgtccccgggaaaaagcagagatttgcctgactgcagaatctggggtaggagtctgctcagctcacagcctgcagagaagcccagtgaagttttatggagtcagagagctttcccatgtggggaacctctagcttacccatggccagagattactggtcagctgtaattgagagtttaacaattagagcactcagaagcctatctcatcgcagcttcattatgtaacttaccaccattagactgcggtaataactcaatcttgatttttctgaccccattttctcatcttattcatttgtaaattgggttatagaaaatgttatgttttagactctgattcaaatctcagaagtttatgaactcatcaggaataatacaaaatgtgtctagttttggggaaatgtaaatgaatgtccatgcagtgtgtgtgtttgttgtgtggggatatgtcagtcacaccccaatgaacatgatttctgaattacatcatcaaactacaattagatttgctgaaaattgcctgcagtaatgtctgtgatgatgaacctgtcaccttgttgtgaggatgctcagtgcacaggcgaggttgcacaggagacatccaaggagcagcccccaggcttggcagaattcctggccaggagccagacataggactgggtgtctcaaaagcagattccccaaccccatccctttatttggactgcatgggcatcatgaggaccagcaggagatgctcagaactcactcaaggcagagcaccatttaggagcaggtgcagcgaggaaacagccagagaacctctgactagaagcttgggttgttttcttttgcttaagagcatccaagcctaagtatatcaaccactatatgtatatatataagtagactatccactatatatagagagagatagatataatctgtatatatatacagattatatctatctatatacattatatatacagattatatatatatataatctgtatatataagaaagttatgagttacagattatatatatacatttatatatatacatttatatatatttatatacatttatatatatacattttatatatattatatatatacagagcaaaacgaggttaatatgactctgccattaactccttgaacctgggtcattttttctgagaatgccgtcatctacagcatgatggttctcatgtcaaaatcaacacgcatagttagtcaccatgaagactgttttatctcatggtagaaatgtttatttaattaaaaaattacatttcatacgaaagggtctgtattatttctttctcacactgctgtaaagacatcacctgagaccgggtaattcgtaaaggaaagaggtttaatggactcacagttctgcatggctggggagcctcaggaaacttacaattatggtggaaggtgaaggggaagcaagtcccttcttcacaaggcagcaggatggagagagagagagagagagagaaggagaagcaggataaagagccggaaacttatcagacaaaccaatctcctgagaactctatcaggagaacagcgtggaggaaaccactcccacaatctaatcacctctcaccagacccctcgcctgacacttggggtttacaattcagtattagctttgggtgaaaacacagagccaaaccatgtcagaatttctaggtgagaattggtcaattcataagttattagtgaagtatcagaaaaataaatagcaccagtgttgttgttatccagttaatttataaaccatgtcaatatccattttatgagaggtgtaggaaaagtgtgagatggatagatagatagatagatagatagatagatagatctaccaaatacaatatatataactatattatatatattactatgtatataatatgtagtaagtgatatatggtatatatatatgacattaattctaccaaatacttcacatatgtatgtgcatatatatataatattaggtatgatatatatatgaaatatcaggacatatatatatatatatattttataatgtctcctgggatttagtgttgaattttttaatatctacatgtattccaggataaatgttggtggacttcataaaatatattctaatttttatgtgcaagatgatcactttcaaataaggtttagctacagaaaccagatgtatctttctaccagaaattactggaaagcacagtgaaatttcttaatcaggattttaagatgcttgacaccactcaacaaagacagtgattactaagagagagaggaaataagcataaggagccctccggtgaatgcaggctcagatacttcctcaaaggtgttgccaggctacagtgctggagtggaaaccatgtggatttagcattaataaaatggagctggaaacccatgtaggccaagaagtgtggataccacaggatagcaagtggattgcagaaaactgtcagagagtgaaccccatagatggcaggaggaacacccagacttgacagagtgcagatcagtgtgtagaaagcagggaaggttgtacgtgagaacacaccctgctgcaggaagctctccctaaaatccagagccatggtaaatatatgaatatacacttacaaactttaaaacatacggaaaggcaccataataaagtcaaataaaggaaaggtgggttggctacattaaaatataaaaagagtatttctgagcaaataataatacttatgaggggaacaattttattctaccatggcaaatgatttcagagaacaacattcgaaatgcttatggccataatgaggaagcttcaaacaagtatacgaatagaattattaccagagtggtagtaccagagccctcagctttctgatgaaaactgattcttattatgaaagctaattattattataagcttattattattaacactaattattattaattataatattatataattattataatattattatgaaagcttattattattatgaaactgatattactagagccctaagctaagtgttattaccagagtcctcagctttccgatgaaacaacaacgtctgataaaaattgtaataacccaaacatataaaatcaattcaaattattctaaggatgcacagtaaataaaaatcattgattgataaagtgtgctgctatagactgaatgtttatttccgccctcagacatttgttggaattctaaccccaatgtgatggtgttacgaggttgggccgttggtaagtgaatgggtcacctttggaagatgactaggccccatccaccctcatgaatggaatcagtgcccttgttagagactccagaaagctccctctcctcttccaccaggtgaaggaaaagtagaaagatggtcaactatgaaggaggaagcaggttctcaccagataccagtttcaaagcatgttggccttgcacttgctgaccttcagaattgtgacaaatacatttatgcttgatctgaaccacccagactattctcttacagcagctaaaacatcaagtctcagctagggcagtgagggcccacaatacttgagagacgagcatcaccctctcctttccagttcaggatgacagaagcttgatctcgggctgaactgacaagcagagagtccttcctctcccccagatcgcagttgaggccgtggtgtcagatctctgtggttgagagtgaattccagtctgtgatttcatggatgcctttcttcatctagttccacttatgagacagagattccatgctatgagttataggccaagaatagaggaaccccaattattcccacccagctcacctgtagggcagaggatctggagagctttctgggtgaggcacaaagagactgtatgagtccacccctcccatgcagtttcctgtacttaaagcagaggtgtccctctgacacagatgaaccctttcttccgcaccaaggcagaggcggttatatttttacagtggcagacagagggcataaaaacagaaatgcagagctctctctaatggatgtgactttatttgcagtaaaaggagaataatttcaaccctaggttttttctaaaatattataaatatttatggtaagttattaatagaaagctggtggcttcatgagagcaacacattaaacaggaatccactcatttcagcggacagaaggagaaaaaccataatttaggaataatgagctgggcactgtggcactgcctgtggttccatccacttgggagtctgatgtgagaataacacttgagcccaggatttcaaggccaacctgaaaacgtagctagaccccatttagtaaaataaataacattttggggtcaggacaaagttcaaaaactgcccctgaaatgaagcccaaatttaattgtgtaacactgtggattaatggatgacacaacagtgtcaccatgcctgctgtgagtgcagtgtaacacttggatgacatatgaagagatacagacacccaaacagagacatcagacagtgaagctgtcaaaggctgcactgccgagcgtcaggctttttatggaaaccgtgtgtacatctggaactgcacctgggaatgacgacatcaaccctttaatagtgtcggggaaagagacgtcactgaaatagacaaactaagggactcaagaaataaatagagcgattggttttaccaatacaccagagcgttttgggtgatcactattcagagtttctgaattgtgttacctaactgtcattcagaaaataattatgagatacacaaagaaaaaaataacgtcacgaatgtacaggaaaatttccagaaaacacaaactgtctttgagttggtacagattttggacttaacaaatggagacttcaaaacaattattataaaaatgcacaaatcacaaaggaatactatcctagaaaagttaaggaaggtatgatgacagtatctcaccaaaagttaatatcaataatgagagagggtttttgaaagaaagttatagacacgctaaaattaaaaacacagtaattcaaaactatatgtcagaggtgataagcagtatacttgaacctaaaaagaaaaaaaagcacacttagatatatattagtagatatgctatattcaaagaatagtgaaaattgcaataaaatgaaataagcttaacataaaaggtggacccagctagacaaatcaacatatgtttagtgtgaacattagcatgagaagagagaaagaaatatgtcacaaaaatatgtcataatataatgacagataattccatgatttttatgataaatactaatatacacattgaagtatgaatagctcaacaaactcaaggtaaaataagttataagagatcctcaacaaaacacattataataaaatattttacagaaaaactactgagaaaatcttgaaggcagtgagagaaaaacaacttctcatatacaagataattctatcaacagctgatttctcatcaataacagctaatgctaaaaggcagcaggatgacatattttccctttgtatcccattttatcctcaaaggccacctgcatacaaagtagaccagtcttacaagaaaatcacagccctagtgttcttctctcaaggagcccggctatggacctaatggtgccctccccaaagtcataagtataattcccaacctgcaatgttacagtatttggaaatgagacttttgaaagtgatagagtttgaatatttgtcctctcccaaggtcatgttgaaatgtaatcaccaatgctggagggggggcctggtgggaggtattggataatagaggcagatccctcaagaatggcctatgcaatccatgtggtgatgagtgaattttctgttagttcgcatgaaatctggttgtttagaaaagtctggagcctcctccatctcttctcttgccctttcttggccccatctcttctcttgccccttctcttgtcatgtaatgcacctgtgtgcctgctgcctctttgccttccacaatggttataaactttctgaggccctcacaaagcagatgctggcaccacgcttattgtaaagcctagcaaatggaaagccaaaatgaaacctgttttatttataaattttccagcctcaggtactctttcctagcaatgcaaggacacagcaacacagaaaattggtatcaagaagtggagcattgctattaaaaatatgtgaaaatatggacgcagctttggaacaggataaccgtcagggatttggaaggtttggagggctcagaaaaagtcaggaagataaagaacagttgggaaagttttagagactggttaaatggtttgaccaaaatgatgaaataaatatggacagtgaagtcaaggcagagaatgcctcaaatgtaaatgagaaagttatagggaagtgaagtaaagatcgcctgtcaagcaaatcacttgactgcattatgttcatgtcctggggatctgtgcaagtttgaacttacgagtgacgacttagggtatctgacagaaaaaaaattgtcagtagcaaagcattcaagatggagtctgcctgcttctaacagtctaaaatcaggtgcagaagtgaataaatgacttaaagttggaacttctatttaaaagagaagtggaacatggaagtttagaaaatgtacagcctggttctctggtaaagaaataatccagttacactgtgaagcaaccgcttgctagaaagattagcttgactaaaaaggagctgactgtggtaatacgaaacaataggaaaatagtcttgaagtcaattcagaaatctttgaggccaattctctcattacaggcttaggtataggagcagagaatgtttttgggggtgagaccagctagggctcaaaggtacagctcggttcaccacgtctgatggcgcaagctgtgatccttggtggcttccatgtggcataaagcctgggtctgcacagtatgcaagagtcaacatggcttggtgactggcctctagatttcagaggatgtgtgagaaaggctaggtgccagaaatgagcctacctcagggtcagagtacacacagagtaatttttccagggcaatgctgaggtgaaatgaagagttaaatcccccaaaagagatccccaggagaacactgtgtagtggagctgtggagagaaggtcactggccctctagaacccagaatgggagatccaatagcagcatgtgccccaagcctagaaacgctgaaggcactcagctctaaactgtgacagcagccgtgttggctgcactgagaaaagtcacataagcggttttgctctcagacttgcgagcccataattgcaccggctgcaagatgtggagtcactggtcactttggaggcttaagatcgagcgcctgtcctgctaggttttaggcttgcatagagcctgttactcattcatttggcaagttcctctcttttaaaatggagatgtttacccaatgtccgcaccaacattgtacctttgaagtaaataagttctttctaattttacaggctcacagatggaagaaatgtgggcatgaatcttagacaagactttggactttaatggtgaaacaagttcagatttaaggggcagatttcgaggggtgggtattgggaagaaaatgatcccattttgcagttgagaaagatataagattttgggtgataagagttatgtggcttccatatatgtccattcaaaaatctcatgtttgactgttatccccaatgttcgttggggttttgcgttacgggggcggattcctcctgagtggcttagcgccatccacttggtgacgagtgagttctcacatagttagatcactcaggatctgattgtttaagggagacgtggatctccccctttccttctttcccctgctcaccatgtgacactcctgcttcccctgtgccttttaccagaaatataaggtttttgaagccctcaccagaagcagatagcagaaccacacttcctgtacagccttcaaagcagtcagccaaattagaatttattttttataaatttctcatccccaggaatacttttatagcagttaaggaatttctataagaaagaaagtactgaatttaaaggagacgatgagggtgaaacatcagaatgaaattactgacctcaggagtaaagacaccagacagtctctctctctctacttctctctctctatttctctctctctctctctctctctcacacacacacacacacacacacacatgccctaaatgaaaagatcatatgatcaagtaacaatatgatggctgctctgagccaaaagtagaagcctcaaactaaacctatcttgtcagcatcttgatcttggagttcacagcactgataaatggaataaaattaatgttgcacgagtcaccaagtatgacagtttgtaatggcagcttaaactgacgaaagaaaatttggggttaagaagaggaaatctgatgttacaattatttgaacattgtgaaagtagcttggaattgggttatgtgtaacaggatggatacctttgacatatatgaagaaatttgcatattgagggtcatgctgatagacagaaatgagtggttttggaaaatggagcaacagtcatccttatcataaagttttttaaaaaaaacttggctgggcagtgatataatatttagtgaaagagaagttgtgagtagtgagaaattgtgagtagctgagaatagttctaagtgttgaagatattttgcttgattcctcctgagtgcttaaaataagtgaggtagataaattaaaatcagaaaaaaataaaagaaaaagaatacaaaagctgagggcttagaaaattcacaacctatccatattgcaaaaatcagaaactgtattctacaaagaacactgagtatatggctcaaatatcactcagtaagaagcttaagatactctatgaaaagaaatatttcaggttttaaagaatgagaattgacctgagacaaatttgatgaatactgttagatttttcagatttaatggcctggaataatagagctacttggctgcaaatgtacacaattcttccagaagagagaaaaataagctttaaatttatttagaaaccatcagaccactgcctctatttcaacagaccagaaagcctgtttctaaaatcttgaggaagaaaccacccaacagaggcttgggttgggagcacccagcaagccctgtgtgtagggctgcatgaggcccttgacatgggagctgggcctagcagtgcctcaggagcggtgcctctgcctgcagctttggagctgattctgctgctcgaataagctgagaaggaaaaagaatgtttcagagaagattacagtggaggcttaaagcatatggaaatttgttttcctatgcattgtatttgctggagacaaaccacccattttaccccctatttttttctttggcaatgaagctttctattctatgcctaattcaacaggacacagcagcggctgtatccagtttgacaagattcagcatgaaaggttcctattacctgtgccggatgcatcactgatatgcggccaccagtttcttaggttcatatcactttaagggaccaaatacaaatgtcaatagcatatgtcattcttaaactgcagaaatggtgtcaaagaagaatgtggagataagagagcaggaggaattatgaaaatccagatagcatcttctcttctagagtggaaggtacactagtaatttcatgaaacaataaaatagatgaaatgtgtcatcatcatggagtgtctcacagtggcagtgcacaaataaatttctaaaaattccataaggtaggtgtgatggatgaggcttatttccacacagggagcccataaatacccagataagtaaaaaatccaacacctggaacgaaaaatgcctcatcttgacatcacaaacccatctcagtaagtccgaggagtaatgtggaaatgaaacggaaaattcacaaacacatttattgtgaaatttttagcacatgtttgaacattaaaacagaattgtccacaattttaggaaaaccactccatgacaatgagtcactacactcatagaaacaccactgagtcaacagagttctaactgtcagcaggtcagtactgaggcctcaggagaatcaaggctctagggtacattttacagaacccagaattgagccacacaatctatagccaaatgatctttgacaaacttaacaaaaattaacaaaaatatacaccagaaaaaggacaccccattcaataaatggtgctggggaaatggaaatgaacatgcagaagaacaaaactagacccctaccctcaacacatacatactcaacacaaaatgaattaaagacttagatataagacctcaaactataaatgtactcaaataaaataccaggacaactcttctgggcattggctgaggtaaagaatttatgactaacaccccaaaagcacacccaagagaaaaatagacaaatgagacttaattaacctaaagagatatttcgcagcaacagagtgaacaggcaagttgcaaaatgacagaaaattttcgcacaccttgcctttgacaaggaactaacatgaagaaattacaaggaattaaactatacaacgacaacaacaggaagaagaaccaaataaccctattaaaatgagcaaaggacatgagtagacatttccaaagaacacatacaaatggataataaatacataaacaatgctcaacatcactaaccattagggaaatgcaaattaaaactacaataagatattatcttacaaaagccacagtggctattattaaaaactcaaaagtatcagatgttggtgaggatggaaggtaacaggaactcatctacactgtagatgaggatgtggacgaggacaacctctatggaaaatagtatggagtctgcccaaaaaactggaaatagaactgccatttgatgcagcaatcccaccactgggtaactactcaaaggaaaataaatcattacttcaaaaagatatccatgcttctatgtttaccacaaaactattcttaataacacacatgtcaacctgagtgtccaccaacagatgattttataaaagaacatagcacgtatacacaattcaatactagtcaaccacaataataaatgaaactgtcttttgcagcaagatgcctagaactgggaacaacataattagtgaactaactcacaaacagagagtcacatgtcacacattattatttataagtggaaggtaacaacgtgtccacaaggatatggagagagaaatgatggacaccggagacttagaaggatgggaggtggaaggtgggagcatgaggagacattacctagtgggtacaatgtacattatttgggtgagagtacactaaaagccaagaccactgtggaatatatccatgtgcaaaagttgcactcatagcctttaaatttatataaataaatgtacaaacaaaaaaattaaaaatataaaataattaacagttgaccaatgatcttaaagttaaaatttagaccaggcgtggtggctcacgcttgtaatcccagcactttgggaggtcgaagcaggtggatcatgaggtcgggagtttcagaccagcctggccaacatggtgaaaccccatctactaaaaacacaaaaattgaccagatgcggtggcaggcacctgtaatcccagctactcgggaggctgaggcaggagaattgcttgaacccaggaggcggaggttgcaatgagccgagatcatgccactgcactctagcctgggcgacagagcaagactccatctcaaataaaataaaataaaatgtaaaaaatgatcaataaatgaaattactatcagttgaaactcattaaatttaaagacattttctactcaagtaactataagaacatgaatgtcaagtttcagatgggaaactattttcaaatcagataaccaccaatttaattataataagaactctcaggactcaactgtgaaaaaaaaaaaaggaaggaaggaaggaaacaccccatggttaaaataggaaagggttggtgcagacatttcatcaaataggatgtgcaggtgacataagcatttaaacaggctcttaacaggatttcccattaagggaatccaaatcaggcccacaatgagaaaccactatacactttttagaatggctgaaattaggaggaaatacaggtaataccaatgctgatgagcataccaagttcctagtgtctacgacattgttaatgggactgcaaaatgaaacagctactctggaagataatttttagttttttctgcaatcaaacatgcccttaacacatgacctaaatatcccactcttgaattttgcttcagagaaatataatcttatattcacacaaaacctctattcaaatattcaagatattgcgtgtgtgtgtgttagaaactaaaaataacataaatatctcaaaatctgaataggtgaaaaaactaggaagcaactataaattgaataccatcagcaataaaaaatatcaaatgatcgattcacaaaccattacaggtggaactccaggcattacgctaagtgagaggaagccagtctcgactatcaaagggacacagctgtaagcagcacggtcatcctcaggtgtcagtggtttgggctgggctttctttgtctctttcctgaccagacccagatgttgagctctgccacttggagatggaaaattctactattttcaaccatgcactgaggtgtgaattacttcacagactgaccaaacaaacatgggctccactgaagagtgtctggcatttgtttcaaccacaagagaacttttcccagctcttccatgtccttggttctctcctgcaagccaggagccctggagtgtagcctgcatctcccatgtatccacccagctccttccaagggtcttccaccacaccctccactgtttgtgagagcactgggaggctttcaatttttccacattctgttgttactgaagttaggatgtttaggacttattaagatcatattttatgactgaatttcattgccccctctctcctgggacagagctcctaaacaaggttctgcaggtgtagacaaagttgagctgttttattcctcagcctaggagctgagcgctcagtggagggtcggagaggagcttcccaccttctcagcacttcggttatggtgggggagaacctctgccataggacagagctaggaaccagagacccaatgttcccagtggcgctggacccaggggagagcctccatccatgagtggggctctatggaaggagtgagtctctggctctcagtagctcttgtccagcactgaacctcagcatcatgtgctgtgggcagggtcagagggccaacgtactgccccctggggaagagtttcctctggtgggagttggtagaaggtgccctgtcttcttggctgcatctgtccgcagtggagtttacatcatgctgagctgggatgtggaaggaaggaagagcaccttagatcaaatacgatgactggccttactgagttttctatattttcttaaataaatatttcttcacttgctttatgctgttagatcctttccaaaccctgtaattttttcaaaataattttcactggtctcatgagggcatggattcattgagcccctcatgctgttaaagagaaatagaactgtttttttttttcactttttagcgaacatccatgggttataaaataattagttgacatttcttccaacactttacagataccatcaactttcctcttgcttgtgaggttttaaccagaagaatgctatcatcatcttttctgttcttttggaaggaatgccccctctactcacctccacttgcctgcatatatttctatttgtctttgcttttcagcagttttaataagatttacctaaatgtgtgtgggggaagcagggggtgttattctgttgttctgtgttctctgagatgcatggattcaccatttactctgcctccattttggggaacacagttagaaaaaatgtcagtgtgagcccagaaacaagcctccctgaagggggaacaggaccacccgggggcgctcaggacccactgagcacaagagccagcctcagggcaggtgcagacgggggttaaggtctggtttcccgtcagccctgtggcttcctctccataaaacagtttcctctggggcacttctctggattccttatcctgttcttcctattcttcctgaagaagaaacatttgtcgtaacaagagaaaaattttctcacatgcaccaaaggcagagtcacctacagtcacttattccggtttctcaatgtgaataaattatcaatgcttctgaatttaatcagctaaacctattaaaggtgcggtgtttaactcaacactgccgccagctcaacagaactccaagggtcagtgagcaggagggaggataaagggcatgctgggcactggggcagagggagttagcatccagtgcaagagaagaaaggccccgtggtggtcactgtcaggacttcaagcccatagttccaattgtaggtgaccacgttcaaaagaagagagacctcatccatgattagtgtgatgtgtcaagtctgatagtgccacactcacacctcaggtgattatgaaaagatttaccaactctactattgtctgctgagagcagcacaggcctctcaagaaattccaaactggaatttcctcaatggaacaggaaaggaggctggcttagggctttataatgatttggtggtggggtcggggggtcatttattctcaggagaaggagcttgtgtgatttaaacctcacattggcatcagatgagggagcttctacgatttctgactagatttcccatatgtgggggacaagggagaagaagaataaaccttaattcatcagcagcaagcaccaaaataggacctgacactttattctccctagcagcttaagaaaatgagtgaaaaagagagatgagggtccactgtgtgtgaaaagcaaacagaaataaagaaaataaaaatttttattatggtaagcacataataaaaagaaagagaagaaggaatgagacagacagtggtgctgaatcaatgtcctgggtggggccttttctattatccactgtcatcagtttattctgaaggtctcaggtcagcttcctgcttcaaactatcacaggcccttatagggtatataaaaatccttataggatatccacagtttgtcatactttactaaagtagtctaataattagatgaagttctgaatttaatattcagttataataaatattaaaaaataccacaatctacaaattaggaaaccgagactatatttttatcaagggttacagccatcccatatgctggaaagcatagttttggtaaagatgagagacagacactcccaagaagaaggagttgggcagaagatttatgctgaactgtttggctaaacagacttagtcaacaggttacagagaggctactgatgttcatggaggtggtgctgacacatgcatactgaacacacatgcatttaacatgtgagtcctgttcaattgccagtggtgacttagcatttaaattcattacagtcaggccctatgtgcaaacagcagaagcagagacacaaaggcactcagggtgcagcctctgtaaacagccagagccaggccatggtcagcggtctctgatcaggagaaaggtcctgatatcaaatgttcaatcaaagctggggttatggcttgtggaacagggggtcagttcagcagggatgggctgcaattgtcttcatagtgcttgtctcagtgccagtgcttactgagccaccagagaaaacgaataacctattggcagttagaacatagtttatcttttaagtgtagaagtgagtggcaaaatcctcgtctagcaaggccttaggtcttgtttataatttgacatcttactgccactgttctgtcagtcttatgatttctattttaacataagtgttggccattgctgcgtctaaaccacaaagggaagaaggtataacgaggcgtgtctgatctcttgtttagacatggttggaaacagtttttggatttttacggggttccctaggccaagagatggactatttaatcagtcgtgggttttagggatttatttttaggttacagtttataaatatgaacccaactattgactttctgcaatttcactgctgtgttgtggttaaaagtacctgataaaattccttccaaagtggttcaagagcaatattctaccctgatgtttcttacaatagatataattccctgctttaatgttattagaggctattgaaaagatgtagggaaatgatggtttaatctgttgatgaatagtgtgggtaaaatgcagtcatcactttcaacactttgtcatgcatgcatgtaataggacagaggtgagcattgtgggtaaatctctaaatgtatgggccttccagctaccaaataataggctaataactgatgtctccctgaggggattaactataaggctctcttgctagggagagaatctttggccaaggaagttcaagattttcttaaggtttggacaattttagtttaaggatgacaattttcttcaacattttcagaagattgtggatgggatggatgctatgttgtatacataatgctaatgccttccatatttagataatattataaacccctgactgataagactgcttgcttggtgtgatgacccactacaatatgtatactttcagttggtatgctatgtcattttccttcaggtttttactttccaagttacattagtcaggtctctaaaatgcaggactgcatctaaaatgtgttattttgttgtgcattttcacatgttccagaaggtgggagaaatttctttgtgtgaagagcatcccaaagtcaggcactcctctagaacacgtgtttaatccttgtctttggcttattgatgagctctgttgactgcaataacttctgccatccgggctgacttgacatcacatagaggaacaaattctgaatgaaagtttgctctactcaattgagtgcataacctcatttcattactgatgtataatgcatcagagataatattagatcaaggatttcaatgggaatctaatctaaaagatgtaaacaaattttcataatttagataaaattactgtgagcacactgctgctattcagccatgtctcctatcacactgaatccacactaactttgacctaaaagttagcatttgttctaatgttcagaattgttatttttatcataacgtctctagatgattacagagtgtggctatgttggccatcagtaaaggaaagctattttaactgaatgaaaatgagacaaagcacacaacctaatgtaatggaagtcaggacatgagtgtctccaggcttttgtgtttcaagagttcatgcaccaggggatttcttttcttacttgtacacagagcaacacccaaaatgttcatttcctctcccatcgactcttatcatctgtttctatgtcagttagctttgaatttttgaccccagctgcattcaagtagctgcaaataagcgtgatttcattcttttttatagctgcatagtattccactgtgtataagaaccacgttttctttatccagtctataacggatggacatttaggttgattccatgtctatggtactgtgaattgcacagtgatacacacgtgagtggatgtgtttttttgttacaataatttgttttcttttgggcatatacccagtaatgggattgctgaggggaattgtaggtctgttctaagttatttgagaaatctctagatcgatttccacagtgctttggccaagttacattttcaccaaaagtatgtaagtggcgcttttctctatagccttgcctgcatctgttaatttctgatcttttagtgatagcaattctgacatgtgttagatagtatgtgattgggttttgatttgcacttatctgatgatttgaggatgctgagtatttttgtatgttagttggccacttctatgtctgtatttgaaaagtttctgtgcacgtcccttccccatttttaatggggttatctgatttatgctgctgatttaagttccatatagattactgacttgcacacacggagaaagccagtattcccaactaaatagaaaaacataatcacttgtaggtatagacatactgaatttggaatggtcatggcttgcatgttggtattgaaatgggacagcaactttggaaaatggtcttcactgaaaatctcatacacaagtgtacctggtgtcaccacttacagtagttgaatggagaatacaactcaagtgcccatcgactgccacagggatgaagacgccgcggtgtgtctgtgtgtctctaacccacagggatgaagacgccgcggcgtgtctatgtgtctataacccacagggatgaagacgccacggtgtgtctgtgtgtctgtaacccacagagatgaagacgccgcggtgtgtctgtgtgtctgtaacccacagagatgaagacgccgcggtgtgtctgtgtgtctctaacccacagggatgaaggcgccgcggtgtgtctgtgtgtctctaacccacagggatgaagatgccgcggtgtgtctgtgtgtctgtaatgcagctttaaagaggagtgaagcactgacataggctgcaacttggatgagccttgaaaacattgggtgactgaactgagggagacacggaagtctacatccctaattgtcccattgacacgaagcacgcagagcaggaaaatcccagatcacaggaggtcaggggaagggaaacacagagtgaccgcttaatggaggtgaggtttccttttctgtgatgaaaatgttcccaaaccaaatagtggaaatggttgcacagcattgtgaatgtgtaaagtatcactgacccatacacttaccaagggctgaaatggtaagttttatgttatgtgtatctcaacacaataaaaatgagtgccacattttgtttagcatatcaatgacaataacagttcaggtgaatgctggattcctcatcacaaccagtgcttcctgatggagctggattcaggggagggactggagtgggttgggtgcacaggtcatgaaggcagcaaaaattccaacccactcctcaagagtccagtcgccacctccagatctatgtccgccggggcagctcttcctatggctgagctacatgagcaacaagcaaataaccatgttttttgttgttgttgtttagttttgttttgctttgtttttagacagagtctcgctgtgtcacccaggctggagtgcagtggtgcgatctcagctcactgcaatctctgcctcctgagttcaagtgattctcctgcctcagcctgccctagtagctgagactacaggcactcactacgacgcccagctaatatttgtatttttagtagagacagggtttcactatgttggccaggctgttcttgaactcttgacttcgtgatccacccgcctcagcctcccaaagtgccgggattacaggcgtgagccaccgcgctcagccacaaccatgtatttttaagcaaaagacacagtgaggggacatcagtgtgagcccagacacaaacctccctatgcgggttcacaggacagcatggggtgctgaggacagaggtgggcactcaggaaccagcagggaaacccagggggcgcttggcacttcatgggggctcaggaccattgtgggctcagtggtcaggcaggctcaaggctcagcctcagggcaggtgcagcaggcggggaaaggccctggagactgggtttagtgtcaccttctcattgcgccactggacaccctccactacatctattctaatgtgtatgagtacttatgagtttagaaaataacattgatattataaatctatagccatatgtgggtgcatcaagttaccctcttcaacctatgtggaccctgttcatcaggaataagtccctgcatttgaggaccttataaatcaataattatgtagaatcactttctttttcagtctcatttcctccctctttctctctctcacacacactgacaaacacgctgggtgctataactttaattacctgatgtgttaaaaaaaattgattcatttggaacttaaccagtttagctgttgttcacgctgttatgtaaaaaagatccctaaatgacttctacctggtaagaggagggaaggcgttggaaggtgaaattgcaggagaaggagagaatcgtgaaacggagtgagttgttttctctatgaatggtgattaggtcaatatttttcaaacggtgaacatattgtgtgaagattatttgtcaatattatctcattaaaactattgcaaataaaagtgtataatttggtaaaaaaaatgaagagagaaataaaaataatacaagaaaagtcatgaactcctgactccacacgtgagttaaccctcagtttttctatgttacttagaaaaacactgagatacagccaaataatatcatgatatctttataagaagagggttttgtaaccctcactcgaaatttctagctctgtcctagagttaatttagggagcagtcagatccagctgtgagaaacacgggccagacagtgagactggcttttaccagatgtgagctcttagacatgtcacatggcccttccgtgcttgggggtttaccttcacatctgtaaatgaaggaaactttgactcccacagaacataattcatgtgcatctataagtagaaatgctaatgagaattaattatttatgaagtataatcactcgcatccactctgggacacagcctactctgaggcatcccttccagaagtcactatatagtaggagacatgcaggtgggtcctccctctgccgatgaaaaccacccagccctgaccctgcagctctgggagaggacccccagccctgagattcccacgtgtttccattcagtgatcagcactgaacacagaggactcgccatggagtttgggctgagctgggttttccttgttgctattttaaaaggtgattcatggatcaatagagatgttgagtgtgagtgaacacgagtgagagaaacagtggatttgtgtggcagtttctgaccaggtgtctctgtgtttgcaggtgtccagtgtgaggtgcagctggtggagtctgggggaggtgtggtacggcctggggggtccctgagactctcctgtgcagcctctggattcacctttgatgattatggcatgagctgggtccgccaagctccagggaaggggctggagtgggtctctggtattaattggaatggtggtagcacaggttatgcagactctgtgaagggccgattcaccatctccagagacaacgccaagaactccctgtatctgcaaatgaacagtctgagagccgaggacacggccttgtatcactgtgcgagagacacagtgaggggaagccagtgagagcccagacacaaacgtccctgcaggaagacaggaggggcctgggctgcagagggcgctcaggacacattaagaacacagtaaactcagggaccaggtgcccagggaggttaagggctggtttcctttcagagacttagctgtttctccatctaacagtttccccagaaccctgcctagatttgtgatctgtatctgctcaaactatctgtgtcaccttcctcacctgtgactttgaggaagcttagtgtggacattccagtgggtggagagatcttggtgacagcaattgtgtgttctgtctaggcatgtctatggctggccatcaggaacgacaggctggaattcttggaaagaggcacacctgccatccatcaggaaattttgttgtcttctgttctgctagaattaaatcaggcacgcccaggttaactactactatcttcctagcttgagaaaattaatggtgggcttgaataacacctatatgaaatcatcagagcaacacctagattcgagtctcatttaataattgagactatgttctagccaaggagacacataaaactggtgattgccgtggtcagttcatatcatatatttgtcagtagaatctggctggtattatgaacagctttgccaacacatgtgttagtgttggtcttcggagaagcacattctatgaatccattaggtttatgtacagtttcctaaggaaccggtccacgcttttgagaggaaacgcagagcgggtggaaagaggctggggaagctgaaggcatatgagggaagttggtccctgagtgaaggagagagggaggataactcagtggaacttccttaaactgtgctgttctaggaaggtccagcaagtcactgtatctgagtcatgtcaaagtttcccatcggggacccccgtgactcccagcagtggctctactcagatcagcgcggagctcattgttctcctgagagtggagcacaggacgtggccccagcaccagccgtggcatgcacatcagagtgcagccccaggcgcatggctcaggtgcactgtgctccctgcaggtggagggagggaagacctgactcagaacccatatgatgtgggttccatacagaacacaacttttacttaatttctgtagatgacatagaaataaacatacagtctgtaaacaatggtgattcctacatttaccttgagagctttattctttgattctgcagaatgtcctggcatggtgttgcctttctcatgtggaagtgtaacataagttgaggacatgtgttccccactttcattgttttcctccatgtacagagatcctgagtggagtacagctgaccctccttccacactgttcctctcctccccacgggaacagcagataattacctgaggctgaatctgaggtgggatatgtcctgtgcacctcagagcctgcagagacccccggctgcagattcatggagtcaggtgtttgtgcatgtgggaatctcgagctgtgctgttgtcagtgaatgctgcttagaactaattgcaggattcagaattaggagaccccctgatctatcacacctcagctcattctgccactcatcatcttcagaaattctgaatatggttcagtttacatttttgtgatgtactgttctcatttcatttagtcatgagtttggtcagcagaaagtgctaccatttatgtgtcccaacctgatgaagctaatttgcttcacgagaagttaggaggctcctgaatcttatcctaagcctgtctctctgcactttcctttaaaattcagttttacctggaattctgttgtgttgatttagccagttttccccatactgagtgtctgattttcctggatatctgatcagtttccttgtccttcaccataacttgggtgacatctgatcaccctggtctaacttcaacaaaaatcctggcaggctgccctaagcaggatttacctcactcctgatgtttcttcttggtgattttccatcctgtgccccaaccctgctgtatgcctataaatcctcacgttctcattctgtatttggagttctgctgaatctctcccccactgcaaaatcccactgccctggtccctacacctatcatgagggccctggatgaagtcttccttactgtgctggaacaagtgtcttcatatatacattttttctttaacaaatcaacctttagtatttcctaattgatcaaaggacctcaaacattgcatgaaagcgaggatctccattttactataaggggtgttgtgtgaatttcagtttccatgtgtggtgtccagaagtcctgggcaccaacggttgtgcttctctgtccaattctgtgattctgaaacccgggagtcatctgaacatgagtaaataggtgacttttctcactatttagtgactgccttatttcatttaccctgaagcttcacgaacacattgatgaaaagtagatagagaacttgtttggaaatgcaagatttatagtagacgtaaccacctacatgattctggaggtcttcttagtgttccaagaaccagatgtttttcccaccacaggacaaagatgagaacctccacgctgtgaggatagaggacaggcagggcaaagatgagaacctccacgctgtgaggatagaggacaggcagggcggtgtgaggacaaaaggggctgtggtcacgtccagggtgttctctcctagcaacgcctccagctctttcctcactctgtggtatttgtcagatgggaaacatacctcaaatttatatttgacatattgatggaagtccaggcaagaggcatctgaaagcttatttctgaacctgcttctgtaaggaatgcccatatcccttggtctctttcctctttcttaactccattggctcccttcccctcctgcacacacccactgacgtttatggccacttccccacacccttcactgtagtaccattttcttgggctcctgggaaacccaacagctttagttaaactcacagctatgtacacccataggcccctcaggaggttctcagtttcactcctacagtctcccaggctgctccttggggtcctaacctgaccatctctaccctctctcctgagtctggccatccattgaacgtccctgctgccctctaatctggatttgtgtacagtagaaggttaactcagcagacctggattgtttaaaccctgcacattcctgaaaaacattgttcatttatggctctcagttacctcctgatgagaactctgagcccttaaaatgctatgccagataacagtgtctgtggttgtctgcagccttgggacctgtagtacacatttaatcatagtgctttgtagtgaatgccagctatttttttttcctgggtagcgggggagctgttgtctgagtattgtggtcagttgaaatgcctaaccttgttttcactctaactcactactttgaatcttccctgtttgtctctttaatcacctagccttgcttctcatgtaagtaagactctctctagctgggaaagctggacaaactccaattgaccccttaatttacaagacactaagggctcctcacccaacccccttccgtaaggagttaacctgtgtaaacagattctcagcatttcaaaggagcccagttaactgataaggtactagcaccaacaatgtatgaagttcccaggatttttctcaaggagataacaacataaagccttgagttcatgcccggcatagcccctatatctaattataatgaaagatttagagccctgcacctggtactgttgctctttttgtaaccatttgtcttttaaattgtttatctctctgtaaccattttgcttcttttgattcttgcatgtttttacttccgtagaattattgcacttgagttcccctccccttcctaaacctaggtatgaaagttaatcaagccccttcctcggggcccagagaattttgagcattagccgtctctttggccgctggcttaataaaggactcttaattcgtctcaaagtgtggcgttttctctaactcgcctgggtacaacatttttggaggccgcagcgagatattaacaccactgggcgagagccggtctcgctccgggctcccccggaaggatggccagctcggaggagggacaccacctgaggaaagaattttcaggtccgcaaagagtgaccgccttccagaggagagcggatcgaccactgtgtcagcgccctaaaagtcaacatctgagtcctcagcttctgaccccggggtcaggtaggtcggatgtgacttcgtttccggtgagaggggagcggccctgacgagggcgctgagtcctcagcttctgaccccggggtcaggtaggtcggatgtgacttcgtttccggtgagaggggagcggccctgacgagggcgctgagtcctcagcttctgaccccggggtcaggtaggtcggatgtgacttcgtttccggtgagaggggagcggccctgacgagggcgctgagtcctcagcttctgaccccggggtcaggtaggtcggatgtgacttcgtttccggtgagaggggagcggccctgacgagggcgtccctcttttgactcagcccattactctaggatgctagtgggttgagccttcgttttccggtaggcgccttcgtatcttggtttgggtgggaagtggtcctgaccaggaccctcccttgacttagctcaagacccaggacgctggagagctaagccttggtttctggcagacctctctctctctcttctatcttccatccttcttttggaaatctccgggaaaggaaaaaaaaaaaaacctgttataaactctgtgtaaatggtgtgtgaatgtgggaggacaaaggcttgcgtttgtcttccagtttgtagctccatggcgaaagctacggagtttgagtgggccctcacctgccgttctgtggtgacctcataaggcttaaggcagcatcgggcatagctcgatccgagctgggggtttatactggcctgccaatgctaagaggaacccaagtcccctcacggggagtggccaggcaggcatctaaatgatcccatcacgggacccccttcccttgtctgtctaatagagaaggtaaaacaggaaaactgtcatcattgtttacatgccctagggtcaattgtttgttttatgtttattgttttgttcggtgtctattgtcttgtttaatagttgtcaaggtgttacatgtcaggacatcgatatagtccacgaggtctgggtaaaaatttcttcaaggtccttagtgctgattttttgtcacaagaggttaaatttctaatcaatcatttagactggccaccacagtcttgtcttttctgtcataaacaagtaagctgttgttacggaaaagagtgtggagaacattcacctgattggaatttctggcaccatgaaggttgcgggtatttagattgtcataccccacgtcctagtgattggtccccttctaaactgaactggtggtgggttcaaaacagccaccctgcagaccttcttgctcacctcttctgtcattctgtaacttttcctgcgcccttaaataggaccttgtgtaaagaaacctacgcccgtcatgctttacttcgtttagactcctattctgttccactgtggctactttctcatcttaaggacgatccgagtggtccttttccccctcgtccctgccccttaccccgcacatctcgttttccagtgcaacagcaagttcagcgtctccaagacttcgctctgctctcactccttgaacccttaaaggaaaaagctgaatttgaactgtttgcctttgaatcgtggagacataaaaaacacttaggatataggtctagaagaagaagaagagggagaacgcctagatcgaactggcccaggagacctcagactggccaccaatccccctccctcaatcttaaagctacagcaatgtggcaagtggtattagctgttgtggtttttctgttctttctgatcatgttaattctgtttttccgacactccagccccccagggaaagagtttctctgccggtgttggatctgatatctctgctcaagactttgctaaattgtctttaaataataataataataataaacgggaaacacctcctcctggccccgtaagggttggagccctctccagtgtatgctggaaaatttttctcttggtttctcagaggactatggagtccgccttagaaaaggcaaggtctggacactctgtgaactagaatgaccaaagtttggagtcggatggccctgtgaagggtcattaaatcctaccattgttcaagccgtgtgatgggttgttaccggaactcccggccaccctgatcagtttccctatatcgatcaatggctaagtttgattaggaatcctcctccatggctctgttcatgtgccattcgcaattccacctccaaagtcctcctgagccaggccgcgtttttgcctcaaccctccgccagttcggctccccctgttttgcctccctctgaagaagaggagagtcttcctcacccagttccaccgccttaccaccagcctgctcccttggcgccatcccgtgtctcttcgactgcgtcccctgtgggctgtgaccgcccattgccttccgctacgaccgcatgggaggaagcagcccctctactcccactgagagaggcacgagtcccgcggctgatgagcgctcagcccccttcctggtttatgtccctttttctacttctgacttgtataattggaaaacccataatcctcccttctctgaaaagcctcaggctttgacctcactgatggagtccgtgctccggacccatcgacccacctgggatgactgccaacagctccttttaactctgtttacctctgaggagagggagcatatccgaagagaggccagaaagcacttccttgcatcagccggtgggccggaggaggaagactagagacctcctggaggaggaggaagctagagacctcctggaggaggaggaggtctttccctccacctggcctaattggggcccagattcctcaggtggaaggagggctttggacgattttcaccagtatctcctcgcgggtattaaaggagccgcttggaagcccataaacttgtctgagacaactgaagttgtccgggggcctgatgagtcaccaggggtgtttttagaacctctccaggaggcttatcgaattcacacaccttttgacctggcgactcccgagaatagccgtgctcttaatttggcatttgtggctcaggcagccccagatattaggagaaaactccaaaaactggaaggatttactgggatgaatatcagtcagcttttagaaatagcccagaaggtttttgaaaaccgagaatttgaaaaacaaaaacaagcgacacaggcagctgaaaaagctgccgataaagcatataaaagacaagcaaaaatcttggtaacagctatccaagagggcagaaaggaaaggcctgcattccagaaaaatggccaaggaacctcgggttcccaccagaaaagtgaaagaggtgaacaggcccctctaggaaaacaccaatgtgcctattgcaaacagactgggcattggaaaaaggagtgcccgttactgccaaaagaaaaatctgaaaacaaaaaggttctcaccctggccgcaacagaggagcctgatgattgatggggacagggctcccttgctctcggcccccaggagcccatggtaactgctacagtggggggccagcctgtatgtttcctaggagacaccgggggagagcactccgcactggagactcccctggggagtgtctcaaataaaaaaattgctgtacaaggggtaactggagctatacaagaatatcctgtcacacacacctgagaagtaatcttgggacagaaaagagtgacacactctttcctagtagttccagagtgtcctattcctctccttggacgggacctactccataagttacaggcctcaatctccttttcagctcagcaggctcatctcacactaggaaatgcaacttcccccactgcccaactcttgctaactacccctctgtcagaagaataccttctggtttcaccgtcgtaatcaccggaggagaatactaatactcttttgttagatctacagacacttttcccccgagtttcggccgagtcaaaccctcccggactggctaaacaccatccgccagtagtcatagaactcttggccactgccataccggtccaggcaaagcaataccccacaagtcagcaggctagagaggggattaatccccacattcaacgactgttacaagctggcatacttaccccatgccagtcggcctggaacacgccatttttgccggtccagaaacctggaacaaatgattactggccagtacaagacttaagggacgttaataaatggactgttgctgtccacccaaccattcctaatccctatactctactcagcctgctcccaccagaacatacagtatacactgtccttgacctgaaagatgctttctttgctatccctctggcccccaaaatccagccgatttttgctttcaaatggacagatccaagatcaggagacactacccaactgacttggactcagttacctcagggttttaaaaattcccctaccctttttggagaggctcttcagcaagatcttataccttccgagccagtcaccttaactgtactcttctccaatatgtagatgacattttaataacaactgaaactatggatggttgtctacaacacacaagagacctgctctacctccttcaggagctcgggtatggagtctcagccaaaaaggcccagctttgtcttcccagagtgtcctacctggggtacaagataaacaaaggaaaaagggcactcactagtgcccggaaagaagccatcctgcgaatccccactcccgccaccaagagacaggtacatgaattcctaggagccctgggatattgtcgtctttggatatcggggtttgcagagattacaaagcctttgtatactgctacaaaaggtaatggcccactgatttggacagacaccgaggaacaggcttttcagaatctgaaaaaggctttaactgcagcccaggctttagccctcccaaatatctcaaagccttttcatctgtttgtccatgagagccagggagttgctaagagagtgcttactcagactttaggaacttggagaggcccagtggcttatttatctaagaaggtggatcctgtggcctcaggatggccaagttgtttggcagccatagtggctacagcaagcctagtccaagaaactgataaattaactctaggccagaatttaacccttacagttcctcatgctgtagagacttgactacgaagtgcttcaggtaaatggatgtcaaatgctcgtattttacaatatcagagtttactgttggatcagccttgtttgactttctctcccacaaggtgtttaaatcctgctactttactcccagatccagattctaatactcctgtccatgactgtcaggagctgttagaagctaccgaaactggcaggccagatcttcaagatgtgctcctgagaaaggcggacgccaccgtgttcaccgacggcagcagttttctcgaacaggggatacgcaaagctggtgcagctgttaccacagagacagatgtgttgtgggttcaggctttaccggcaagcacctcagcacaaaaagctgaattgattgcccttactcaagctctccgatgggttaaagataaacgtattaacatttatactgacagcaggtatgctttcgctactgtgcatgtacatggagccatctactaagaacgcgggttgctcaggtcagaaggaaaaataattaagaacaaagaggaaattttagccctgcttgaagctgtgtggctccctcaacaagtggctgtaatccattgtaaaggacatcaaaaagaaaacacggctgttgcccgcggtaacccaaaagcggtttcagcagctcgggaagtggcgctgtcttcagctccgtccataaacctgctaccggcagtttcttttccacagccagatctgcctgacaaccccgcgtactcaacagaagaagaaaaactggctgcaaaccttagagcaaataaaaatcaaaaaggttggtggattcttcctgactctagaatcttcgtacccccagctcttggagaaactttagtcagtcacctacattctaccacccatttggtgggacaaaattagctcagctcctccggagctgttttaagatccctcatctacaaagcctaacagatcaagcagttctctggtgcacagcctgcgcccaggtaaatgccaagcaaggtcctaaacccagcccaggtcaccgtctccgaagaaactcgccaggagaaaagtgggaaattgactttacagaggtaaagccacaccgggctgtgtacaagtaccttttagtatcagtagacaccttctccggatggactgaggcatttgctaccaagaacgagacagctaacacagtagttaagttcttactcaatgaaatcatcccctggtacgggttgcctgctgccatagggtctgataatggacctgccttcacctcgtccatagctcaatcagtcagtaaggcattaaacattcagtggaagctccattgtgcctatcaaccccagagctctggacaggtggaatgcatgaaccataccctaaaaaatactcttaccaaattaattctagacaccagtgaaaattgggtaaaactccttcctttagccctacttagagtaaggtgcaccccttatcaggctgggttctcaccttttgaaattatatatgggcgggcaccacctatcttgcctaagctaaaagatgcccattttgcagaaatatcacaagctaatttattacagtacctgcagtctctccaacaggtacaagagatcattctgccacttgtttgagaagcccatcccagtccagttcctgaccagatggggccctgccattcattccagctcagtgacctggtgtttgttaaaaagttccagagagagggcctaactcctgcttggaagggacctcacaccgtcatcctcacgacgccaacagctctgaaggtggacggaattcctgcttggattcatcactcccacatcaaaaaggccaacaaagcccaaacagaaacatgggtccccaagcctggatcaggacccttaaaactacacctaagtcgggtgaaactgttaaattaactctttttatttgcttcttttgtttatccttgcctgtaatgtcttctgtgccttcctactccttccccctcacctctctcacaacaggacgtgttttcgccaatactacttggaaggtggtactccagggcaagtcacctttgcagtcgacttgtgtatactgttcccggagccggctggtacccacgaagatcatcgcgacctgccagtcatgggagcaggaggtgtcgaccttgcagcaggatttggacactctgggagccaagccagatgtggaagctccaaaggtgctgaaaaaggactccaaaaggttgacttttacctctgtcctgaaaatcaccctgatgctagctgttgagatacctaccagttcgtccgcccggattgggcatgtgtaactttagccacttactctgggggatcaactagatctccaactctgtcaataagtcgtgcttctcgtcccaaatcgtgttctaaaaataattgtaaccctcttaacatcattgtccatgaacctaattcagctcaatggtactatggtatgtcatggggattaagactttatgtcccagggttcgatgttggaactatgttcaccatccaaaagaaaattttggtcccctggagcccacccaagccaatcggacctttaactgatctaggtgaccctatgttccaaaatcaccctgacaaagttaatttaactgtgcccccaccattctcagttcctaagacccagctacaaagacatcaactccaacccagtctgatgtctatacttggtggagtacatcattttcttaacctcagccagcctacactagcccaagattgttggctatgtttaaaagcaaaacccccatattatataggattaggagtagaagtcgcacttaaaggtagtcctttatcctgtcatgcacaacctcatgctttcacattaggagatgtgtctggaagtgcttcttgtctaattagtactggatatgacttatctatttctccttttcaggctatctgtaatcagtctctgcttactcccatgagcatctcagtctcttaccaagcacctaacaatacctggttggcctgcacctcaggtctcactcgctgccttaatggaactaaatcagaacccctcttgtgtgttctagttcatgtccttccccaggtatacgagtacagtggatcagaaggacaactcctcattgctcccccggaattacatcccaggctacgcagagctgccccactactggtttctcttttagccggtcttagcatagctgggtcagcagctattagtacagctgccctagttcgaggagaaactggactaatgtctttgtcccaacaggtagatgctgatttaaataatcttcagtctgccatagatatactacattcccaggtagagtctctagctgaagtagtacttcaaaactgccgaggcttagatctgctgttcctctctcaaggaggattatgcgcagctctaggagaaagctgttgcttttacgccaatcaatctggagtcataaaagatacactccaaaaagttcaaaaaaatctagataggagccaacaagaacgagaaaataacacagcctggtatcaaagcatgttcaattggaacccctggttaactactttaatcactggtttagctggacccatcatcatcatattattgagtttaatttttggcccttgtatattaaattggttccttgattttgtaaaacaacgtattgcgtctgtcaaacttatgtatctaagaactcaatataacccccttgttgtaactgaagaatcaacgacttgattcccctaaaacacaagtggggaaatgaaatgcctaacggtgtttttactttaactcgttactttgaattttgtcctgcttgtctctttaatcacctaaccttgcttctcatgtaaataagactctctctagctaggaaagccagacaaactccaattgaccccttagtttacaagacactaagggctcctcacccaaccccctttcgtgaggagttggcctgggtaaacagatcctcagcatttcaaaggagcccaattaactgataaggtacccacaccaacaatgtatgaagttcccaggaattttctccaagagataacaacatgaaaccttgagtttgtgtccggcatagaccctatatctaattataataaaagatttagaaccttgcacctggtaccgttgctcttcttgtaaccatttgtcttttaagttgtttatcactctgtaactattttgattattttgattcttgcatgtttttacttctgtaaaattattacatttgagtccctctccccttcctaaacctaggtataaaatttactcgagccccttcctcgtggccgagagaattttgagcatgagctgtctctttggcagccggcttaataaaggactcttaattcgtctcaaagtgtggcgttttcttaactcacctgggtacaacagtgcagctggtggagtctgggggaggcttggtagagcctggggggtccctgagactctcctgtgcagcctctggattcaccttcagtaacagtgacatgaactgggtccgccaggctccaggaaaggggctggagtgggtatcgggtgttagttggaatggcagtaggacgcactatgcagactctgtgaagggccgattcatcatctccagagacaattccaggaacttcctgtatcagcaaatgaacagcctgaggcccgaggacatggctgtgtattactgtgtgagaaacactgtgagaggacggaagtgtgagcccagacacaaacctcctgcaggaacgttgggggaaatcagctgcagggggcgctcaagacccactcatcagagtcaaccccagagcaggtgcacatggaggctggggtttgtttcctgtcaggatttgggacttcctctgcttctgacagtttctctagggaaactctttaattttagatttctgtgcccaccaatgtcatctctacatttttttaatcattgtaatatgataggaggacttattctcacatgcacaatatgtatattgccacctacgggaatgaaaactcctcaaccatggtcaccagcatcagagtcgtgaggaagctcaggggtgcctggtgagtcttctccagtcagactcaggacagtaacctcaaggggattcccttgtgagaactcacacactttcatgagaacagcaccaggagttggttctaaaccattcatgaaagacccactccatgacccagtcacctcccaccaggtcaccccttcacaattgaggattataatacaacatgagatttggggcaggacacaaatccaaaccatatcagatacacattgtgaaatgctcatgatggtcagggtaatttgtatttctatcacctcacagcgctaccattttattatttttttaaattaaatgcatgagtgagtgtctgatgagaacacctcagatataccctttcagcaacaatcatttttataatacagtattaactataggaccattgctgtacgttagatctccagaactcatccaacctgcacaactgaaactgtacaatttaacaaacatcacccgatttccctctcctcccaggtcctgagaccctctattctgctctctactttcaagagcttgaatattttagatcccacatgtaaatgagatcatgcagcatttgtctttctgcatctggcttattccactcagcatcatgtcctccaggcccatccgtgttgttgcaaatgtcagaatttccctcttttcaaagccaaataaaatacagatttatgtatacacattttctttatacattcatccatttacagtcattaaattattttgcaaatctacactattattaataatcttcaatgaacacgtctttggcaaagtaattttatttcctttgcatatataataagaaatgggatcaccagattatatgatagctttattttcaacttatcgagtaaccaatcctaccacagtgtattccctttccctcacattcttgccaatatttgtcatctattacatttctgataataaccatattaactagtgtgaggtgatatcgcattgtgcttttcatttgaattcctctgataattaggaatgttgagaaccttttcgttttctgtttgccatgcatgtatcttctgaaaaaagttatccaggtttttgcccttttttatcagttcatttgttatttgctattgaggtatatgggttatttatacatttagatagaccttcttgtcggatacataattacacatagtttttcctgtgctttgttgttaaattcaaagaaatcagttccgaattaatggcaggaattttttttgctccatgtgatttatgagtttatggcttcaggtattatgtccaatattagctgatttttttatatggagttagagaaggcctaattttatttcttttgaatatgaatgccagttttacaccattattgaaaagactgtcctttctctactgtgtgctcttggcacacaaaatcaggagagacataatgacaaaagaaaatatcagatgaatattcctgatgaacatagacctgaaagtcctcaacaaaatactatcaaatagaatccagaagcactttaaaatgtaatacatcatggtcaagtgggctttacccctgggatgcaaggctcgttcaatatccacagtaactgtgattcacaatgtaaacagaataaaagcaaaaaccatatgattatgtcaatagatactgagaaagcctctggtaggttctaacatccactcatgataaaaaccctcaacagactagacatcaaagaaacgtacctcagaataatagccatctacagcaaacccacagtcaacaccatactaaatgagccaattaaaacacttgtctttataaattacccagtctgaggagtttctttatagtgtgagaattgactaatacagcatccaaataggaaaggaagtcaatccgtccaccttcagcgatgatataattctatacctagaaaatcctaaaaagtctgccaaaataattctagaataaacaactttagtaaagtgtcaggatacaaaatcaatggacaaaaattaccagcatttctataagccaaccacatccaagctgagagtataatcaagaacaaaatcctatccaacttacagtatccacagagaaaatgaaatgcctgggaacacagataacaaacaaggtgaaagatcactacgaggagaactataaagcacagcagaaataaataataaatgatacaaataaatgggaaacatttcatgctcatggattggaagaatcaatattgtaaacattgtcataatgcccaaaggaattcacagattcaatgctatttacataaaactatcatcatcattcttcacagaatcagaaaaaaatctattctaaaatttatatggaaccaaaaaagaccctgaatagcagaagcaatcctaagcaaaaagaacaatgccagaggcatcatgatactgaccttaaactacaccataatgtcttgctaacaaaagcagcttggactggtacgatagcagacctgcagaaaaaaaaaaatagatcaaaattgaaaacagaaataaagttgcacacctgcaaccttttgatctttgacaaggctgacaaaagcaattggaaaaaaaaaatctctgtattcagtaaatggttctgggataactggattctggcaggtcttgcagaatgcaagagtgaaggagcctgtccagcttctacctagatttcagatgttagagagccctgcatgcccaggaagaagcctgctgcagcagtggatccaccacacaaagcctctactagagcattgccaaagatggggaaagatggagttggagcccccattcagagtccccactaggacgcttcatagtaaagctgtgggaatgtggccacaaccctcaagaccctagaatggtagagctacaggcaacttgcaccctcagcctagaaaagcttccagcacttgactctcacttgtgaaggcagccccgtggtctgtgcctagcaaacctatagggattggctgcctgaggttttggggacccaccccttgttccagtgtgccctggttgaagtacataaagtcaagagagattattttgtagtgttaggatttaatatctgcagtgctgggttttatatgtgtgtgaggcctgttggttgttccactggccaatttatccctttaggattggaattatttacccaatgcctgcaccatcattgcaccttggaagtaaacaactttcatttttaaacttgcaagctcacagctggagggacattgccttaagactcagatgagactttggacattttagttggaggttgatcaacttaacattttgggaactattgaaaaaaggtgattatattttgcagtgtaagaagaatatgagaactttgggtctgagagtgcaatgatatcatttaggggttttcccctccaaatgtcatggtgaaatgtgacccacaatgttggaggtggggccaactgggtggttttgggtcatgaggagatttttcaggactggcttggcatccaccccatggtaattagtgaattcttgctgtattagctactgtgagattttattgttcaaaaaagtctggcaaccctcctaccctctcatgtcccccctcctcaccatatgacacagcctcctccccctttgccttccaccatgactgtaagcttcctgaggccctcgcaagaagcagatgcttgtgccatgcttctcacacagcctgcagatctgtaagccaaataagcctcttgtctttgtaaatcacttggcctcaggtattaatctataccaatgtaaaatagactaatacactgcccaaagcaatatacagagtccatgcaatttatatcaagtaactaatataattgattacatatttttaaaaatcctaaaattcatatagaaccaaaaaagggtctgaaaagcaaaagcaatcttgagcaaaaagaacaaagctggaagtaccgcattccctgacttcaaattacacaacacaaagataacaagaaaggcagcgtggtaatggtagaaaaaaaatcaagagcccagacatacagccaaatatctacaaccaacggttctttgacaaaactgacaaaaatatacactggagaaacaaccctctattcaataagtagtgctgggagaattagatagccttatgcagaagaataaaatgagacttctgtatcatcatagacacaaattaactgtgaatatggattcaatgtttaaatttataaactcataaaaattcctgaagaaaatctaaaaaaaatcctctagacatttgcctaagcaaataaaatatgactaagactgacttcaaaagcaaatgcaatgaaaacaaaattagacaaacaggattaattgaaacacagattgtctgcatagcaaaagaaataaccaacatggtgaacagacaacctgtgaacagtaaaaaaaaatttgcaatctattcatcaaagggctaatacatagaatctacaaggaactcaaataagtcaacaagaaataacaaataacttcattaaagagtgagcaaaaaccagacatttctcaaaagaagacacagacgtggccaaaacaaataaaacatactcagcatcaccaatcatctgataaatgtaaattacaaacaacatgatatagcatcttccaccagtcacaatggctgttattacaaataaaaaacagcaggtgtttggagagaagcataggaaaaataatgctttttatatgcttggtgaaaatataaattagtacaacctctatgaaaaacaatacagaagtttctcaaagaactaatattagaattaccgtttgtcccagtaatccctcccagtgggtatattcctcccaaaaggaaatttttatatcagaaaaagtcacctgcattcctagtgtctttcacagcaacgtgaatagagttgtaggacattagcctaaataaaataactcaaaaagatcttctcttttataattggaaagtaaacaatgggtacacatgtacatacataaaaaacaaaagacactgggaactgcaaaagagggcaaggtgagaggaatgtgagggttaaaaaatcacctactggctccaatgttcactagtgggcgatagttacaccagaagcccaaacctcacctttatgaaatatattcatgttacaaaattgcacatgtacaccctgattctactgaaaaaaacagaaataaaacatgaacagaattgttagactgctagctagatttgtcaacaaagaaaaatgcaaaaggagcaattctctgttttggaaccctttctcattttctggtacaattagaaattgtagactaatccctatattctcttctgaagccctagcattagccatttctcaaagacatgctggttccttttttttttttttttttttttgagacagggtccagactcactgcaacttccacctcctgggttcaagcgattctcctgtctcagcctcccaagtagctgggattacaggcatgcgccactgtgcctggctaatttttgtatttttagtagagacagggtttcgctatgtgggccaggctggtccaaactcctgacctcaaaagatctgcccacctcagcctcctaaagtgctggaattacaggtgttagccactgcacctggtcactggtttcttttatagaagaatagtattaaaaactcaaatcttgattctgggtgtattttttattaatgtgcactcatttcttgtagaaattctcaggtaaaaaatctaggaagtatgtgttgtgtattaacccatatatacacagacatctaaactatttttatctaatatatgtacctatattatgctaaacttgcaaataaaatgacatgtccaccctaagttaataccacatggatgtttatcgcattccttctatgcctgacactaacctcccactccaaccacaaggaaccccatttccccatacgccgtccattctctttgtagtccaattccaagattcctgtggagtgtaacaagatgtgtaagttgtgctcttttgtggaacatcgtcaattggggtacaatgctgatgtgaagtttcttttttctttaatcttattgcctacaccatttctgaatctacttagtacctcttttgaattcatacatttgtaatggaattagacattttctatgttatctgcattccatcctggaattcctaatcacctatttttaaaaaaaattcttttgaagtaagattgtattagtcagggttccctagaggggcagaacaaacaggatatatatacgcacacaggatacacacacacacacacacacacacacacacacacacacacagagtttattaaggagtattaactcgtatgatcacaaggtcccacaataggccatttgcaagccgaggagcatggaagccagtccgagtcccaaagctgaagaacttggagtcccatgttcgagacaaggaagcatccagcacgggagaaagatgtaggctggaaggctaagccagtctaatcgtttcatgttcttctgttgttgttgtttttttttccctctggccacactggcagctaatgagattgtaccacccagattaagagtgtgtctccctttttgagcccactggctcaaaagttaatctcctttggcaacaccctcacagacccacccgggatcaatactttgcacccttcaatctaatcaagttgacactcagtatttagcattacaagtccaccccgtcaacttgaaaccatacacatctcctgagattatacataatcttcaaacaaagacaataataaagtcataattacacctaatataatacaactttattcgttcaactggaaatgcaccaatccccaatccaaatgctattacatatggtccactccctcaaggacacagccaggatcatcctatgacttggtgtctagaagactcatgcacttttaattttacctccaatattagactccactttatcacatgcagacactgcagaatattttaagacatcgatgtcttatgctgaaaaattcaacagtacataaaattgccttcccaccacagccagtggttactactgaataaggatctgccatcccctagggaggtgctatagtggatggtgtgcactgttagtagctatggaaattgatccattgtggcaaatggcagcatctttcttttataacattaaaccatattatattgtatacacataccacattgtctttattcatttgtctgtatgctgaccatcagatagtttccatatcttcgctgttattaacagtgtttcaataaacataggatgcagatatgtttacaaggtggtaatttcatctacttgggtatactcccagaaacaggatttctggtcatataatatctccagttttaattaatttaggacgctttatgttgctttccataattgtggaaatgtagaatggtatagccattatgaaaaacaattttggttttgagttatgatccataaacagcatttgcttatggctctcaatgagagtttctactaaatatgatggaaggccaggaaggattctcaccttaaagcttggatggattatgaatttacctcttatttcctaaaagcaaaagtttggaagcatacatgatggaggctgttggcaggtttcaggatgatctcataaaaggagaatctgctggataaaaatgttgggttttcagttatagacacacctacactcaatatgaaatgatgaagtcaactgaggatctagaacatgttcacttgaagcaacagcacattctcaaaggaacttattgctccatcacaagggcgatgaacttctgaaaccagtaaagtgtgagtgcacagtaagtgataacgttatcacgtttacatgaagtttgtttaatgtgccaaaggctggtacagattaatcttacacaaatatatgaaacatatttttccatacatagatatctagaggataatcctcttagcaaaacttcttcaggttacagaaatctgtgtaagttgtagatctcatggggaactgtctctttataaatactggtctgtttttcaagtcaggaaaaattatctctgttggagtaggcttccaattgtgtagacttctgaattgcttcttgagttgtaacaaatgaaccaaaaaatttgactaattggagttttgtggctgtcttaataaaaatttcttataagctttctttcaattatttgagaccagttttcctgattttatttttctccaatagataaattttcacaagatctcaggaaaccacctctctggctctttagtttaaaagactagcttcttaggaaaagaagcttctttctaacattgaagagctcatttattctgcaaaccatgaagtttgagtctcattgtcaagaatcatgaaaatttttactccaatatactgaaagtcatgactcttgaattcaatatttattggcattcacaaaagtgattcattctcagatgtgtcctatgttgctggcccaacatatcagtgaactgagtatcctcccttagctctctctgtctgtagcactgagtctacaatcttcagagtcatccatgaaggggagtcctgaggttcatgggattcttgtaaacattcaggtcaacagaagaaataagcaggattgagggctgccagccatttccacgccattaggaataattaccatctaagtataaaggtctacatcatacagaataccccacaggataggctgatgcaaaaaattccaaccccacagaggctccacagcaacccttacagttctttcagggaaggaataatctccaagttaaatgagtcagtaaagctgctctgagctacaggaaaaattggatttggccaggtttgtctgagttcaacgtgattattatactcagctcctgctccaatctggactgagtacggggaatttaaatgagcctggctgtgtggtttgttatatgaaaatctgaactatataaacataaatggcatgtctggactagcatgagggtgagagatcctgggaactccaccccccatactcttatcgccctttcctccaggaacctccaggttctcagggtgagaatccacatagatcccttcatggctctatttctaggaaaccaaatctctaataaatacacccagactttcttcagacacagaaaccatgggaaaggcatctctagatcctcatctatgtggggaaaggtaatccatccccattacaagcccatactagcaggcttcctttatcatgaaaatgggtaaaattagccaatagatgtaaatttaaagaaaatttcctgtgatgctccagccagaaaagagcaaaaatcagcttcacttctggagacttcccgtataggtcacagcccagagaaagaagatcaccacagcattaaaattcagctgtaagaacatgtaatgcttccgtgttccacacattatgtctcaccagtttagtcaatatggattaaatacgagagtgtggcaatgcacaaactctatctgaggaggaaataggagaaaaatgttaaggaaaatagaagaattcgacgcctctaataccaggaacttcagcacaaagaaaatgatttcacccttattggcctcaaatttatttttcctgtggcatctgcagggttccaaagtgagaaaaattaattcactgtgcatgcacttccgaagtgtccacttgcattctgatatctttacttctatttgcagaaagtagacacatattcagccttagtgccagtgtagggagtgctttccgtgacatggataccagaaaaatagggtaaacatagggcccattaatgtgaaaatcagacattgtgtgtgtgtgtttgtgtgtgtgtgcgtgtgagttgaatagtagagttggagtgggcttctatccacctacacctgcaggtattctcaggtgccataatcaactgcaggaccctaaaggaaataagagtccccccaaacccctgaagagtttttgggttcaccgtgtgtccaatgattcagtgcctcttgagctctaggaaagggctccccagtgatgcatgagatctttcttggggtctccctgcagagttcactgggattcctaaggccaattcagtatttcaaaagatggtgtgagaagcacaggctgtcactaaaggagaattctgagccagggcacagccactttatacttggctggggacactggtaggaatatactctgtgagatcagacaggaacctccttgcaggggcagggcagggctgcagggggcgctcaggacacacagagcacaggcttccgccccagagcaggtgaaggaggctggggaggggttcctctcagggcctgggacttcctttaaaaaatctaaaataagtatttcacaaggactgccgatgtttatataaatatcctattcaattgtgagcatttatgaaactcgatgttgtaatgagaaccacttttacaattggaatttcaaacttccctagacatcttaatagtaagcagctggaggtcaggaggagatcctttcttataaataagtgcaattttgggagaaacacactcattcccaaaatagcacattcacatattaaggtctagaaatgattcgagttgcccctgagacagtcaaatgtgggttctaagtgaggtgcgtgtcctgggggagcttgttctccagtgggggaagctctgtcaacacagagttcagggatgggtaggggatgcgtggcctctaacaggattacggcttgaaccctcagcttctacaattgtgtcgtccatgtgtcatgtatttgctctttctcatcctgggtcaggaattgggctattaaatagcatccttcatgaatatgcaaataactgaggtgaatatagatatctgtgtgccctgagagcatcacccaaaaaccacacccctccttgggagaatcccctagatcacagctcctcaccatggactggacctggagcatccttttcttggtggcagcagcaacaggtaacggactccccagtcccagggctgagagagaaaccaggccagtcatgtgagacttcacccactcctgtgtcctctccacaggtgcccactcccaggttcagctggtgcagtctggagctgaggtgaagaagcctggggcctcagtgaaggtctcctgcaaggcttctggttacacctttaccagctatggtatcagctgggtgcgacaggcccctggacaagggcttgagtggatgggatggatcagcgcttacaatggtaacacaaactatgcacagaagctccagggcagagtcaccatgaccacagacacatccacgagcacagcctacatggagctgaggagcctgagatctgacgacacggccgtgtattactgtgcgagagacacagtgtgaaaacccacatcctgagggtttcagaaaccccagggaggaggcagctgcactgaatttgaggagattacagggcttacaatgtttaaagttgtttagaaaatgagctgagcaattgaggaatgtgagtaatggaaacatggatgcactctatataggaaatgtttctttcaacagtcaccctatatgcaaaattcagaatggtaaaggcagcaatcagtgaggctgacgcaaatattcccatggaggccttgtgcagacataccgtttttaaaatcagatagataaataatttggaacaagattgctggtaacgtggctaagactaaatatgattcctaaaaactggccaaaatctattccaaattgtctctgccactccttttacataaatgtattaaaaagtagttttaagaccacagcaaaattggacagaaggtgcagagagttctcatgtgcccctgcttcaccatgcacaggctttcccactgtcaccatcctgccccagagtcatcaataagttacaatggatgaacttacatgggcggattggttctttcctcttctggtggtctcttggcataccaagcccaaattatcttgaagcaccataggttctactgtaatgcctaaccttgttttttactctagtttgctactttaaattttccctttttttgtctccttaattgccagccatgtttcccatatgaatagactctccctggctgggaaagctgggcaaactccatttgaccttttgatttataagacattaagggctccttacccaaccctcttcttcaaggaattaacctgtgtaagcagatcctcagcatttcaaaggagcccaattaactgataaggtactggaacaaacaatgtatgaagttcccaggatttttctcaaagagataacaacataaagccttgagttcatgcccagcatagcatcatatctaactataatgaaggatttagagccctgcacctggtaacgttgctttttgtaaccatttgtcttttaaattgtttatctctctgtaaccatttgcttcttttgattcttgcatgtttttacttctgtagaattattgtatttgagttcccctccccttcctaaaccaagatataaaagttaatcaagccccttcctcggggccgagagaattttgagcgttagccatctcttcggcagccggcttaaataaaggactcttaatttgtctcaaagtgtggcgttttctctaactcgtttgggtataacactacaagtgggttcctgggaatgatgccagttcagaggaaaagtgggtggggctattcatatttgggctcttttttagaagattcataaaacagatattttcctatacgttctgtgactcctgatttactatcccttcccagagggtaaggtccctaagtgttttgcggtatatccatgtctatggaaagaaagcaagttctggtgaatcccgtaaggaatgtcctttgatgagaagtggagaccttggtcatgaggcacatcatgtatgattttctataattccgttagattcactgtaattttggggggtgtcctgtggaatgggtcttctgtgtccctgcatgttcagctatatctgtgtggtgccacttacacttaatgagatgagattcctgctgcttgtatcaggtcactggtgatctctgaagctgcttctggtttctgctttaatatgtaaagagcatgtcaaacatcacccacattcttacaataataaaagcctggaaaattgattatcaataatttcttgaatctgttgaagaaatgaaattgcagggaaaaccaggacccccaaaactagaaagacattaaaatagagataatcagactgatggatcaaagttctgtggcaataagataccaaattataaacaaggcctaaagtcatggattaagtcactcacccctacacttaaaaaaatgactgtactgtaacttccacagggcttttttgttttctgtagcacctaaacaagcactggttctgaggtaagcatattaaaacatttgcagctcatggaactccaaacgtggtaactgaccctctcccacaagccataaatagagctttgtttggacaagagacagatttcagtaactgtcttctgagaagagactactgaccatgaacttgtcctggcaatttacagagactgtgcagtgtgtgtctttctgcctctgcacaaagcccttttgatgaacagggcccgattgtcattcatttagttcttaagtcctcatccccaaagcaaacactaaatgcatgtaacatgtgtgtttgcttattagacatgagagcctgcccactatgtgaacatcaacaagatccttctatagcctgctgagtgtgtacacttggccaatccatttgcatgaattcatttctcctctttccctctcttgaagtgcctgctcactgtctctgtgggaggctttgcttcccagcctgttaaggtggctgtcctgcagctttaaccatttctcagaagtaaagtctcctttctaaatttataaattatgtgactgttccgttgaaagtgcaagctggtgggaacagttacatggtaattcggtaaattgctggtggacaggtgtggacagggatagggtaagaactcctgggggctgcacaccccacacttcgatggaatttccctccagaaacttctgggttctcaggatgataatccaaacagattccttcatggctctgtcatcaggagagctactctcttgataaatatgctcagaacttcctccagacaagatcctacagagaaaaaatgcttttcaagatcctctattctatgtgaggggaaggtattcttttccatcccaggcagtttcatcttagccttcctgtgtcataaaaaggtcaggttcaagacaataatatgtggatgctgcagccaggaggggggagtagaagacggaggaaaatcagctgcaccactggagactccttgtaaagggcacagtctagagaaaaaacatcaagaaaacattgaaatcaatttccagtacatatactgctcccctgcccaccacatcacctcttcaccagtatgatcaatctggattaaagagaaaagtgtggcaatgcacagactctgtccaaggactagaccttagggaaaccaaaggcagagggagaggaaaagttaaggacagtgaagcggtttaaagcctctgagaccaacagcttcaggaccaaggccacggcccctctgtcaatggccttagatttacctctcacggggcatccacagggttcccaggtgagaacaggcaaaaacaaggtgaagacactttccaaatctccagcagtactgagcttgctttagctctgtttgaagaaacaaaacaacaacaacaaacaacaacaaccgcaaatataaccaggattaaggtcagtgttggaagcacttttattaatttttttaaattttttatttctcagatggggtcttgctctgtctcccaggctggagtgcagtggtgcggtctcggctctgcaacctccacctcctggggtcaagcaatcctccaccctagcctcccaagtagctgggattacaggtgcatgccacggcgcccagttaatttttgtattttttagtagagacagtgtttttccatgttggtcaggctggtctcgaactcctgacctcaggtgatccgcccaaattgccctcccagagtcctgggattacaagttaattgagttaataaagctgttctgaactatgaaaaacattagtttgctcccagattttcttgatttcagtttgattattatattcagctgctgccctaatatgtttgagcatgttactatttaaatgaccctggctgtttgatttgttatatataaatctaaactaaaacaacttaaaggacaggtttgtactattattaggatgagatattctgggtgcccctcatttgctccatgaacctccacatttttaatttagaattcacataaattccttgtgagttgtgtcagtcatcgagagacctaatctctaacacctttacccagaaccttctccagatagaccacccacaggaagaacatttatagtaatttatctacatggtggaaggtacttcactgccattgtagaaccctcttcccagccttcctttatgaggcaaatgattgccagtatggtaagattgaacaaaaggatgtgccagtagggtaagattgagcaaaaatagtcctgagatcctgcagacagggaaggacgtaatagacaaatatcagctttattagaggagactccttgtaaaggtcatagccaagaaaaagaagacaaaatcactgagattaaattctaagaatcttggtccagttcaatcaagccatcaacagccaggtggcttcagtggccactatgcatattaccccatgcctaaatgttctggcttgtacaaagagcttctctgtaaattgcacattgccatagtggaagatggcatgggagattttgtgacaaacacttaaggtgcaataatagctatttttcctttatcatgacaatatgtggcatgcttctagattcatttcatgccaaagaagttcctcagaagggtaaggaaatggagaatcttacacggtccaatgcagtccccaagaagggactttgaatggacagttacactggttactacgatgtgtctctgaccttctcaggatcgaagatagtcatgagtatcaaggtggagatggtctaggtgagagaaaggaagtagtgttcttagaagatggtatgccaagataagcctgactatctctcctcttccagttcctgcaacttcatattgcctgattgagtcacttgcctatggtggtaatgacatcagcaatgcaataaattctctggtggctttatatctggtttataacatgggagatgtttcctcaagagtggtgatgccagtgtggcttctgctctctggtggtgttggaatctgcattagtctgtgggtttggaggaaggagattcagccatggggaagaatctgacactctcacaccctctgtgccttcggtactggactgctcctgccctcactatggtgattgcatcagatattgcctccccaccagacaacacgttaacatggctccttgtacctggctttaaccaagaaagttgtcgacttgactcttcgtgacattgtatagcctggtttgtcacaatctttatttcgggaattatcagtgctgccatcttggctgtcttcaagtatgtcatcctcacagtgtgaagctgtttgacattaacatttttgtcaatgtttgggactaccttacatattccggctcagttcaaaatgagctatgtaatgtagccaggtttccactgagttccactttgcttcttggctgtctattcctgcgcaagtttctatgtattttgtatcaggcttcaattccattatgtttaaaatgttgtctctaaagataaacaaagatttttttaaaacaaccaaacatgcagccatttgaccgagtgtggtctgcattgttagtctcaccatcttctgccctaacaagcaccgaatctaacaacacaaatatcatggaagctttccttggagtagctcctgtaattagaatcattgtattctgccctcctgtcagtggtggaacgttctattggcacatgtggaaacctcttagagggacgagtttctttgaacacaataaaattttaagttaggaataacttatttgaaagcaattcattgaaggttattgctaagaagttagaaacagtcttttggcagtcatttcttcaagatgtatggcagtgtgggagggatatataaagtggaataggaacttgggctagttaaatggaatagcctccaatgttaatctgtttaccttttaactgaatgaaaaagcctatagttgtaagaaaagaaaaaaaacacaatcctcacacattcccttcccatcagcattgaagatgagtgtggcaatgcagagactctatatagggaggagaacatagggaaatgcaaagacaatgggagaaaaaagtcaaggacagtagagcaactggaagcttctgacaccaacagcttgatgaacagggtcactcaacccttggtggacacagagtcacttctcttagggaaactgcagtattctcaggtgacaatatgcaaacatgatgaatgtacacttgctacgtctccagttgtgtactgttttccttacttctgtttggagaaggaagtcatatactcaggtctagtatccgtgtagagggtgctcaccatttgcaagatactaggaaaaatggcaagttagaggcccactgttgtaaaaatcaaccagttctgtgtgtgtgtgtgtgtgtgtgtgtgtgtgtgtgtgttatagaaaaagaagacatggagtgggcattgatccacaagtatatatacctacaggtattcttagatgtaatattcaattgcaggagaccaaacaagataaagcatcccccaaaacccttgaaaatttttgtgctcactatgtgtccactgattaaatgtatcctgagctccagggaagggctccccgatggtttcttagagttcactgggtctcctaaggtcaatgttttcaaaagatggtgtcagtaacatatggtgtcactgaaggagcattttaaactagggcatgacctcttcctatagccctagagacactgagagagaaatcctctgtgagcccagatggaaacctccatgcagggcagaggcagtgctgcagggggcgcccaggacccacccagaacaggctccagccccagagctggtgcacaggaggctgcagaggggatttctcccagaattgagtgttgttttattgaaaaccaaaaaattataacatgttaaaattagaattttgcaaagactatttctattatctctatacatttagaaataaacaaatcaacaattcagtgagaaccacatttaaaaggcaaaattgttacttgtttgagatattttcctagtaaaaagatgaagaacagggatggttttattaaatcaaaaggtacacatttcagaagacgcagagatcccaagagtaagactgcagacagcaaagcctagaaagggcggaggctgtccatgtgccatgtcctgtgtgagtcaccttcttagtggagaagttctcccttcacaaagttttgggcatataaagggaaacacgacattaaataagaacgaggacttgtacctcagcatcccacagttgtgtggttcatgtgagatctattttctctttctcatgctggatcaagggtaaggctatgaagtagtagttctcgtgaatatgcaaatcacctgaggtgaacactacagatatgtctgtgccctgagagcatcacccaataaccacacaccacaaagacactcgctgagaagagcaaccctaagacacataattgtcagattcaccaaggttgaaatgaaggaaaaagttttaagggcaaccagagttgtgccatggcacagtgttgtgccatgtcctttctctgttttcttgcctgtttatttatgtcagatgtgccacctacatggaataaggtcagaattctgcctccagtaacacatcaaaggtgacctttgattgtacttttggtttatgctccaaaatattgattataaaattcatcaccgtcatattttatgtcaaaataaatctgcataatctgaatgtcagtacattttggaatctattaaataactgaaattgcaagaaatattacccactccaaaaactggagagatgggcatgtccagaatggcagttagcacttgcttacctggtgcagaaactgcagaagccacaagctgttgagggcacttacatggtaaccactacggacgtctgaaagacaaatgtggactcggtaaatgtgaccgttccagagggtcttatacttctaaggtttctggactttctctccagaaacctccagattctaaaatatacaatccaaataaatttccgatgggtcagaattgaagatgaaatgaagatgattaattacagagaaatataccaggagcccacttcaaaagcttctaaagggaatgacttttccagaaccttatcctatgtgaaggaagacaaatctcccattccagattctcccccattcttccattattatatgaatgagtaaagttagccaaaaggggtaagacgtacataaatagtccaaggaggccgaaacctcaaaagggagtaacagccaaaaatgagcttttcccctggagatgctttgtcaaggtcacagcccagaagaggaagcctattgaatctctaggtttccattggaagaacaggcagtgcttacctgcactgcacaatccattctaactaggatgatggctatggattaaagatgaaagtgtggcaatgcacagactccatctgaggagaacacagaaatactaagacaatggcagagggtgagacaaagacagtagagcaatgtgaagcctctgacatcgtgatttttaagaccaacatcttgtaaatgccatcatagttctcagcttcttttattatgggacctttgctggtttcctagctgagaaagtgaaaataacaacctgcatggacttcccaagtctccacctgtatcctgtttgctttagatctctaggagaagaaagtcagataactgggcctggtgtcagtgtaggaggcacttcctaaaagccacatattaggagaagggaaaatgtgtgttattggaatagtggatatggagtgggctttcatttgaatgtatctgcacctgctagtattctcagatgcaacattcaactgcaagagcccagtgaagaaacatggcactcgcaaatctcttgtaagtttttgtcttcattttggttccactaatgaagtgaatctggagcttcagggaaggggctccctcctgtgtcattgaatccttgctctgggtctccctgcagagttcaataggtttagtaaggctaatcaattgtttcaagagatggtgtcagcagcatatggtgtcactgaaggagtattctacactagcacacagccatttcatgctgggctagagaagcctgggggaaatgatttgaagtctcagcaaggaacctccttgcaaggcaggggctgggctgtcgggggcaccgagcaggtgagtcagaaatcaatatgtaaagatgaggacctatggatatgaattgaaaatatataaatacttcaaaaaattccagtaaattgagtccaaaattaaccccaaattattcaaaacacaaattccttgacaattattttgggagcagtgagttcataaagaattcaaaactactgtttcagcttctgattcttattgttcctgagatgagaaaatcatctctaatcacacatcacacagcaaatctgtaaacaagagtgtttctatggaagatcctgggggatctgaacaccaggcaggtgctggagaccctgtttcaggagcgcccagcagatctcagagggacctgctggtcactcacgtgggacatcagcagtaactttctcagtcaccagtcagctgtgctggtgactgatggacccaggacagaaccaaggcacctcctcagtgtcatggagagtgatggttccagaaatcatccaggtgctctctgtgcttataaaatgtaggttcactgtgaggagcatgttctgagggggattgttctgtgaaaggacctctgttcatgagtgttcataaatggagcagggcatgcatttcctcaaacaggaatagcgcttggaccatcagcatctcactcttgtaaatctgatgtgtcatttatcttccctttcttattattgaccaggctttgcgctatgaaatgctctgtctcatgaatatgcaaataacctgagatccactgaggtaaatttggatgtctgtgccctgagagcatcacccaacaaccacatccctcctctatagaagcccctgagagcacagctcctcaccatggactgtacctgggggatcctcttcttggtggcagctgccacaggtaaggggctcccaagtcctagtgatgaggaggggattgagtccagtcaagggggcttttatcatctcctcccttctcctcacagatgtccattcccaggttcagctgttgcagcctggggctgaggtgaagaagcctgcgtcctcagtgaaggtctcctgccaggcttccagatacaccttcaccaaatactttacacagtgggtgcgacagggccctggacaagggcatagtggttgggatgcatcaacccttacaatgataacacacactacgcacagaagttccggggcagagtcaccattaccagtgacaggtccgtgagcacagcctacatggagctgagcagcctgagatctgaagacatggtcgtgtattcctgtgtgagagacacagtgcgaaaacccacatcctgagagtgtcagaaaccccaggaaggaggcacctgtgctgacacagaggagatgacaaagattattagattaaagattttcttagaaaatgacactaagtcattaaagaaaaggaacaatattaatgtgtatttgagaaattttaattatttgagagatttttcatacagcatttattctgtaaacaaatttcaatgattacagaatgaatcaaattaatgaaactaatacagaacttcctctgaaggtatctttgtaaacattaatttcttaatcagtgctgtaagtattttggaacacagacacaaaatcacattttaagtctgcatttatgtctattaaaaatgccaaaaaaatctccttttgtgcatgtagcattttgaattcccaccatcaatgcatgatagttcttggttttccacattcatattgtcatgtatccttatgagaattgtgtgttttaaccaatctagtaggtgagtaatgggatctaatttttatttaaatgcacatgtccctccaaaagttcatatttaacaattttcctataacttctgttgagacgcctctcctgacattcggttcattttaactgcattgcttcatttcgattcattgcaagttgacttgcatattgtttataaaagtcatttcacaaattaaaagaattcatttcacaaatatgtgacttggaagtattttctccaagtctgtggctgtctttattcccttatcagtgtgtattgcagaaacatatgtgtgtgtatgtgtctgtgtgtgtatgtgtctgtttgtacgaatttagactcaaaaacatgtaaaattgcattcattcatagatgatgtatttggcaatatatatgaagtctcattataaaatacactaatagtgattattttttccatgtctctcaactcaggccacaatcaactcatgagtgtttaaacttcatctacttgattggaggactatccatttcagatatttggaatacttctgtaaggaaatgtgttcatcttcccaatatttatttatataatcatctattaatatgtgtattggtttatgaatatatatttcatactctgaagaagatccatgctatattattcattttatcgttcaaatcaccacagctttattaggtcctgggagctcatttaatttggatcctgtatccttacagcacacctcatccttttgtttttgaatacttccctgtttccttgtattacaataaattctaagctcattttctatattaccttttttgtacatagaattagccttttttctaaagattgcttgtttctaatgttaacgaatagcagtaaaataaaaaaaattgtgataccgtgtataattacttctaggacctctcaacctactggcctagtagacgtgcatgtttatatgaacccatgtttgtggacgcatcaaaactatttatgtaactaatcttctgtaactttattatattaaaaatgagaacacactggtctcctgacccaactatgctaccacatggacctttctagccttccttccttgactgtccataaccacccactgcaaagtgaggaatcctatcctaccaactgccttattattacctagttgcacaattttaggacacatgcatagcggtatcagaaatgtaaagctcattggaaatatatttatctactagaatagagtgttatgtgtagtttctttacattttaaacttatagaatttcctcatttccaaagttaattagattagcaacttcattttctactttctttagtgaagtcatttcaattacattatataatatcatttatttgaaattcggtataaaccaaaactatagtcaagtaaacagatagaggatattcaaggaacttagagagtgagtattaaataagtacaaatggcactgtttaagaatagtaaaattatttttagtgatataaaatggttgagacacgatgcagttaatttgtctaaactcataaatgtgtgatggaaaatataaacctaaatatatacaatttttgtaaaaagtatttagcagttcattaaccccaggattaaatgcagactgtatcaagttatctaataacttatttggtgagggtggggatgtcatgagatgcatgcaaaaaagaatgaagtaattttcctcatttgcgtttaagatgttaccattcactaaagacctttaatttaaaaaaaatcaattttctacgtgacccaggttttttcttcctgacgagcaaataacccagataattcttttctttccttggttgagaaagattttccccaaacttcagctcagttcaggcacacactgtccctgaatgggcatttaccctcagatgggtaacacacctgtcaacatggggactcttctgtcagacaaacacacctttactcacgtggattcttccctcagaccaacacacaagtccccacatggactctttcctcagaccaccacatatgtccttacatttactctttcctctagtaatgacatttcctcatgtggactcttgtctcagacaaacaaacatgtctgcatgtgaactcttcactctgataagtacaaatatttccacagtgactgtttcctgacacaagcacatatatccaatgttgaactgttttatggcaaaatgatctcaagataataattataaaatccctcctgacaaggtgtagatctgcatttttttattgtaccttaactttgccttattgtcaagaacaatagtttgcagctctatatgcaccgattagagattggtgtccattttctctggaaatgtatttttatattcttactggatgtatttttttgataatgtttgctactgtgaagatacctgaacagggtccacactagaaaataaaaaagactaatcggcagattaaccctgtgcatccagacccacgagtcctttgatcctgcccccctgaaatggagacacagaggacagatgagcaatgctgagcggtgcacccaagaccacaaaaagaaagacaaggaaatgtgtcccctcccctcctcatgaaaggcagctcatcccctgttccttcaggccctggtgaggagccaacccatgtctgttcccttcctcggtgtccacaccgtggggtctgccctgatttgggcttcccttctcatcaccctcaatattagtgtcccttgtgaatcaggtccagctgcggctgctccacatggggccgttcttccatttcctctgtgtttgcagaagtcctgtgtgaaatttactgatagagtcaggggggaaaattgtacagcccagtggttcactgagactctcatgcaaagcctctgatttcacctttactggctacagcatgagcttggtccagcaggcttcatgacagggattggtgtgggtggaaacagtgagtgatcaagtgggagttctcagagttactctccatgagtacaaataaattaacagtcccaagcgacaccttttcatgtgcagtctaccttaaagggaccaaactgaaagtcaaggacaaggccttgtaatactgtgagagacacaggagagggaatatctgcgtgagcccagacagaaaaatctctgcaggaagacaggagggagctgcatggtagatgctcctcagaaccaccagggcaccttggggacaacctgggggcactcagaaccaccagggtgtgcttaggaccacgggacactcaggatattagggggtgctcaggatcacgagggggcgctcatgacaccaggggacactcagaatcacaagggggcgctcaggacacgagggtttgcccgggaccaccagcaggcactcaggtcaccagggggtgctcaggaccaccagggggcgctcaggacaccagggggcgctcagaaccaccagggggcgctcaggacacctgggggcgctcagaagcatcaggggtgctcaggatatcagagtgccctcagtaccacgagggggcgctcatgacaccaggggcactcagaaccaccagggggcgctcagtacacgggggttctcttaggaggcagctccaaatcagaagcctgagaggctgtggttttcttttaaaccttggtgattcccgacctggtcaagcaaaagtcttccccaggatctctcaccatttcttccttgtaagtccatgattacttttacctacaaaacattaacttagaacaggaatttaattcaacttttaatgctgcatattttccaagtaatactagcaatgatctctcaggacaatttttacaataggttatttatatattttcttgattaaaaataatactattattaaaatagtaaagttataaaaatcacacctgtaatcccagcactttgggaggctaaggcaggcagatcacttgagctcaggacttttagaacagcctggcagcacagtgaggtcttttctatatatatatatgtaaaataataataataataataaatacctgggtatggttccacctgtggtagcagctacttgaaaggctgaggcaggaggatcccttaagcctgggaggttaatgctgcagtgagctgtgattgtgccactgcactccagcctcgttgacagagtgagaccctatttaaagaaaatgtataccctcaatacaaactgtttcaatgattagagttttgtatttttgtgctgtaatagtcaaacaattgtacatgttttttaacattaactcagcatatacatggtattttgtttatttttctttcatctgctgtttttggaaattaaacacgactttaaatgctcttgttctccattttggttggcttcaggtgtcctgtttttcagactatttctccatcttccctttctctttgaaagtattttactttcctcagtctccatgaaggaaaaagaaagtccctttactttctgacctccaagtctgttgaatcagttcccttctcttcataatcactgaagccaaccaagtttagaggataatggttctccttagaatatgctcgtctacctgcagactctctgccctaactcacccttttccagggtcctgcagaccatctcctcgtttccctaagtaccacagagtgggctctgcagctcctgctgccctctgtgtgctcagccctggggctcactagtgttttgatgatcaagtccaaatccccatgtgcttggaccctctgagaccaccctctaggaagatgccattgtgagtgagccctgaaaatcatggactgtgttcagtttcatattcctggatgttctctgttgtaaaggaatattgacaaataaatactagagtttgtattgaatattcatgccaaaaaagttttttaaaaatttttcaaatgaaacaattttatcttgcctagtttgaaaactacaatctaaatttaacaaataatgtaatacaacgtttgtcctattagttattcaatttattaaaaacagactgatatttaaagttaataccattgcacatttgagtgacatatttggcaagaacagcatttacattcagctttaacaaaacatgtatttatatatatttgtctttttagtattggaataggcagacatacacgtagaagagcattattttctactacaacctcaaactgcaaacacaatttaaattcaattaagtaataaaaaaaatatgaaacaaatgggtgtgctgttttggtgtttagatatacattcacttttgcatgggcacatgtatgtgtctttgctgggctgttgtgtatgtatgtgtgtttgtagaaccatgaagttttcaaatacatcattaaatgacatagttatattaatcttggccaggcatggtggctcaagcctgtaatcccagcactttgggaatcttaggcaggcagatcacctggggtcaagggtttgagaccagcctggtcaacagggtaaaaccccgtctctactaaaaatacaaaaattagccaggtattgtggcacaagcctttagtcccagtgtggcagggaaatgtggggtcggaaatcccacacagagtttctactggtataccacctagtggagctgtaagaagaaagccactgccctccagaacccagaatggtagatccactgacagcttgcaccatgtttctggaaaaaccacataccctcaatgccagctcgtgaaagcagccaggagggagactgtgccctgcaaaagttttttaaaacttttcatttgaaaagttttaaaaaagttctgtcacaggggcagaacttcccaagaccatgtgaacccacttgttacatcaggtaacctggatttgagacatggagtcaaagaagattattttggaacattaagatttgacttcccagctggatttcagacttgcatgggacctgtagtttggaccaatttctccatttggaatggctgtatttacacaatgcctgaactcccattctttctaggaagtaactgacttggtttttattttacaggctcatagatggaagagacttgcctcatctcaaatgagaccttggactgtggacttttgagttaaggctcaaatgagttaagactttggcagactcttgaacaggcatgattggttttgaaatgcgacagcaatcattactctagaggaccacacgtgaagtgcaacaagcaggcgcagaagacaagtgattcgtgatttcactgtagtttgtttaaatggtagactcacagaagtagaatagaatgttggttaccaggggctggaggggtggactggaaaaggagagattgtggtcaaagtgtaaaatgttccagttagacagaaggagtaagttacagtgttctaatgcacaagatggaaaatatggctgtgaatgcattatatatttcaaaatggctaaacatgcaaatgttaaaattttttcccactaagaaattatacaggtcgggagcgggggctcacacttgtaaacccagcactttcggaggccgaggtgggtggatcacaaggtcaggagttcaagaccagacttgccaagatggtgaaaccctgtctccactaaaaacacaaaaattagccaggcgtggtgttcaccacaggagaattgcttgaagcaaaggctgcagtgagccaagatcataccactgcactccaaccggggtgacagagtgagactcagtctcaaaaaaaaaaaagaaatacatttatgaggtgctggatatgttaaatagcttgattaacaattccataatgtatgcatgtatgatagcatgtgtgaatggacctgtatgaaggtgaggtgccctggtcacgtgacagtgaggtgacttgggggaggtgtaaggttacctgggggtatgtgtgcggtgaacttgggcacatgtgaggtgacccacggtgcatgtgtggtggcctgggtgcgtgtgaggttacctggacatgtatgaggtgacatggggaattcgtgaggtgacttggatatgtatgatgtgacctcaggcatgtgtgaggtgacctggccgacgtgtgaggtgacctgggggacgtgtgaggtgacatggggaatgtgtgaggtgacctgcgggaatgtgtgaggtgacctgcgagcattccaggtgacctggggggtgtgtgagcttagcaggagtgtgtgtgaggtgacatggggtatatgtgaggtgacccccctgacgtgtgaggtgacctgagcacatgtgaggtcacctaaggcacatctgagttgacctgggggatgtgtgaggtgacctagggaaatgtatgagctgacaaagggcatgtgtgcagtgacctgggtgcatgtgaggtgacctggtgcatgtgttagtttacctgggggatgtgtgaggtgaacaggggcaggtgtgaagtgcctgaggaatgcatgaggtgacctggtgcatgtgtgtggtgacctagcagatttacgaggtgacctgcgggatgtgtgaggtgaatagggacttgtgtgaggtggccacaggaatgtgtgaggtgacctgggggatgtgtaaggtgacattggggatgtgtgaggtgactcagggcacatgtgaggtgacctgggggatgtgcaaggtcaccttgggtgagtgtgaggtgaccttggggatgtgcaaggtcacactgtgtgagtgtgaggtcatctgggatatttcaaacttcgtaaggaaagcctgcaacagtatatggcactaaaagcttcacactccaacaccgttaatgcgcacatcctcaaggaactctaagtgtttccaggttagcttaaatgccatggagcgacacctgccccaggcacactcatatatgcatcctgggtctccctatcaacccctatcctcaaattttcagtttatgtttgctccatgatatcaactctgatatgttgaaggttttttttttcttttatttgtagttgttcaggtttgctatttcactctcattactctgggctcagtcctctcctcaggtgtcccacttcagagcttgctatataataggagacatgcaaataggaccctcccttttctgatgaaaagcagcgcagcctgaccctgcagccctgggagagaagccccagccctgggattctcaggtgtttctattgggtcaacagcaataaacaaattaccatggaatttgggctgagctgggtttttcttgctggtattttaaaaggtgattcatggagaactaaggatattgagtgagtggacatgagtgagagaaacagtggatatgtgtggcagtttctgaccagggtgtctctgtgtttgcaggtgtccagtgtgaggtgcagctggtggagtctgggggaggcttggtacagcctggggggtccctgagactctcctgtgcagcctctggattcaccttcagtaacagtgacatgaactgggcccgcaaggctccaggaaaggggctggagtgggtatcgggtgttagttggaatggcagtaggacgcactatgtggactccgtgaagcgccgattcatcatctccagagacaattccaggaactccctgtatctgcaaaagaacagacggagagccgaggacatggctgtgtattactgtgtgagaaatcctgtgaggggacacaagtgcgagcccagacacaaacctcctgcaggaacactgggcgaaatcagctgcagggggtgctcagggcccactcatcagagtcaaccccagagcaggtgcacatggaggctggggtttgtttcctgtcaggatttgggacttcctctgcttctgacagtttccctagggaaactctttaattttagatttctgtgcccaccaatgtcatctctacatatatttttttaaatcattataatacgaggactcattctcacatgcacaatatgtatattgccacctacgggaatgaaaactcctcaaccatggtcaccagcatcagagttgtgaggaagctcaggggtgcctggtgagtcttctccagtcagactcaggacagtaacctcaatgggattccctgactagaatggcttttagggatttcgattacagccaagagagaggctggaccaggttcagtgtcatgtaggacctcacagattttatgtatgacatttctcctgacaataaagtatgcaaatgagtatcagtcactgatctggtgcttcctgactttcatttttagtggttctcgcttttccatttgattttcctgctttctggataaaaggatgttgtccctgtggtctaaatccctggggctcaagccctttccctggagcttaggtggggctcaggctgtgactcctgcagccattgggagaggctgctgagactttcttctctctcattgttcaggatactccactctgttttctggagacgcgtctgagaacgcgtgtggccattagtaatgagggcacaagcttctttggtcaaaatggggtgaggatgtggaattgatcctgtgctgtgtaaactgtcacagagtcaccttcttcaccagtagtgttagaagagcttgtaaaatttgtcggaatccaactggagtcccctgtgttcaaaccctgacaaatggagctggggaaggccatggatggaagcttctcatgcacatacccctgagaacaagacctagctttataacactccaaaaaaccacaaattgaacaaaggcaaccacaacaataaaagaattacttatatccctgagaacaagagctagctttataacactcagaataaccacaacaacaaaataattacttatatacctaacaacaagagctagctttttaacactcggaaaggccacaatcttgcacaaggcaaccacaacaatgaaagaattacttctgtgaaaatatctgcacagcaactgcctatccaaccttacactgatgtcaaccttgttattgatgcttctagcccaggatcgtcctcatcaaaatgtcattcagatcctgcctatgaaaaaaattgtgtttttcagtgcactcatgttctagtaaagccctcagagaccctctccttcacctgtgctgtctctggatttccaatcataaccagtacttcctcctggagctgtatctgccagcccccagggaagaagctgaagtgggtcaggtgtgtaggtcacgaggaaacacacagtgcaacccgcttctcaagagtccagtcaccacctccagatccacattcagaaaacagtttttcctacagctgagctacccgcacaatgagtaaaccaccatggatttttatacaaaagacacagaaggggaggtcattgtgaggccagacacaaacctccctgcagggaagctcaggacaccagggggtgctcagacaccaagggctctcaggacacatcaaggcaggtgcaagaggggaaaaaaggtgctggaggtggggtttttcatcactgtcatattttactctccactatatttattctaatgtatattattttattattagacaatgatatttatataaatatatagccatacgtaggtgcaccaagttgtcctttccatcttatgtggaccttgtccattaggacgaagtccctgtatgtatttgagcacctcataagttatggttaattatgtaggatctctcactttttctgtgtcccttcctccctcctctctcacacacaaactgacacccacaaagagttctacaactttaattacctgatgcgttgaagaaaatttactgaagtgcagctttttcagtttaactgctgttcatgttgatgtaggaataagaacattgtctttctcaactgtgtagctctctaagctgagtagcacctttatttataatacccagatactgaaagcaatccaaatattgatcagcaggttaagcagtaaacactttgttctaaattcgttcacttgaataatacccactgttcaaacaagtacggctggaaatgctcaacaagggtaaattcacaagtacttatgaagagtaacataagccaaagaaatacaagtacatacatacagttccacttttataaattttataaaatgaaaactaatctaaagttacataatgaaaaccagtagttggccgtggacatggtatgagaagggaaggtgtaggaagtggcaattacaggacaacgagaggaaattttgaggataattttttctgtattgagaaaggttatggttatgtcattatttgtcaaattgtacacattaagtgaagattattactttctaatttcgacttcttaaaatactacaaatttaaacatatataatttggtagaaaaggagttagagatggataaaatatatgagaaataaaaaagaaaatctcagaacgatggcataaggattcaaccatcaaactaaataaattttaaatttctcaacacagaattatagattcataaaaccagctcctggattcattgattttgtggaattgatttacatgtctttatctccttcagttctgctctgatgttaggtatttcttctcttctgctagcttgtgaatttgctcttgcttctttagttcttcaaattgtgatgttagggtgtcagttttagatctttcctgctttctcttgtagacacctagtactataaatttccctctacacactgctttaaatgtgtcctgaagattctcatatgttgtgtctttgttctcattggtttcaaagatcatctttatttctgccttcatttctttatttacccagtagacattcaggaacaggttttccagtttccatgtagttgtgcagttttgagtgaatttcttcatcctgagttctaatttgattattgcacttgtggtctgacagactgtttgttatgatttctgttcttttgcatttggcgaggagtgtattacttccaattatgtggtcagttttagaatatgtgcgatgaggtgctgagaagaatgtatattctgttgacttggggtggagagttctgtagatatctattaggtctgcttcaagtcctgaatatccttgttaattttctgtctcgttgatctgtctaatattgacagcggggtgttaaagtctcccactcttgttgtgtgggagtctaagtctctttgtaggtctctaaggacttcctttatgaatcggggtgctcctgtatttggtgcatatatatttaagatatttagctcttcttgttgcattgatccctttaccattatgcaatgcctttctttgtctcttttgatcttttttggtttaaaatgttttatcagagattaggattgcaactcctgctttttttttttttttgctttccatttgcttagcaaatattcctccatccctttattttgagcctatgtgtgtctttgcatgtgagatgggtctcctgaatagagcacatcaacaaaataaatagacagctagccagattaataaagaagaaaagagagaagaatcaaataaatgcaataaaaagtaatgtaggggatatcactactgatcccaccgaaatacaaactaccatcagagaatactataaatgcctctatgcaaatatactagaaaatctagaagaaatgcataactgcctggacacatacaccgtccaaagtctaaatcaggaagaagtcaaatccctgaatagaacaataacaaattctgaaattgaggcagtaattaatagcgtacaaaccaaaaaaaaagtccgtgaccagatggattcacagctgaattctaccagaggtacaaagaggaactggtaccattccttctgaaactatttcaaacaatagaaaaagagggactcctccctaactctttttatgaagccagcatcatcctgataccaaaacctggcagagacacaacaaaaaaaagaaaagctcaggccaatatccctgatgaacatcaatgcaccaattctcaataaaatactggcaaaccaaatccagcagcacatcaaaaagcttatccaccacgatcaagtgggcttcatccctgggatgcaaggctggttcaacatatgcaaaacaataaatgtaatccatcacctaaacagaagcaatgacagaaaccacataatcatctcaaaagatgcagaaaaggacttcaacaaaattcaacaccccttcatgctaaaaactcaatgctctaggtattgatggaatgtatctcaaaataataaaagctatttatggcaaacccacagccaatatcatacagaatgggcaaaaactggaagcatttactttgaaaaccagcacaagacaacgatgcctctctcaccactccaattcaacgtagtattgagagatctggccagggtaatcaggcaagagaaagaaataaattgtataaaaataggaaaagaggaagtcagattgtctctgtgtgcagatgacatgattgtatatttagaaaaccccatcgtctcagcccaaaatctccttaagctgataagcaacttcaacaaagtctcaggatacaaaatcaatgtgcaaaaatcacaagcatttctataacccaataacagaaaaacagagagccaaatcatgagtgaactcccactcaaaattgctacaaagaaaataaaatacctaggaatagaacttacaagggatgtgaaggatctcttcaaggagaactgcaaaccaccgctcaaagaaataagagaggacccaaacaaatggaaaaacattccatgctcatgaataggaagaataaacatcatgaaaatggccatactgcccaaagcaacttatagattgaatgctatccccatcaaactaccaatgactttcttcacagaattggaaaaaactattttaaagttcatatggaaccaaaaatacatcctgcatagccatgacaatcctgagcaaaaaaaaaaacaaagctggaggcatcatgctacctgacttcaaactatactacaaggctacagtaaccgaaacagcatggtattggtaccaaaacagacatatagaccaatggaacagagcagaggcctcacaaataacaccacacatctacaaccatctgaactttgacaatcttgacactaacaaacaatggggaaagaattccggaactatttaataagtggtgttgggaaaactggcgagccatatacagaaaactgaaactggaccccttccttacaccttatacaaaaactaactcaagatggatgaaagacttatccagacctgaaaccataaaaatcctagaagaaaatctaggcaataccatccaggacataggcatgggcaaagacttcaagtctaaaacaccaaaagtaatggcaacaaaagctaatactgacaaatgagatataattaaaggaaagtgcttctgcacagcaaaagaaactatcatcagaatgaacaggcacctacagaatgggagatttttgcaatctatccatctgacaaagggctaatatccagaatctacaacaaatttacaagaaaaaaaaacccatcaaaaagtaggtgaaggatatgaacagacatttctcaaaagaagacatttatgcagccagcaaacatgaaaaaaccctcctcatcactggtcattagagaaatgcaaatcaaaaccacaatgagataccatctcacaccagttagaatggtgaccattaaaaagtcaggaaacaacagatgctggagaggatgtggagaaatagtaacatttttacactgttggtgggagtgtaattaagttcatccattgtggaggacagtgtggcgattcctcaaggatctagaactagaaataccatttgacccagcaatcccattacttggtatgtaccccaaggattataaatcattctactacaaagacacattgcggcaccattcccaatagcaaagacttgaaaccaacccaaatgtccatcaataatagactggataaagaaaatgtggcacatatacaccatggaatactatgcagccataaaaaaggattagttcatgtcctttgcagggacatggatgaagctggaaaccatcattctcagctaactaacagaagaacagaaaaccagacaccgctgttctcactcgtaagtgggagttgaaccatgagaccaggtggacacagggaggggaatatcacacactgaggcctgttgggaggtaaagggctaggggagggatagcattaggagaaatacctaaggtagacggcaggttgatgggtgcagcaaaccaccatggcgtgtgtatacctatgtaacaaaactgcacattctgcacacgtaccccagaacgtaaagtatcatttaaagaaaggattacatattccattaaatatatatgagaaatcagagactcctgaatatacacatgaatacacactgggtctacctatatttttagggaaacactagaatacagcaaaataatgtcatgattttattaaaaaggggggtttatcaaaccacaccaggcatgtccagctctgtcctggagctggttcagggaacaggtgggtcctgtgtttgggagccatgacaacaagctcacagcgtcagttctagttgaaacctcaaaaaggcaaagggatctcaactaaaatatcatgtggatgtcacatctgtgggtgctgcatactcccccgatgtgaatatggaaaggttaattacctcttgaactctctgccgagattagtgctggtctctcaggaacacccaaaatggctcgatagagccagaaagcagactggctcagggtttttgtgatggtttcgtcgtgggtcagagtgaggcttcccacgcacaggaaggggattgtacagtgcgaaacacccactggtgtcaaatgaggaagctcccgcaattcctaactagattcacattgtgtgataaaagacacacaatagacataacttcatggtcggatatcacaaaatgccgttaaaagatgtggtaaaaaggcaactttaaatttttagtcattggagtgcgtacaacacaaaaatcattttcaatatttgtaacacatgcatgcaataggacaaaggtatgtgatgagggtaaaatctcgaaagtgtgaatcttccagctaccaagtcgtagggtaataactgatgtgtgctgagggaggaaaccatcacgccatagtgctaatggtataacccttggtgaagagagttcaatattttattgaagttttcataatttttatttaaagatgccatttttcaacatactcagatgattgtgagtgccattgattctgtatcgtatgaacaatggcaataccttccatgtttacataatattaaaaaccacgttaagactgaatatttggtgtcatggtgcatcacgttattctagcttccatactagttgttttatttgtttgttttctcctttgttggcatttggtttcgaattcatatgtcaggtctctataatgtaggaatttatttaaaagtgtctttttttgtccattttgatggggcttccaggagacgtaagaacctcctctgcttgcaacacattttaaaattacacactaatgtagaacatctgtatttaatcctggtttttagttaattgacaagctctaataagtgaagtaacttctccattctgggctgattttacatcaggtataggaatatatcctaggtgaaagtttgtaccagtaatatgaattattaggtaataacctccacctttatgatttacatgttattcatcaagaaatagtgttaaatcaggagtctcaatgaaagtattacctaagggatatacaaaatatattgctaatctacataaaacagatgtgaacacactcttagtatccagccatgtttcctgtcaaccacacagtaactttgacttcacttgggacttgttctaattttcaaattagttacttattaatcttaatgcttctagatattatgtgtgactattttagcagagagtgaagaaagacagcctaggccgactaaacaatgaggaaaatcacaacctgatgaaacaggaagcctctggatgtgagtggctccaggattgaataatttgacaactcatgtacccaggaagtttcttttctcaattttccacactgatgcatccagaaagtcagcttcaccccccaggtgactcccataatgcagtgacatggtgacaatattcccatggtcacatacgtattttatatattggctggaaaaggggcagagacagttctgcaattctcctctgaaggaccaggaacacctcaacagaccacctcccctgcccccatgactagaactgcaccacgtgcccacatggacactcatccctgatggggataagaagactccattgatgaggccgactattttagcatataaattagtaaagactgatataaaggtttcaacaactaattgaagtctgttcttctatgtccaccagagactatagatgctccagcgatatcttgtttttctttgctgcgtgactgtgtctcttctccttgttccatcctccagagaatctctttcagctcccacaggtgcattcctctgttacatgtaactgacaattgataaattagtggaagcccttacactaaaggaagagtctctgacctcatcttggtccatattcctagaaaggcattgtgcccgtaagtctgggtgtgaccttctgagtgttcctgaccctcctccagaggagatgctcatctgtgtgttcttgtccctttcactggggtagaaccaccctgtttcccccaggtgttccctcccacagctccagtgttccgcatcagtgtcatcacctcccagatctgctgccctgccctgcagactaaagctctgattccataagaaggagagttatgtctcaacagaacttcgtggcagtgacctctgttcccatctcaattcctgaggggttgcaccagtgcccctagggtactggttttggtggttcccctgcaaagtaatttttggttctgtagtggatataagggagtcgagtctgaatgcctttcaaaaatgggggctcttgttctctcccagacagacactttgggaaaggaagattttgtgactgccccttttttggggaaagggattcaagaggatagaaaagctcttcagtatgtggtcccttagaatttcaaactacaacaagcttaccatattcagtttcaagcaatcccatatatatttgtatttttatctttaacagactatatttcatatgccagactctgccttaggtaatctcatatgctggctttgttactctctacaagaacttgcttcttgttaaatttaagattttttttaacttcagttatcctaagcattcagaaatttgcaaaatttcatcttgactgtttatctgttattgttgatgtagttgtaagaaataaagaatatatatccctcatttatgtacattttcaagtcgagtagtagatttttagtactaccagagtaataaaataatttgaacattgttaagctgcttaacagaaaatcaaattatggtaaatttgttcaatggaatactacacaacatttataataaataattgtctgatacatgcaacaagaaggtaaaatatctaagtatttttgctgagtaaaataaaccagacaaatgagaagatttaccatataatttcatttatataaattctggaaaataaaaactgaacttacttaagtaatataacaacaaggtaaaatatctaagtattgatgttcaggaaaataaagcaaatgaataagaatatgtactatgttattccattttaataaactctgataaattaaattgaatctacagcaatataaagaagaacagaatttaccatttggggaaatggtagaagaagggaagaggaaaggaggaggaatatagaagaatgagagggaaattttgtgaattttctggttcaccttggtaactaggatggttacatcaggtttatcaattgtacactttaaatatgtgaagtttattatcagtaaactgaaatttataaaatttattaccagcaaacaaatgaaaacttgcacaagaaataagtgacataaagatagaaaaaatattaaatttcagaaacacctaataatttatcttcgtgaaccctagttctcaccatatttttaggtgaatgctagaatgcagcaaaattacacatgctctcaatacagaaagtgggtttcacaaaccacactaggcatgctcagctctgtcctggagttgggttagggagtaatatagggccagtggatgaggagcacaggcctagatactggggctcactaacctcaggtatgagctcttagatacatacaaagcccctccacgcatgggtttacttccccatctgtaaattgagaaaccattgacccctaaaaatatgatttacacaaatatgtaaaaatgtaagagagtgattagtgcaaagtgtttatcacagcacaatttcataacaagacagcaagttttccaaacagcatcattgtcattagattcctgcagggcatcattaccttatctgggccctgccctctgttcaggcatcccaccccagagcttgctatatagtaggtgacatgcaaatagggccctccctctcctgatgaaaaccagcccagtcctgaccctgcagctctgggagaggagccccagccttgggattcccaagtgttttcattcagtgatcaggactgaacacagaggactcaccatggagtttgggctgagctggattttccttgctgctattttaaaaggtgatttatggagaactagagagattaagtgtgagtggacgtgagtgagagaaacagtggatatgtgtggcagtttctgatcttagtgtctctgtgtttgcaggtgtccagtgtgaggtgcagctggtggagtctgggggaggcttggtaaagcctggggggtcccttagactctcctgtgcagcctctggattcactttcagtaacgcctggatgagctgggtccgccaggctccagggaaggggctggagtgggttggccgtattaaaagcaaaactgatggtgggacaacagactacgctgcacccgtgaaaggcagattcaccatctcaagagatgattcaaaaaacacgctgtatctgcaaatgaacagcctgaaaaccgaggacacagccgtgtattactgtaccacagacacagtgaggggaggtcagtgtgagcccggacacaaacctccctgcaggggcgcgcggggccaccagggggcgctcgtgacccactgagggcgggacaggtcccaggagcaggtgccgggagaggtttcctttctcctcagctggaaaagtcaggtttatcttcgcaggactctggagtcttctaggctgtgatattttgttacttatatttattatgaattttatcattaatacttaaattttagtaattattaacattctacatattattatatttttaagtatatactttcaagaaataaacattcctaattgcataataattattgtaacataattattgtaacatataattatatcctaaatgcataataattattgtaacaatcacattctcattttgtatttgaattttcatatttattttactaagattttaattttaatataaaatatttttctacaattgtctgttttccatttttgtgagataaaattagcatatacaaaaatgcacagattctccaggtacagttagagggtttcaggcaaatgtgcacatacttgtctacagcagctaagtgagggtgaggaacaggtgaggtccatctccccacaaagtgtcctcttagtgcttccagttagttctcacataaggatttttttttatttcaactttataatttagatacagagggttcatgtgtggatttgttacatgggattactgagtgatgctgaggtttggaatacagatttcttcaccccctccctccatggtctagcagtccacagtgtctgttgctcccatatttatgtctatgtgtgctcaatgctgaggtcccacttacaagaatatgtggtgttcagttttattttcctgaattaatttgtttaggattaagaactccagctccatttgttttgctgcaaaggacatgatttcattctttcttatggctgtgtagtattatatattttacatgtaacacattttatatatccactctaccattgatgtgcatctgggctgatctttgtctttgccactgtgaataacacagcaataaacatacacatgcatgtgtctctttggtagaattatttgtttaccttgtagtgtataccctgtaataggatagctggttcatataatatctccattttaagttttttgagaaatctccagtctgctttccaaagtgggtggactaatttatattcccattaacagtgtgtaagtgctttcttttcaccacagccccatcagtatccattggtttttgactttttagtgataaaaatttgagtggtgtgaggctgcacacctacaaccatatgatctttgataaggctgacaaaaaaacaagaaatgagaaaggaattccctgttccataaatggtgctgggacaactagctggccacacgacaaagattgaaactggatgtctgctttcaacatatataaaaattaactcaaaattgataaaagatttaaatgtaagacatcaaactataacaatccttgaagacaacgtgaaaatactcttctcgacaccagctttgacaaatactttttggctaagtatgcaaaagcaattgcaacaaaaacaaaaatagataaggagagactaatttgctaaagagttactacacagcaaaccaaccagctaatcaaccaaacaaacaaataaacaaacaaaactatcagcatagtaagcagacaacctacagaatgtgggaagttattcacaaatattgcatccaacaatgccctaatatccagaattgtattagctggttttcatgctgctaataaagacatacccgatattaggaaatttatcaaaaaagaagaagaagaggtttgatccacagttccacaaggctggagaggcctcacagtcatggtggaatgtgaaaggcacgtctcatatggcagcagacaagaaaagagaacttgtgcaggaaaatccccctttataaaactatcagattttatgagacattcactctcaagagaatagcatgggaaagacccacccccatgatttaattatctcacagggggtttattccacaacattaggaaattactgaagctccaattaagatgagaattgggtggggacacagtcaaatcatatcattctgcccctggctcctcctaaatctcatgtactcacatttcaaaatggatcctgccttcccaacagtcccaaattcttatttcagcattaactgaaatgtccgcattccaaggcctcatctgagacaaagcaagtcccttctgcctatgagcctgtaaaatcaaaagtaagttaattacttcctagacacaatgggagtacaggtattgggtaaatagagcaattccaaatgggagaagttggccaaaacacagaggctaaaggccccgtacaagtccaaaatccagtgggacagttaaatcttaaagctcaaaaaagatctattttgactccatgtctcacatccaggtcatgctgatgtaagtgttgggttcccatggtcttgggcagctatgtgcctctggctttgcagggtacagtctttcacccagctgttttcaccggcttgctctgagtgtccatggcttttctaggtgcatggtgcaagctgttggtggatctactattctggggtctgaataactgcggccttctaatcatagcttcactaggcaatgcaccagtggggactctgtgtgaaagcacccaccccacattttctttcctcgctgcccctaacagaggttcccatgtgggcccctccctgcagccaccttctgcctggacatccaggcatttacatacatcctccgaaatctgggcagaggttattaaacctcaattcttgacttctgtgcacttgcaggctcaacacaaaatggaagatgctaaggctcggggctttcaccccctgaagccacagcctgagttatatgtaccttggccccttttaatcatggctggagcagctctgatgcaaggaagcaagtccctagactgcacacagcagagggaccctgagcccagcccatgaaacaattttttcctcctaggtctctggcttatgatgggagaaccttccacaaaggtctctgacatgccctggaacattttctgcattgtcttggtgaccaacatttgggtcctcgttacttatgtaaatttacgcagctggtttgaatttatcctaaccaaatgggattttattttctattgcattgtcgggctgcaaattttctgaacttttatgttctacctcctttttaaaactgagtgtgtttaacagcacccaagtcacaccttgaatactttgttgcttagaattttttactgccagatacctggtatcatctctctcaagctcaaagttccacaaatctctaaggcagaggcaaaatgccaccagtctctttgctaaagcctaactagagtcacctttgctccagttcccaacaagttccttgtctccatctgaggccacctcagcctggattttattgttgacatcattatcggcattttggccaaagccattcaacaaatctctagagagtttcaaactttcacacattttttgtgtcttcctcttagccctccaaactgtttcatcctcagcgtgttttccaattccaaatttgcttttatgcttttgggtatcttatcagaagcacttcactcaactgataccaatttaccgtattagttgcttttcatgctgctgataaagacatacctgagactgggcatttacaagagaaagaggttgaatagactcacacttccacgttgctggggaggcctcgaaatcatggcagaacatgaaaggcacatatcacatggtggcatacaagagaagagaggacatgcagggaaactcccctttataaaatcatcagcaagacaggagaactcatgcagggaaactcccctttatcaaatcatcagatctcatgagactaattcactatcatgagaatagcatgggaaagacccccccccaccatgattcaattatctcccacggggtccctcccacaacacatggtaattatgggagcagcaattcatgataagatttgtgtggggacacaatcaaaccatatcaagaatgtataggaaacttaaacaaatcaagaatcaaaagacaaataaccccattaataaatgggcaaataacaagaacagacacttctgaaaagaagacttacaggtggccagcaatattttaaaagattctcatcatcactaaccatcagaaaaatgcaaatagaaaaatgttctaatttttgtcattatagattgattttttctgttttgaacttatttttgctattttttaggtttatttatgtaatttcatgtctcaaggttttgtcattgtatatatacatatgtatgtactaatacacatatgaatatttcatatctgaatcaatccataacatcagtaaatgacagtttattaagtaaataaatcagtttattatgtgaaataatgacgatatgtatatttgttttcctgttgatgaaatttaaatttgtttccaacataaatattataagcaaactgttataactatttttgtgcaagtttttctgtttatattctcacatattgataaaatatgtagaaatataagtatgcttttttattataagacttacattttcagctttatggagctaaagttgacaaataaaattgtatgtatttaaggtacaccacttgacgtattgatatacatgggaaaatgctggatggtagataagtaaacaatgctaaacagcactaattatcagggagatgcaaattaaaactgcagtgatatttcttaaaccagtcagaacagctactattaaagagccaaaaataacaggtattggtgaggattgaaggcaaaaggaacgcttggacacttgtggtgaggatgtagattagcacagcctcgatggaaaacagtatggagatttttcaaagaagtaaaagtagaactactttgattcgataaccacaaataactacctaaaggaaaaataaatcattatatcagaatgataagcagacttttgttttcctgcagaactattcataatagcacagtcatcaaacttaggaattaacctatgcctaacaacagatagttttataaagaaaatgttacatatatatacatttaaatactatccagccatattaagggatgcaatcatatcttttgcagctacatggatggaattcatcattattttaagtataataattgagaaacagaacatcatacaccacatgttctcacttataaatgagagtgaactcatatgtgcacaaggacatagagaaaggaatgatggacattggagactcagaaagatgggagagcaaaaggtgggagaatggtgagaaattacttaatgggtatgatgtacattatttggatcatggatatgttaaagccaagactactatgcaatatatatatgtaacaaaattgcagtcactccccataaatttatacatataaaataaaaacaaatacaattaaaatgattaacagttgataaacaatactgaaaattaaaatttgtgatcaataaatgaaaataatattagttgaacttcaaattttaaaacattttctactcaagtgactatcaagaaaattaaggacaagctgcaaaggaaaaaatatttgcaagtcatatatctaccaatgtaattataacaagaaccggcaaacctcaaagatgtacagatgacacatcagcataggaatgtgattttccaccagagaaatgcaaatcaagaccaaaaggagacactactatagactttctagaaagacaaaaaataaaaaagaaatactgacaatatcagagttggtgaggaagtcagtcaccctagagactaatatattgctagtgggaatgcaaaatgaaaccgtttctgggaaaatcatttacagtttcccataaaattaaacatgtccttaatccatgacctagaactctcactcctaagtatgtcctacaaaggattaaaatcatatgttcacacacgtattcagatgtttaacattgtgtgtgtgtgtgtgtgtgtgtgtgtggtgtgtgtgtgtgtgttagaaactaaaaacaacatggacgtctttgaaaatttgacacaaaccattacaggtgaactccagactttcttctgagtgacagaaggcctgcctgaaagatccccagagacacagtcgtggatttcactgtcaccctcgcatgtcactggcttgggctgggctctctctggctcttccctgaccaggaccagatgttgagctccactacctgcagttggaagtttatattttcaacaatgcactgaggtctaagttgctctgcagatggaaccaaacaaacatgggcgcctttgaacaaacagtgcctgacatttgtactgaccccaggagaactcttcccagctctcattcttcttggttctctcctgcaggccagcagccctgaagtttagcctggatctcccatgcatccacccatctccttccaagtgcattttaccacagcctccactgtttttgaagcactcttgggctttgtaattctccacactctgttgtaaaggaagtcaggtccttcaagaccagattcgggactctattttatgaccaaatttcagcctcacccctgctcctgagagagagctcctagataagattctgcaggtggagattaggagtgtttttcttcttcaatgtagttgctgagcgctcagtgcagggttggggagaaactttccactttgtcagcatgcagctcctgctggggtagaccttcttccatagaagcagggttgggaaccagggggccaatgtcctcagtgctgctgcacccagggcagagccttcatccatcagtggggctgtggaagaagtgagtctctggttctcagtagctcttgtccagaactgagcctctgcagcatgttctgtcggccccagtgtcctggcccctaaggagcagcatcctaaaatgggagctagcatatttgagaataacaacacctacacattcagaagctctttggctttctttccagctaatataatttccttttttttgtgtagcaacctgtacacacgcatattgatgcatacagacctatgacacttttttctcgataagtaaaaaattattgatcactgtgatcttttctccaagttcaccatttccctgaaggtgagcacaggtccttctgcatgtgttcaaacaaaaggcccagagactacctggtaagtgaggtgctcacctggttctggatgtttggtctgtctcctcccctctgttgccccacacaaggtcagcccactctttccaggtccgaagaagagagcacaggtttgtcctgattatatgactcacccagcttctgatgactctcctgttgccagcgtccatggcctcagtgaaggtctcctgcaaagctctggatacaccttcgccagctacgacattcactgtgtgtgacaggcccctggataagggtttgaatggatggtagggagctactctggcaatggtaacacaggctatgcacagaagtttcagggcagagtcaccatgaccagggacacgtccacgagcacagcctacatggagctgagcagtcagagatctgaggacatagatgtgtactactgtgcgagacacacagtgtgaaaacccacatcctgagagagtcagaaatcctgagggaggtggcagcagtgctaggcttgagagatgacagggattttatttgctttaaaggctttttttagaaagcgaggttaattcattacagaaaaaaggaaaatagaaatgtgtatggactctaattatgtgggaaattttccatacaacttttgttctctaagcaaaattcagggagtggaaaacaaatcaaattaataaacctgataaaagaattcctctgaaaatttagtgtgagcataagtttttgaatgggtgttgtaaatattttggaacacagctgctagatcacattttaactctacacttatctccattatataaaatatcaaaatgttttaatgttttccattttgtgcaattataattttgtgttataatcacattttaacactttaactctacacttatctccattatataaaatatcaaaatgttttaatgttttccatttcgtgcaattataattttgtgttcatgccagcaatgcatgatagatcttgttcttccgcatcctcattgccatttggcactaagagtattgtgtattttaatattctaatagattagtagtgatagctcattgctgtttaaatgcacatatttctaattaaaattttgtatttaattattttatataattgtgatgaagtgtctcgtatggtatttggattattttttattgcattgtttctttttgatcagttgtaagtttccttatatacccattatataagtcactcacaaagttaacaaaaaattgattaacaaatatgtgttttacaagtgtattctccaaattgttgttgtcgttttactcccatatcagtgtctgtgggagaaaaatatttatatacatatatatgtgtgtgtgcatatatatatatatatatatatagtgtgtgtgtgtgtaaacttagataaaataattatttcataaatcatacttttggcatcatatctaaaaactaattatgaattccactaacaggatttttctcttgtctccaatctcaggccacaatcacagcataagcatttaaatttctcctatttgatgagaagattattaacttaagatgtttagaattcttctgaatggaaggtgccttttttctaattttctgtattcaataatctgttaatatcagtattggctcatgaatgtttattttttactatggagaagatctagtgctacattatttattttatcgctcaaatcaccacagcttttttttaggttctgtgagctcatttagtttggattctgtatttttacagcatgccccatccttttgtttttgatcacttccctatttcctggtattacaagaaatactaagctcattatctctattatcttttccacacatagaatcagttatttctccaaggattactggtccctgatattaaagaattatattaaaacacaaaattatgatgttggatgtgtgtgttgttaatgtactgtcagtgtttctagaatctctaagctaacaggcctagaaaatgtgtatgtgtatattaacccatgttaactgacccatctaatctatttatgtatccaatcttctgtatgtttattgcatcaaactttagaacactggtatctacaatctactatgatgatacatgaatgtttcaagccttccttccttgcctgtccataccacctactgcaaagtgaggaacccctcccatcatttgccgttcattcaatttgttgtacaattttagaatatatgcgtcgtggtattagaattgttaacttgtacccctgttggaagtatgtttattgactagaataaagtgtttaagtgcagtttctttatactttagacttacagaacaccctgagttctaagttatataggtgagaaactttatgtgccaccttcttcagtgaggttatttgaaatatgttgtatacattttatttgacattctgtaaaagacaaaactgtagatgtcataaatatatgaggattttctagaaatttagagagagggtatgcattaggagaaacaggtactgtttgcaaacagtgaaattttttatgatctgcagtagtgaacacatgacacaatttgttaattctcacaattttatgatgtaaactgtgaatctaaatatatacaacttacaaaattatgtagcacatcatgaacatgcaaagtgtacaaaaataaaatatcaaatacatttacaccgcgtgggcagggaattgcatgagatgcaggcaacaaagaatgaagtaaccttccccatttgcacataagatgtttccattcacaagagacctttcttttatcaggttcatgtgcaaccaagtttccctgctgacaagcatttaagccagatgattcgcaacttcctttgactgagaaagatttccctcaaacttcagctcagtgcaggcacacaccatctctgaatgggcatttaccatcagacaatgcccacacctgtccccacatggacctttccctcagacaaacaaacacatcctcaggttgactcttccctcagacaagcacccctgtcttcatgtgaactcttccctcagataagcacacatgtccccacattgactttttcctcagacaagcacatatagctgacaacgaacagttatgtggcaaaatgagctcaggatagtggtaattatggactccagctctgatagtttgtagaaattgtcatttttaaaattctgactgaagactttcctttattgtagaagacagtcctttacagctctaattgcacagcctacagacaggagtccatttcctctgggcaaggtttatttttatttgtttactgtacttatttgttgataaatattgatactacaaagatagcctatagggtccacatacgagaaaaaaagagtaatgggcagatcaaccctgcaaatccagtcccaggagtctttgaccctgccctccctggaatccagagacagagatgggaagaggcctgctgagcagtgcactcatgtccccagggagaaagacatggaaatgaggcccctcctctgcaaatgaaaagtagctcatcccctgttcctgtagatcctggtgaggagccatcccacatctgtgcccttcctcagtgtccacaccatggggtctgtgcagatctgggctgctcttgtcatcactctcaatgttcaggttccccgtggatcaggccctgctgtggctgttgcctctgtgttttcagaagtcccctgtgaagttaactaatggagttagacagagaaatactacagaccaggaattctgccttttctgcaaagcctctggattcactttcactgaaaacagcataagcttgatccagcaggcttcatgacaggggtgggtgtgggtaataacaataattcaaatagaagttctcagtgggactctccttgagtaaaaagatgattaacaatcctcaaatacactcagttcaggagattctcttttaagatgattaacctgagagctcaggaaaagtccgtgtattactttgagggacacagtgaggggacatctgtgtgaactcagacaccaacctccctgcagggagacaggaggggactgcctggtagatgcttctcagaaccaccagggggtgctcaggacatcagggggcactcagaaccatcaggggatgctcaggacaccagagggcactcaggacactggggggggggtgtcactcagaaccaccagggggcactcaggacactggggggggggggtcactcagaaccaccagggggcgctcaggacactgcggggggggggggggggtcactcaaaaccaccagggggcgctcaggacactatgagggggggtggtcactcaaaaccaccagggggcgctccggacacggtggtgaggggtagctcaggatagcaggggtgctcagaaccaccagggggcgctcaggacactggggggggggggtcactcagaaccaccaggggacactcaggacactggtggcggggggggggggggtggtcactcagaaccaccagggggcactcgagacaccagggagccctcaggacactagggggagctcagaaacaccaaagggcaatcaagacaccagggggatctcagaaccaccaggaggtgctcaggacaccaggggtctctgaaccactagggggagattaggaccccagggggctcagaaccactagggggttttcaggagaccagggggcgctcaggacaccagggggcgatagggacaccaggtggttcagaaccactagagtgtgctgagaaccaccaggggtgctcagaaccccagggggctgctaaggacaatagggagtgctgagaaccaccagtgggcgctcaggacaccagggggatctcagaatcaccaggctgtgctcaggacaccggggggtgctcaggacctccaggagcgcacacgacacaaaggatagctcaggacctacagggggcgatcagaacgccagggtgcgttgaggacaacaaggggctcacaggacacaacgacgtgcttagtaaaccgggggacactcacaaccaccgggggtactcaggacaccagggggtgcccaggaaaccagggagcactgaggacaccactgctcccttaggaggcagctccacatcaggtccctgagtgggagcagggaggagggttcctcttgtatcttgccactaacatgttgggagtttttctgcttcctttgtggtttcaattattggctgattcttcggtacaaagcagagcaagtataaagctctgctttcttggattatgtaatgtttttggctttggatgctaccagaattacattgtactttgagaggattcattcatggtgtgtgcaatagtgaatgaaacctgtaattttaggggtggctttgaaagctatgttaggtgtggctgagggcagtttacaggaaatggtcatcactatagaaggctactcatttctttgcacatttgcgtaagcaattgtagtttatgaattaaaaactgcctgttttcttggtcctttttcttaaatggtcccactctaagggcagtaatgtaatcaagctgtgtttcaaagatctgcaatcaagttaagtctgtttaatgaaatgctttgtaaagaaaatgtacatctattttttagagtcacctttacattttacattgctttacaaatattaatttggtaaatttagtctcataattatcttcagtaattaaaaatcttaaagtcatgtcatgttaaattaagtaatcctaggcttctcactgtgaattagggttactaaaaattagaatagtaagagagtataatcaatttatggtgaagtttattaagaaagatgaagatatgttttttgcttaaaaatattttgttttccagtttacagggcctttctactggttttaagatgacaaccactgtttacatctgacccttttttgttgaacatctgttgagtttctattgatattccacagctagagttttaaagtaaaagctctagtatctttgtattagtgtgaatgtgtgcttgtatgtattatgtacatatatatatattttttgttatgtgttatggctacaaggtacaaaattgactttaaaataaataactattttaaattaagtcaatgagccctaatgcatctgaagtacatgtaacttaaataaatatgtaataaataagctggcttcaaaattattggtaaaataaaattggaaatattttaacaattattagaatacctcatagtttatatcaattgatcaagtgattttatatttaaaatcacagctagatattatatggtgtgaaacatttctatgaagattataaaattattaacctagttaaaaccagaatgatctttgtaatttgacaaataagatgtttaatactgttgttttaataaaaaacaggtaaatagttattggaaatacaatcatttatttaataagaattttacttaggtaaacacctgaaattcatgggttataatatgggtaacagggaaaaaactttaaaggatgagtattactgttttcataaatgatctaggtaagctatttaaaaaataaattaggttaatgtaacaaaataaaccttttaaataaacttgttctacaatttaaaaatctaaagtttaattaaataatagatattaactaaatgtttaggtcattactaattgttttaaaaaatgtatactataagaaaatatttttgtaaaaaatttgttcttacagaaagattttatttaattcagaggttacttataaaacatcctaaacataaccagtaaataagagagatgccactgcactccagcctgggtgacagagcaagattctgtctcaaaaaaaaaaaaagaaaagaaatttttagacatagaggagtacttttggtatgaaaggttaaaataaaaaaaaataattttatatgagaaagaatcttgtaactttttatcctaaaataaaaatgactttatttaagaaacagtgatgtttagaataaaactatatgctcaagtatgccataagcgttttgtgtaagtcaaactaaggtttgtaaaaagttaattaattaaaataacttcatattatgaagttgactataattaaaaaggaagtatttataatagtctttatagatttgtagagatctggctttcatataaaaatatataaatatactaaagattggttaggaatgaaaaattgtgcttaaagtattgatttactcaataaaattataagatattttaattttttaacccaaaagtttaactcttactgcatcttgccagttttattttattctcttttgagaaggcttgagaggatctcaaatttttcatgagctcctctaacattttttttcttacagcagttagcctctaacgatgttaacttctaactgttgttagcttctaactgctattattgcctgatgctaaaaatcttttatattaaagttcttaataaaatgttttatttcaatatagtattctgcactcttgggtttttttaaatgtctatatttgtctatggaaccaaaatcttcacttgtaatccaagacacattcttcctatgtctaattaatcaaatactttgtttcattagagttgacttgcaggttatctgcatggatttccccacagggaaacacagtcacactgctgaaggtgttttttcccatttggtaactggcataaaacaaattttatattttcttgaaatacttcctctgtagctgtttttaagtttttcaactacttaggaatactgagattttgagaaaatataaattattgttattacgttaatgtaactatctggcataacttttaaaggacttgtcctgctacattactgatctttgattcctaggtctaaaaaggatacacaacactttgggaggcttcagagggtggatctcctgagggcaggagttagagacgaacctggccaaaaaggcacaatctcattttaataaaaaatacaaaaattagctgggcgtggtggcgggcgcaggtaatcccaactacttgggagcctgaggcagggagaattgcttgaacctgggaggcagaggttacagtaagccgagattacaccactgcactccagcctgggtgagactctgtctcaggaaaaacaaataaatacaataaaaataaaaaagacaccgagtcttgctaaattttaaactctgacagcaattgaagccccatctagagatgtggaagaaaatgacaataaaaattaatcacacacttaagacacaaggccggaaaattgaatctactcaaccactccaggcccagggactgttacagaagaagcggtttgtaagattgtaaaagctaattttgaaagatgaaattacttgagagtttctttatacagtaaacattaatattaaaggcacactaatgccaggctagtagctgggccatgtgtcagattgacaagggtttcttgaagaattaatccactttttaatttgaaaaacttataaaagtttataagagatcatttgaaattaaattttatggtaaaagtaattataatgtaatagatttatttttcagaattgagagacagttttaacttctctcatgctgttcttataaggggctattgtttagaaaattaattcttctctttgaaaaataaaagtttttgctttctttcaaaatcactgagttctcactgggctaaataaataacttacattacagcaatctgtaatcctattttgtaatatcaagcattgtaaacttttgatatttgacaaacttcacaaaataaaattctaaattcagtcatttgacctcattattcttttatgatattaggtccccaaagccaaaattaaacatattcagcttatttggtataattaaaatatgcaggaagcaatgtcaaatttgcaaaagtgtttaactttggactatatttaaataaatgtggactatataattggactatatttatataaattaaagagtatattttccaaaattgtatgagattcaagtgatttgatatgtcttagtatattttatcagtagtatttatgattattatgtaaaatttctgtttattgccagaaataagcaaatcttctcctcaattctgtctttaaccatggctattctaaaacttcagtcatccacagttggtgttttactttgattctttatcaggtggcttatagtaatctatagaattttgaggagtactcaaatatacgattgtgacaattttataaattgtgccattggtatagagattaaaacttccatgactctcattgatacctgattcatttatgatgattgttaatctaatattaagcaggacaggacttaattgcatgaactgaattgacagaagactgaaattgtttttatggcttattctttaatgcatttgctaattacttatgttctgttttttcagaatcaggaaaagtttgtcttttaagctcttcacagttgttaacaattgagtatggtatactttactgataaaaaaataaaaacataatatcttcttatttacataatttctccaaaatttggaaactgtgagtattcttatatcaaaatagttatttgcataggttcaataaaaacctgctttcttccataacagggcacaattggagacaatggtcattttactaaggctttaacttgaattatatattttcagatttactttataaaatgaatctaacctggagagctgataaagccccttgggaaaactggcatgcacatttttttttttttacagggccccgaactgtagtaagtaaacaatttaatttctgacagacccaggactcccaggttttcttggaaacttgaaaaaagagaaagtaacccaattcacatagctatctggtggcacagataaaatattggctgggcttgaagattttaaagattctaccctttgattccttataaaaaatttccagcaaagtcaatttatggaataaaattggcctatgtacaaacaaaaaatagaaaacaaaaagagagctaatatgttaaagggttactttggctggcatcttatacaaaaaaaccagggccaagtctcataagcctaaaactgattttacaaatagattagtcctactatgattttgtgtctaataaaattggggaattatagagagaaatattatttcaaaataaactatagtgcatcagttaatagattttaaccttgtccacttgcttttcaatttatattattttctacaatttggactgaattttaaagcgtatctttgcacgagtctccaaaataatgttttcagttatttccctttttaaatatttttcctggcttgaaatcagcagaagttaaactgtgctttcttacagctagacaatgtaaattctaaaagaaaacaaaatcaatgatatggtttggctccgtgtccctacccaaatctcaccttgtattgtaataattcacacattgcaagggtggaatgaggtggagataattgaatcataggggctgttttcttcatgcttttctcctgttagtgagtgagttctcacaagatttgataattttatgaggggcttccctcttcacttaacacttctctctcctgcagtcatgtgaaatagcatgtgtttgctacccctttcatcatgattgtaagttttttgtggcctccccagccatgcagaactgtgagtcaattaaacctatttttctttaaaaattacccagcctcgtgtatgtccttatagcaacctgaaaatggactgatacaagcaacttaactacatacgaagtctccttttgtacctgcctattgtgaagagaaaataaatcttgagaccccaaaatcactaagctaaagagaagagtccagctggtgtaataggagatagaaagaaattatttaggtagatagttaggatgaaagagtctctggcaaaacttttcttctcacaagaattagctcagaaataacttcttttctaatcagacacagttcaaagagatcacttctaacaaagagcagcctgaaagatcgggctgtaaaacatagataaacaactctggcagagagggtatttctgtgtgtaatcaccaaagttcacatacataggatgggtcccaataaaaacattgggtcttaatgagcacattcctttccttttctggggtcacactgagataggaaagctgttagcttgcacggggtttgggatgcctccagctgcaaggaggtaccagggacctggcatggaaactcctcccccctttttcagcacatgcatggtggaaggagataaggaacgtggagcagaccaagctaagtccccacctgcataataaaagcatgagatggggctgccagagacttcgctctctgcagatggcacacctggtcctgcttttgcaccttatgttgataagaagccatctccccacgagcacatttataaaaatccttacgttgataagatactgtctccccacgagcacatttataaaaatccttacattttactgcggcacagcaacccatctgggaccctttctgtgacagagagattttttttccttttacacattaaatttctgctctaacctcactctttgtgtgtctgtgtccttgattttcatagccacgacacaaagaacctttggtgatattccagataacaaaggtgctttactggagagggctttgggcaacctgcctcccattctattcaaagtgattcctctgaggcccacacgagacagatacatatctgattgcttcctcttcagtatcatttatgaaaaaatgaagattcactaagtctgactaaattgtggattcagtggtaggctgataaaggacttaaaataatgcaacctactgtgtcttatctacttctaaactgcaaaaccccctttcaatttgtcctgtcttgaaggaaaaaaaatgtacattttacatatattgattgatgtctcatgtctctctaaaatgtataaaatcaagctgtacttcaatcgccttgggcacatgtctcaggacttcctgaggctggtcatgggtgggttcttaactttggcaaaataaatgtattagtctgttctcctgctactaataaaaacataaccaagcctgggtaatttataaagcaatgaggtttaatggacttatagttccacatggctgggaatgcttcaaaatcatgtcaggaaagcaagggacatcttacatggtggcagacaagagagagcttgcacaggggaactccccttgataaaaccatcagatctaatgggacttattcactatcatgagaacagcatgggaaagtgctgacttactgcaggagaactacataattttatattttcctatatgcttctttttcattacacatgtaaattttcataccatccaaatttccccttacccagcttttcctctttatatattgaaagccctaaaaattgtctttggggaatggcactaaccacacacagtttctgtgattacttttatttttcttccaggcatgtcctggaaagacataatttcctttgggaaaattaattttaatttgattaagatctgtctcagaaaccttcggtttacactaggaaagatcccaaattaggagccaattactgtaaaaatcagccataccactctgtgagtgtgtgtgtgtgtggcggggggtgtatatgtgtgtgtacatgcatgttttcatttctgtgggctttaagccatgtagttctctctgcgaagatactatttggcatgacctttgaatagagaattgtaagagaaataagaggctcctatgaattatccgaaagtttctggactcaccatgtatcttgactgtgtcattgcatctgacagtcccagggaagtgactctctggtggtttcatgaatctgtgcttgggctctctctgcagtttactgggtatagtaatgacaaatcactgtttcaagagacaatttcgaaagcattagatgctgctgagagaggattatgaaccaggggacagccccttcattctgggggagcgacattgggagaatatgctctgtgagcccaaacagcttcctcccctgcagggtgagggcagagctgcaggacaggcccagaacccactcaacacagatgtcagccctggagctgctgcagaggagtctgaggagaaaattttaccagcacctgaattacacttatttcaaacaaaaatgcatgtcctgtgagtgtttgtttccctattggaggagttctgtactcatgaagttctggacatgccagcggacaaatatcagtaaacaaacatcagaacttgaacctcagcttcccactgttgcattctccatgtgtcatctctattatttctcatgctagatcaggtatttagctatgaaatattccagctaattaacgtgtaaatagcttgaagtctactgagttaaatacatatattttctcttgtttttgccaggtgttccctcccacacctccaatagtctccactattatcatcatcttctagatcttctgcgatgccctggagattaaggatttgattccatgacagagaggaggtgcatttcgatggaactttggtgaaaaccttggtctttatcccatttcctctggggctccaccagtgcctctggaatcatggtttcagtggcttgcccctgcatggtaggtcattcctttattctgtagtgctgatgagggaggtgggtctgaacgcatttcagtagtatgggctctccttctgtctcagacactttgggaaaggaaaatttttctgagcgtcctcattctagaacaaagggattcaattgtataggaatgctgaaaatagaaaaccttcagccaaattaaggttaataagattaattgagcaatggatgattcatgaattgggcagcccccagaatcacagcagattcaaagagacttcagtgcagtcacggggtggaagaagatttatagattagaaaaatgatgtacagaaatcagaagtgaggtacagaaacagctggattggttacaggttgcttttgtcttatttaaacaaggtgtgcaccctcaagagtgtacgagtggttgaggtatggctgctggaattggccaagactccgctgttgttacaggcgcatgctccgaagttggcttttcaatctcgtccacctattcaggtaggttacagtttgtccacaaggactcaaacacagaagtacggagtccttttcaggccatatttaattcactttatcagtgcccttcagtatgtggttcctgagaatttcacatgacaacacgtttaccacactggaatttaagcaatccaacacgtttgtagctttgtcttgtaatgggctatatttcatgtggcagcctcggcctcagtttagctaacactatggcttcatttctctctacaagaactcatttcttccaagatttccatgttcctgaaaggaaaataaacctttgggacccccatatcactaagccaaagggaagtcaagctgaaaattgtttggggcaaacccacctccattctttccctaaaatgagagctactaaggtttttaaaagctacagacctccttcaaaatttgaccacaagtaaaatccttgtggacccaggacagagagagtcatttctctgctcatgtaagtcaaacgcatacctgattgctccctgtgctctactgtttcactaaatcagactaaggcctacgtgactattcctgtaaattgtgcattcagttaaaggctaatcagaaactcaaataatgcaaccatttctctcaaacctacctatgatctagaagccctctccccacttcaagttgtcctgcctttctgaactaaatcaatgtacatctgatatatatatattgattaatgtctcatgtctccctaaattgtataaaaccaagctgtgcccacaagcttgggcacatgtcgtcagcactccctgaggctgtgtcacaggcatgtccttaatcttggaaattgaacttcctaaatctattgagattagtctcagatactctttggtttacaggtttgtttttatttcataacttcaattatttgacatgctaaagaaaatttgccaaatagcgcattctcttgtttatgtgttattgttgttgcaaaaataatatattttatatataatttatcatctatgtacattaccaaattgagtagcagatttattagtaagacccaaagtaatgaaaagttcagataccaattagcaacttagaaaaacaaattatgctacatttgtttgctgaaatgctacctattatttataaaaaataaacaatacaacataaaaggtttaattctcagtatttctattgagaaaaataagccaaatagatgagtacatactatattatttcattcttataaattctagagaataaaaactagtctaaagaaatatgaaaacatcagtacttttataaagaaatggtagaagaaaaggagaaaaacaaaaatatatctataaaagagcaagaggaattctgaggtgagttgacttgtcaccttcttgaaaatagagactttctttatcaaaatttactattgtacaggttaaatatgtgaattttatcatctgtcaattaaaactcataaaatttattacaagtaaacaagtgaaattttagacaaaaaagggatgataagaaggaacaaataaatacattaaatgtcagatacaccaaaaatgtatctgcctgacgcctagttgtctctgtatttttaggtaaatgcagcaaaatcacacaggttgtcgtggcaggaagtggattctgcaaaccacactaggccgtttatctctgtcctgtagttggttcagagcaactgaggccagctgtgaggcgcataggcccaggtactaggactcactcatgccagatataagccctgagacacgtacatagcccctccatgtgtgggttcacttttacatctgtacatgaagaaaccactgactcctaaataacatcatctatacacataggtaaaaaaattaaaaatatgatagttgttaaatgtttatcgcagaacaatttcaaaataaggcagcattttcccaaatacaatcattgtcatcaaaatcccccaggacgctctcatctactctgcgccctgccttcacctcagatgtcccaccccagagcttgctatatagtaacagacatgcaaatagttgactccctctcctgatgaaaaccagcccagccctgaccctgcagctctgggagtggagccccagccttgggattcccaagtgtttgtattcagtgatcaggactgaacacacaggactcaccatggagttggggctgagctgggttttccttgttgctatattagaaggtgattcatggagaactagagatattgagtgtgaatgggcatgaatgagagaaacagtgggtatgtgtggcaatttctgacttttgtgtctctgtgtttgcaggtgtccagtgtgaggtgcagctggtggagtctgggggaggcttggtacagcctggggggtccctgagactctcctgtgcagcctctggattcaccttcagtagctacgacatgcactgggtccgccaagctacaggaaaaggtctggagtgggtctcagctattggtactgctggtgacacatactatccaggctccgtgaagggccgattcaccatctccagagaaaatgccaagaactccttgtatcttcaaatgaacagcctgagagccggggacacggctgtgtattactgtgcaagagacacagtgaggggaagtcagtatgagcccagacacaaacctccctgcagaatgcctgggggaaatcagctgcagggggcgcacaggacccactgatcagagtcatccccagaggcaggtgcagatggaggctggtttcctgtcaggatgtgggacttcatctttttagagtttctctagggaacctctctaagttcagaattctgtgcttaccaatgccatccctacatatttttaaaatgattattttaatatgaaaacctattctcttatgcacgaaacacagactgatgcttacagagatgaaaagccctcaaccattgtcaccaggatcagagtattgaggaaactcaggggtacctggtgggtcttctccactcagactcaggacagaaacctcagtgagattccctgactaggacggtctttaggaattgtgatcgcagccaatagagagtctgggcaaggatcagtgtcatgtagaacttcacaggtttcacttctgacccttctcctgacactaaagtatacaacttagtatcagcactgatctggggccccttttgctcttagcccattctatttctttttatttgttgttgttgttcttgcttttccttgtagtgttcctgctccctgtaaagtggggatgtggctcttgctgccaaagctccaggtctcaagcccattccctgcagctcaggtggggctcaggctgtggctcctgcagccacgtggaagaggctgatgggactttcctctctcccattgctcagcaccctccagtgtgtcacgtggagactcacctgcgaatggaagtggccaacagtagtgaaggggatgagcttgtgtggacaaaatgggatgtggatgtgaaatttatcctgtgctgtgcaaagtagcacagagtgagtcaccttcctcaccagtagtgttagaaagagggtgtgaaagttgtcagaatcaaaatagatccacttgtgttaaaaccctgacaaatggaactaggaatgaccatgaaggaggtttcccatgcacatactcctgataacaagatcgaccataaatggattctgcttaaccacaacctttgatagaagccaccatgaccttataaaaatcacttctacaaggacatcttcccagcaaatcacggtttaaccctatactgatgccaaccttggtattgactctacaagcaaggaaaatcctctcaaaacaatttatgcaacccacctcattttcactcataaacctatggattgacatcctggagccactgctgcatttgttgttactggtaattagccccttttacaatatttgtgactgtttttctccgatgtctcttggaaaataaataatttacaagctgatggcagtaaagaaactatttaggacatttttaacatcctgttgaatatttctgcatagcacatcggtcccctaaaatacttcgctgtattggcatgtgatgaatcagagtataatgctgaaggtaaaatgggaaatacatgggcttttgatgaatcaagtcatagggtgagaatgtctgtgtccttgaggaaggagaccttgggctgtaagttctagtgggagtacctttggcaaagggatttcatgagtttctgaacgttatgctacttttaatttaagaatgcaacttatcatttatttttacttaaatctttccagaagatatttggcagtaaggacagggtagcattcgtgtgatactgatgacttagagagttattttgtaatttctcctgtaaggtatgcacattgctcacttgatacagaagttcaaatgtcacaggcgggaaaataggaataaagcaaattttattaaatgtcacgactgtagtttttggcaaggaagtgcttcatgtcaacctgaaaatagacagacaacaataaaacatattcaaatccaaagggagtcagacctatgtccctctctcttataagtacaaggctttgccacatccaaaatatcctttaggctccagggtataaaatgcttttggactgtgaagctaacagctctcccctcagacagggataaggcatctggggaatgcagagttgtgttcatgaagaagatggcattactgtgtcttctcctgtgcctggtgatggctcccccagggtgagtgactcggatgtcagatgtgggtctatggggtgagtgtaggtacatgtgactgacggggactgattccccatgtattcacatgccctgtcccaggagcagctgcaggagtcagccctggacctgaagagcacacacttaccctctgcttcacctacaccatttctggccactccatcacaaccagtccttactactggacctggatctgccagctctcagggaggggctgcaatggatacaatgcattgctagtggtggtgggaatccatttgtcttgtggaaaatggcagcatctctttattttataaggcagaataatgttatattgtgtacacataccacattgtctttatccatttgtccatcgacagacacttagtttccatatcttggctgttgtgaatagcgctgcagtaagcacaggagagcaggtatcttcacagggtggtaatttcatcccatttaggtgtatttccataagctggatcgctggtcatatggtatttctgttttaatttatttagaagccaccacactgttttgcataatggtaatgatgggaatgtagaatgtcatagccgctacgaagaacagttttagatttgaggtataatccaaaagcaaataatgtttgatcatggttctcatatgaggctctaataaatctagtggaagtccagaaagttttcccaccttgggcaaggatgagtttgcccctaattgtctttgaggcagaatatttgcagaatgtgagatggagtatgtcggcaggattcaggatgattcagccataaatagtaatggcacagaaaaacagggagttagagacatgcagagaaagaaagagatagagagaatatgaatctcataagaggaaaatctgctggatatcagtgttgggttttcattcatagagacatcagtgtcagcaagaaaccatgaagtcaagtgaggagtggagaacatgttcagtctgaaaatcagcatattctcagaggcacccattgtcccatgacacaggcagagaatttcggaaaccagtgaagtgggagttcacaataagtgatgaagttatcatttttccaaactttcattaatatgcaaagtatttctatagatcactcatgcacatacacacaaaatgtgtttttgcatttatgggtgtctagagaaaaataagtgagaaaatttttccaggttgcagagatctgtttaagttatagattccacaggagagtgtctttgaatgaatactattctattaattaaataggacaaaattccctctgttggagcagccttccaattatgtagatttctttattgcttcttgagttgtgaaacataaacccaaggattgacttactggaattcgagtgctgtgttgataaaatttctgataagttttcttccaatgatttgagaatagctttcctgtttttttactcaaggaaatgaattttcacaaggtttcaggacatcacgtttcaggtgttttacttaaagagactcttcctgggtgcagtcagctttcttctaaccatgagctcacttcttcagcaaaccattcagtttgtgcctctattaagaattatgaagcttttaaacttcaatgcactgaaaatcatgccccttgaattaaatgttgattggcactgacatgaattgtccactcttggatatgtgtcctatgttatgggctcaacatatcagtggactgagaatcctccattagctgcctctgactgtggcactgaccagattgagaatcctcagagtcatccatgaaaaagagagtctttaggttcatggggtttttggagacattcaggtgagtggaggggagaaacaggactgggggtggccagccatttcaacaagactgggaaagattagcatctaagtttaaaggtctacatcattccaaacaccctgcatgacaggctgacaggaagaaatccaaccccacagcggctccatagcatctctttagtatacttggtagtgaagctgtttcagggaagaaacgtccactcaagggagtcagtgatgcttctctgagctacaataaacagtgtattggacccaggtttctctgagttcaatgtgatgattacactcagctgctgctccagtgagtttaaatgagcatgtggcaattcagatgagcctggctgtgtggtatgttatatgtaaatcggaactatgtaaacataaagggcatgtcggaactagtgtgagggtgagagatcttagaggccccacacctcacactcttgtgcttatttgctccaggaacctccaggttctttgagtgaaaatcaacatagatcctttcctggataaatcatccaaatatctaatctctgagaaatacacatgcacatttctccggatagaccatccaggggaaagacatatctagaaccttatctgtgttgggtaaggtagtccatctccattacagaccctcccagcagccttcctttatcatgaaagtggataaaattagccaatagagaaataatcctataatgttatagccagaaaagggaaagcaacagtttcatttctggagactctgcgtataggtcacagcccagagaaagaaaggatgactgaattattaagaatcaattgtaagaacatataatacttccaggatgcacactttgttttctcaccagtataatctgggttaaagatgaaagtgtggaaatgcacagactctatgtgaggaggagaacatagggaaactgaaagacaatggcagagaataagacaaggacagtaggaaaatctgaagcctctgacataaattttttgaagacaaggtcttggcaaatccattgacctcagattcttttatcatggggcatttgcagggttcctagctgagaaaaaaaatgcatgcacttcccaagtctccacttgtattctgtttgcctcagatcgctaagtgaaaaaaagccataaacctaggcctagtgtgtgtgtaggaggcactttttataggctagaaaatagtaagaaaggagaatatgtgttattggaatagcatatacaaaggtgtctttattctgaatttatctgtacctgcagatattctcaggtgcaacattcaactgcaagagcccagcgaagaaactaggcactccccaaatccttcaagtttttgtgttcattgtgtgtccactgactcaggaaatgtgaagcttcagaaaagggggtcccttctgtgtcacagaatcttgtctgtgggtctccctctgtaggtttagtaaggctaatcaattgttaaaagacatggtgtcagcagcctgtggtgtcactgatggagaattctaaaccaggacacagccacttcatgctgggctagagactctgaaggaaaatatttgtgagccccgacagaaacctcattgcaaggcaagagcttctgtggaagggggcacttgggagccaccaagcgcaggttccagccctggagcaggtgcacagctggggaggaggtttcctctcagtgcctgtgttttcgtttgtcaggaaaaaacaatctaaaataactgttcaaaaagtcgctgatgtgctttaaatattctatcacatcaaaaccattcatataacttaaggcactggggaactattttttaaagtgggtttctagaactataatatcttaatagtgagaatatgaaggataggcatgtttttactaattctatgggtacagattagttgaagaaactacattcctatgaataagaaattcagatttcagtgttaagtaatgttgcttacattgtgtgagtgacagggcagtggtggatctgagagtgtggcaggtgcacagaccaagtgagtcagaaatcaatatggaaaggtgagggtctgtggatatgaactgaaagtatgtaaatacttgacgaaatactaataaatggagttcaaaataacccaaaattgttctaaacacaaattccttgacaattactttgggagtagagagttcataatggactccaaactcctgctttatcttctgattcccattgtctgtgagatgagaaaatcagctctaattatgcatcacagggcaaatctgtaaatcaagagtgttcaatagaattgaagaccctgggggatcaggacatgaggcaggtgctggagacagtgtctcaggagcacccagtagatctcagaggtccctcctggacactcatgtgggacgtaagcatcactttctcagagtcaccaatgagctgtgctggtggctgatgggtccaggaaaagaccaaggcacctgctcagtgtgatggagagtgatggttccaaaaatgatccaggtggtctctatgctaatcaaatgtaggctcacagtgaggagcctgttctatatgggcttattcttcagtgaaaggacgtctgtccacaaatgtttgtaaatggagcagggcatgcatttcctcaagcaggattagggcttcgaccgtctgcatctcactcttgttaggctgatgtgtcatttatcttccctttcttatcatggattgggctttgagctaagaaaggctttgtcttatgaatatgcaaatatactgatatccactgaggtaaatatgttctgtgccctgagagaatcacctgagagaatcccctgagagcacatctcctcatgggctggacctgcaagatcctcttcttggtggcagcagccacaggtaagcagttcccaggtccaagtaatgaggaggggattgagtccagtcaagggggctttcatccactcctgtgtcctccccacaggtgcccactcccaggtgcagctggtgcaatctggggctgaggtgaagaagcctggggcctcagtgaaggtctcctgcaaggcttctggatacaccttcacctactgctacttgcactgggtatgacaggcccctggacaagggcttgaatggacaggattttagttatttgagagatttttcatacaacatttattctgtaagcaaatttcagggattgttgaatgaatcatattaacaaatctgacacagaacttcctctgaatcaatctttgtaaacatcaatttctgaatcaatgttgtaaatatttcagaacacaagcacaaattcacattttaactctacttttatctctatttaaaaaatatcaaaaaatctcattttgtgcatgtaacgttttgaatgcccaccatcaatgcatgacatttcttgtttttccacattcatgttaccatttatcatcatgagaattgtgagttttagccatgctgataggtgagtaatggcatctaatttttatttaaatgcacatgtcccaaataaaaaattcgtattaagcaatttttatataatttttgctgggatgcctttcctgatatgtggttcattattatctgcattgttttcttttcattagttgtaagtttacttgcatattgattataaaagtcacttaacaaatccaaagaattgatttaacaaatagatgacttggaagtattttctcccagtctgtggttgtctttttctctcttatcagtgggtatttcaaaaaatatatgtgtgtctgtgtgtctgtgtgtgtgtgtgtgcacagatttagacaaaaaacataaaaaattattcattcatagatcatgtatttggcattatatctgaagtctcattataaaatacactaatagtgattatttattccatgttgctaatctcaggccacaatcaactcatgagtgcttagccttcacctattgattggaggactatccacctgagatatttggaatacttccatgaggagatgtgttcttcttcccatcatttctttatttaatcatctattaacatccgtattggtttatggacatctatttcatactctgaagaagatccatgctacattattcattttcttgttcaaatctccacagctttattaggtgctgggactcatttagtttggatcgtgcatcctaacagcaaagctcatcttttgtttttgaacacttccctgtttcctgatattaggatagattctaagcttgtttctttatcacctttttcatacatagaattagccatttatataaagattgcttgtttctgattttaaagagtagtgttaaaataaaatattgtgataatgggtatgtgtgttgttaatgtggtataagtacttctgggacctctcaaccttctgttctagcaaatgtgcatgtttatatgaatcatgtcatgtccatatatccaatgttgaactatgttgcgaaaagtgatctcaagataatggtaattatcaaccccctccctaacaaggtgtagatctgcatttttttttcattgtaactcaactttgcctcatggtcaggaacagtggtttccagctctaaatgtactgattacagcgagatgtccgttttccctggaaatgtatttttaagttcttactggatgtatatgatgataatgttttctactatgaagatacctgaacagtgtccacactagagagtaagaaagagtaatgggcagattaaccctgtgcatccagacccaggaatcctctgatcctgccctccctgaaacggagacacagaggatggatgagcaatgctgagcggtgcacccaagaccacaaaaagaaagacatggaaatatgtcccctcccctcctcaagaaaggcagctcatcccctgttccctcaggcccgggcgaggagccaccccatgtctcttcccttcctcagtgtccacactgtggggtctgcactgatctgggcttcccttctcatcaccctcgtattagtggcccttgtgaatcaggtccagctgtggctgctgctcatggggctgctctcagtctgatctctctgtgtttgcagaagtcctgtgtgaagtttactgatggagtcagagggagaaagattgtacagcccagcggttcactcagccactcctgcaaagactctggatcaccttcactgattgcagcataagcttggtccagcaggctccaggaccagagttggcgtgggcagcaacagggagaaattcaagaggaagttcttacatgcacccttacgtgcacggtctcactgagatctttacttcctttatcacgtttgttctgtaaatcacaacgaatggtgcattcttcatctattatacacttgttaagtcttttttggcatcttttaaaaaactggtaactttatcctgtgtaatatccctgttaagtcctaaaagtcttttttgatgtctattttttcttaactttacacagctactatagatttattttggttcatatttttgtaatccatgttttctcatctttagtttttacatttgtgaatacgtacagtaattttctaatacatagcttctagttggggcttgctttttaaaatcaactataataagctctatttttaaactaatattatttttctgttacattgtttaaattagcatttcacaatgatgtttatttctctactaacatataatctaattcacttttataaatattatattggttaccataagttttacaataagaattgtatataattagattctataagaattgtatataattggattctaatgcagatactgtgatggccttgatatgaagaacagagacagtgtaactgtgtgctttgaattcctccttctcactgctctttcttgtttattcccagtttgcacttacatatactataaaacataatatataaattttttattcctttcatagttatataatatagcaattacaaagataaaaactgcacttcatcttgattttcccattttgtacagtcttaatttcttcgtatagatttatgttttgaatgtatatcacacggctactagcagagaaagtttgttaaaatgtgcactgaagcatgaatgtgctgacaataaattgtctcaagatctttttgtaatgacagaattttatttgcctttcacttttaatgaaaatgtaatgcacatagaattccagtttgcatttcacttgtaatttattttcttgtgtttattattttgttcatggagatgatcacacattacattctgctgggcctttattaaccacatttctatgaacctagtcagggttggatttcaagtgtatggttgccacggctatcagagttgaagtcagcttctcctgttcacaaaaagttcaggttcctccagtgatacccacttttgtgtcccggtttggctcttcccatttctttctccccagagagagcctgtctctttcatctgtggcaggtgcatcctgctgacacttttacttggtgattgtttgtggggtgaaagggcttggacacagggggatgttctccaaccttctgaccaagcatccttcttagctatgggtggtgagaatggctctgaagcatggtcttccaagcgttcctgttccttcccttccccaagtcagagtgtctctttctagccacagtggtcttccatcagtgtcctcagcttctgacccactgtccttactccacagactcaggatttcattcctcaggaaagagacgggaggtgtttctgggtagagtctccttagtgtcctctgtttccttctgttctagttgattctaccagtgcctgaaggacacaagatttaataaatgtctcccacatatcgtgaagagggattcagcattgaacggagctactgttcttcctccccagtcaacatcacaggacagcaggtggctgagttgtctggggatttctccaattctgtaggaaaagcccgcaagtgccaggagtttcacactctcacagcattagcacacacatcctcaacaactcatgaaacatttccaggttagctttttcctatcttcaataccatacaatgagtggcacctgccccaggtactctaataaatggacctagttttctctgcaggctccccattttctcagatttcaggggtttttttctctgcaacatcaactcagatatgttgaagggttcattttttgtagttcttcaagtttcttgttaatgaggtcagaagaagatcattttctcatttttttttttacattcccgtgcttagtatctgctttctaaataaaattcggaaactaagacaaaatatcaaatatccactatttggtgcattgttaaactatttgagaaatattcatgtactgaaatacaatgaacaattgaaatcaaggcatgcctcagtcacataagaatgtgaggacattatcaaataattgtgctgagtgaaggaagctaaagaattcacagtaaatctcctgtgatttcttttgtataaattgtagaaaatgcaactattctaaattaacatggagaagatctgaatttttctgagaaaagtgtggtgaggtaacaagatggtgaaataaaattacagagaagtgagagaaaaaaatttggaggttaatttaattgctaatagcacgattgaagtgctgattcaaaggctgcacacatataccaacattttccatatcgtacactataaatttgaattcactattgattgaatttttgaataaagcagtaacaaaaatgagtatattggctgaggaagagcaagaaagagatgaatattgacacttgaataatcacggactcctgaaaatacacacatgtgaacactgattgcatatttcaggtaaatactagaaaaagcaaagtcacataaagtcgttatgacaggtgggataccctgcaaatcacactaggcatgtcccacactgccctggagctgtctcaggggagcagtctcctccagtgtttagaggcacaggcacggataatagggctgacgctgtccagatgtgtgatattggacacattgcacaactgctctgttatgtatgtaattcatcttctctaaaaatgtaacattgacacttgcactgaatatattctgcaaatatgtaaacattaaataagatgatgactgctaattgatcatcaagtcacaatcacataatctgaagttatattttcctgagagataggattacctccagtgttttccgggaccctctcatctgctctgggcactgccctctcctccagcgtcccactagagcttgctatatagtaggagacatgcaaatagggccctccctctgctgataaaaaccagccgagcccagaccctgcagctctgggagaagagccccagccccagaattcccaggagtttccattcggtgatcagcactgaacacagaggactcaccatggagtttgggctgagctgggttttccttgttgctattataaaaggtgatttatggagaactagagacattgagtggacgtgagtgagataagcagtgaatatatgtggcagtttctgactaggttgtctctgtgtttgcaggtgtccagtgtcaggtgcagctggtggagtctgggggaggcttggtcaagcctggagggtccctgagactctcctgtgcagcctctggattcaccttcagtgactactacatgagctggatccgccaggctccagggaaggggctggagtgggtttcatacattagtagtagtggtagtaccatatactacgcagactctgtgaagggccgattcaccatctccagggacaacgccaagaactcactgtatctgcaaatgaacagcctgagagccgaggacacggccgtgtattactgtgcgagagacacagtgaggggaagtcagtgtgagcccagacacaaacctccctgcaggggtcccttgggaccaccagggggcgcccgggacactgagcacggggctgtctccagggcaggtgcaggtgctgctgagggctggcttcctgtcgcggtctggggcggcctcgtcgtcaaatttccccaggaacttctccagatttacaattctgtactaacatttgatgtctctaagtggaaaacgtttttgtcctttttgtttctttgtttttgtaacaagaggaaacatcctcagctccacagaagccagggtgtcactttggggacagaaataatcctttcatggtcaccaggataagagtcctgaggaatcccagggaaacctggagagtgttttccagttagactcagggcagagacctccatgggaatctctgattagaacaggccttgagctctgacgggagccaagagagaggctcgcccagggtcagagtccttaaaacctgatggttttcacagctatcccccctcgtcttgtaaactcagactgattcagttgaccctctttctgctaatccatttccttctctgtaggtttgattctcacagttcgctttcttcttctcttccctgaaaacagacgatgtgttttctgtagtcaaaatcccagggctcaggtctgcaggacctgggtaggctacggggactttctcactcaccattgtctggacactcttgtcttctgtgcatggaggcatttggaaaatgaagtggacattagccatgaagggaataatactagttttctccaataggatattgatgtagagctgatcttgtgcttctcacactgtctcagagtttggactttcacctgtgactttgagaagagctggggatgggcactccattgtgctgtgagctctgggtaacgataattgtagaatctgcctaggcagtctaaggtcaatactactggtcatcaggaaagacagctggaattcctgggaagatctgcatctgccgtccaccatggagtcccatcgtcttctgttatgctctctttgaatcagtcccacctagattatctagaacactcttcctgacttaggaaaaataatggcaggctccactaacacctgtgttatgccatgggagcaacacctaagctagtgtgtgaatgagtagatgagactgtggtctagtcaaggtgacaggtaaaattgattgttgccattatgatattttattttatatttggcaatatagtcatgctcctattataaatattttttgagacggagtcttgctctgttgccagcctggagagtgcagcagcacgatctcggctcactgcaacctcttccacctcccaggttcaagcagttctcctgcctcagcctcccgagaaactgggattacaggtgcacgccaccatgcctggctaatttttgtatttttagtatcgacagggtttcaccatgtgggccagtgtggtctcgatttcctgacctcgtgatctgcacacctcggcctcccaaagtgctgggattacaggcatgagccaccacacctggcctagttttattaatgtctgtccataccagcaactacatacctatggggacattaatttacatctgcagacagatgtgtaaatacacaagcctatacatacatgtgtagccatttatatttaacattataataaaataattctaaaatattttctaaagaattaaacttaatgatgagctaaatataaattagagtaatctataattgatttcgatcattctctatagtttgcataaatggatgtctatttctaagccttaacatagtgtattcgtcattttaaaacagtcaagaaaaaattacaaatgttcttgtcacaaaaaaagataaggatttgatgatttgaggtaatatatatgtcaattaacttgattcaattattctgtattgcattcacaaaccataacatacctttgtgccccataaatatatacaaccaaaatttctcaattttcaatgaaattttaattatatatttttaaatctgatgcctctccttggattaagccacctcctcaggcttacagggctcttccattttctcaacatgctgttataccagatgagcacaaacacattaatttcattatgcttagctttaatttttcaaaacaacatgaaggtgataattttaccaatagacgtattgcaacctactatgcatgagaccctttctgtgcttcaaggtttcttctcaggactttatatgtattgcaaattttcatttttttctgatatggaatgctgatttctctttattacagattatcagtttatttttcaaatttatctcttaaaattaattttttcaaagtcccactcaaaccagggtattattagaactttgaagtgtaatagttggaccaactttgagaatacattcaatttagttcacgtgctctcaagtatcttttcttctttaaaagttgttgtcagttgtaatatcacacaaaatattagtaatttatactaatgacacaggttaaaatattgtataaataatttaattacatttgattggaaaaaaggaatatatgttcctcatatcttgacttttttttcttctctatgagatgcatgtttattaattattaagtttaagatgttacccttgtctttttgatttctgggatttaattttagtacatatacttgaatgcattgtattaattcatataataatgttcatattttggatagggttttaatattaattttgttattactgaattttaaactattctacactttttcattttttgtttttatgcgataaaatttacatataagaaaatatgcatagatctggaatgtatcactagagagtttctggcaaatgtgaatacccttgtccccagcacctaaggtagctgaagagcaagtccatccccacatcgcgggtctttccctgtgcctgcggtcaactcctgcatggggaaatgttttgatttctcacactacagatccatttttttccgttttgaactttatataaatggaatcaaacattatagaccttttttttgaaaggggcttcgatatttttgagattaattcatgctatttaatgtataaaattagatcaacatattgtcatttattcaattcatggactgactctgatatgaaacctcaaagttttcatgtatatatggagacagggagaggaaggagaaagattttatatctgagtcagtccattaagtaaataaatgagaatattttgatttattttcctgttgatgtactttaaatttgtttccattttatgaatattataggcaaagccgttacaaatatattagtgtaggttttcctatattgtctcatttttgttgagaaaatatgaagtatatatttctttttttatttttgattactatttatttatattttatattttactttaagttctgggatacatgtgctgaacatgcaggcttcttacgtaagtatgcatgtgccgtggcggtttgctgcacctatcaacctgtcatctaggtttgaagcacctcatgcattaggtatttgtcctaatgctctccctcccctttcctaatgcttttcctcccctgacacatcccagtgtgtgatgttcccctccttgtgtccatgtgttctcattgttcaactcccacttatgagtgagaacatgtggtgtttggttttctgttcctgtgttagtttgccgaggatgatgatttccagcttcatccatgtccctgcaaaggacatggaaatcattcttttttatggctgcatagtagttcatggtgtacatatgccacattttttcatacagtctatcattgatggacatttgagttggttccatgtctttgctattgtaaatagtgctgcaataaacatacatgtgcatatgtctttatagtagaatgatttataatcctttgggtatatagccggtaacaggactgctgggtcaaatggtgtttctcgttctagatccttgaggaatttccacactgtcttccacaatggttgaactgatttacactccccctcaacagtgtaaaagtgttcctatttctccacattctcaccagcatctgttgtttccagactttttaatgatcaacactctaactggcatgagatggtgtctcattgtgattttcatttgcatttctctaatgaccagtgataatgagctttttttcatatgtttgttagctgcataaatgtctttttttgagaagtgtctgttcatgtccttcgctcactttttgatggggttgttttttttttgtaaatttgtttaagttccttgtagattctggatattagacctttgtcagatggatagattgcaaaaattttctcccattctgtaggttgcctgttcattctgatgatagtttcttttgctgagcagaagctctttggtttaattagatcccatttgtcagttttggcttttgtcgtaattgctttggtgttttagtcatgaagcctttgcccatgcctatgtcctgaatgatactgcctatgttttcttctagggtttttgtggttttagattttacatttaagtctttaatgcatctagagttaatttttgtataaggtataaggaagggatccagtttcagttttctccatatggctacccagttttcccagcaccatttattaaatagggatcatttccccatcgcttgtttttgtcaggtttgttgaagatcagatggttgtagatgtgtggtgttatttctgaggcctctgctctgttccattggtctatataactgttttggcaccactaccatgctgtttttgttactgtagccttatagtataatttgaagtcaggtagcatgatgccttcagctttgttctttttgcttaggactatcttggctatacaggctgtttttagttccatatgaagtttaaggtagttttttctggctctgtgaagaaagtcaatggtagcttgatgggaatagcattgattgtataaattactttgggcactatggtcattttcacaatattgattcttcctatccatgagcatggtatttatttattataaaagtaactttaattttttcagttttaatgaggaacaattgaaatatttttaaatgtatatgtttaaggtgcaccacttcatgttttgatattgtgttagtccattctcacactgctataaagaaatgcctgagactgagtaatgtgaaacaaaaaaatagatgtttaattggctcatttttctgcagactgtacaggaagtgtagtggcttctccttctggtgagactcaggaaagttagaatcatagcagaagacaaatagtagtagacacatcacatggccagagcaggggccacaggaagagagggaggtctacacagttagacaaccagatcttatgataactcacacaatattatgagaacagcgccaagagtcagtgctaaaccattcatgaaagacccaccccatgacccaagcatctcccactgggtcccagcttcaggattgaggattataatacaacacgagattcaggccaggacgagttgcaaactgtatcagatacacattgtaaaatgctcatcatgatcaaggtaatttgtgtgcctatcatcccacatacattttttttttaaatggagtgtgtgtgtgtgtgtgtgtgtgtgtgtgtgtgtgatgagaatatctaagatctaccctttcagcaaaaatcacttttacaacacagtattaaatacaggaacattgctgtagattagatctccagaactcattcaacctgcacacctgaaattctgtaccctttaaacatcacccaatttccctctcctcccacatcctgggacccattattttactttctgctttcaagagcttgggtgttttagataccacatgtaaatgagataatgcagcatttgtctttctgcatctggcttattccacttagcatcatgtcctccaggcccatccgtgttgttgcaaatgtcagaatttccttcttttcaaagcctaataaaattcagttttatgtgtacacattttctttatacattcatcagtctgtggtcattaaattattttacaaatctacactattataaataaccttgcaatcagcatgtgtttaacataataattttacttatttgaatacataacaagaagtgggatcaccagatgatatgatagctttatttttcaatttattgagtaaccaatcctaccacaccctaaaaggattctcttttcaccacattcttgccaatatgtgttatatgtcttgctgatgatagccattttaagcagagtgaggtgataactcatcatgattttgatttgaattcctctgataattagtaatgttgagaaccctttgaggctctgtttttcatgtgtgtgttttctgaagaaaaacctatccagtttttgccctttttatcagatcatttgttatttgctattgagttgcatgagttatttatacttttggatagaacttatgtcaggtatataattgcacatagtttttttcctgtgcttttttctattaaattcaaagaaatcatttctgaatcaatgacaggaagtttttttccatgtgttctatgagtttgtggcttcaggttatgttcatttttagtttatttttgaatacggtgttagagaaggtctaattttatttcttttgcatatggatgttaagcttttacatcatatattgaggagactgtccatccttcactgtgtgttcttgggatacaaaatcaggaagatgcataatttaaaaagaaaacatcagatgaatattcctggtgaatatagaccgaaaagttctcaacaaaatactagcaaatagaatccagaagcactttaaaatgtaatacctcatgatcaagtaggctttacccctggaaggcaaggttcattcaacatccacaattcagtaactgtgattcaccatgtaagcagaataaaagcaaaaaccatatgattatctcaatagatgctgagaaagcttttgataggatccaacatccgctcataataaaagccctcaacagactaggcatcaaaaaaacttacctcgaaataataagagccatctatgaccaatccacagtcaacattatactgagtgagcaaaagctcaaaaccctttagaagtgaaagaagaccaagatgccctctcaccactgctattgaacatagtactagaaaccctagtcagagcaaccaagcaatatcaaaataaaaggcagctgatatggtttgtacttgtgtccccactcaaattaaatgtcaaattgtaatacgcagtgttgagggtggggcctgatgaaaggtggttagatcatggggatgagtctctctctcgtgctgatcccatgatagagccctcaggagatctggtttcaaagtacgtggcacctccctcgtctttcttcctcctgctccagccaggtaggacatgatgcttccctttctgtactgattgtcaggatcctgaggcctccccagccatgcttcctgtatagcctgaagaaccatgaaacaattaaaaatctttataaattacacagtctcaggtgtttctttatagtttgcgaatggactaatacagaatccaaataggaaaagaagaactcaatgtatctctccaaactgatgatataattctatacctagaaaattctaaagaccctgccaaaataattctagaatagataaacaattttggtaaagtgttgggatacaaaatcaatgtacaaaaatcactagcatttctataccccaactatgtccaagctgagactgaaatcaagaacacaatcctatcccacttacaatattcacacacacaaaatatgaaatgcctggaaatacaggtaacaaacaaggtgaaggatctctgcaaggagaactacaaaatacagcagaaataaataaataaatcgtacatgacacatgactcatctgacaaagggctaatatccagaatctacaatgaacttaaacaaatttacaagaaaaacaaacaaccccatcaaaaagcgggcaaaggatatgaatagacacttctcaaaagaagacatttatggagccaacagacacatgaaaaaatgctcatcatcactggccatcagaggaatgcaaatcaaaaccacaatgagataccatctcacaccagctagaatggcgatcattaaaaagtcagggaacaacaggcgctggaggggatgtggagaaataggaacacttttacactgctggtgggactgtaaactagttcaaccattgtggaagacagtgtggcgatcctcaaggatctagaactagaaataccatttgacccagcagtcccattacttgctatatacccaaaggattataaatcatgctgctataaagacacatgcacacttatgtttattgtgtcactattgacaatagcaaagacttggagccagcccaaatgtccaccagtgatagactggattaagaaaatgtggcacatatacaccatggaatactatgcagccataaaaaaggatgagttcatgtcctttgtagggacatggatgaaaatggaaaccatcattctgtgcaaactatcacaaggacagaaaaccaaacactgcatgttctcattcataggtgggaactgaacagtgagaacatttggactcaaggtggggaacatcacacaccggggcccgtcatggggtcgtgggagtggggagggatagcattaggagatatacctaatgtaatgttaatgggtgcagcacaccaacatagcacatgtatacatatgtagcaaacctgcacattgtgcacatggaccctagaacttaaagtattatttaaaaagaaagaaaaaaactattaatttttctgaaccatgaacatggaatatttcagatatattttcaatttgtgtgtgttcactttattttttattatcaatcatttctggttttcttttagaaatctttcacttatttggtaatatgaaatataatttttagctattataaacaaaatgctttattgattttttgctgtttgcatttagcaatgccaccaatttttgtatgtaggtgttgtattctgcaaatttacagaattttttatcaattataacagtttttccagcaccatttattaaatagggaatcgtttccccatttcttgtttttgtcaggtttgtcaaagatcagatggtcgtagatatgcagcattatttctgagggctctgttctgttccattggtctatatctctgttttggtaccagtaccatgctgttttggttactgtagccttgtagcatagcttgaagtcaggtagcgtgatgcctccatctttgttgttttggcttaggattgagttggcaatgcaggctcttttttgttccatatgaactttaaagtagttttttccaattctgtgaagaaagtcattgatggggatggcatcgaatctataaattaccttgggcagtatggccattttcacgatattgattcttgctacccatgagcatggaatgttcttccatttctttgtgtcctcttttatttcattgagcagtggtttgtagttctccttgaagaggtccttcacatcccttgtaagttggattcctaggtgttttattctctttgaagcaattgtgaatgggagttcactcatgatttggctctctgtttgtctgttattggtgtataagaatgctagtgatttttgcacactgattttgtaccctgagacttcactgatgttgcctattagcttagggagatttggggctgagacaatggggttttctagatatacaatcatgtcatctgcaaacagggacaatttgacttcctcttttcctaatcgaataccctttatttccttctcctgcctgattgccctggccagaatatgtagaaagctgaaactggatcccttccttgcaccttatacaaaaattaattcaagatggattaaagacttaaatgttagatctaaaaccataaaaaccctagaagaaaacctaagcaataccattcaggacataggcatgggcaaggacttcatgtctaaaacagcaaaagcaatggcaacaaaagccaaaattgacaaatgggatctaattaagctaaagagcttctgcacagcaaaagaaactatcatcagagtgaacaggcaaccaacagaatgggagaaaacttttgcgatctactcatctgacaaagggctaatatccagaatctacaatgaactcaaacaaatttacaagaaaaaaacaaacaaccccatcaaaaagtgggtgaaggatatgaacagacacttctcaaaagaagacatttatgcagccaacagacacatgaaaaaatgctcatcatcactggccatcagagaaatgcaaatcaaaaccacaatgagataccatctcacaccagttgggatggcgatcattaaaaagtcagggaacaacaggcgctggagaggatatggagaaataggaacacttttacactgttggtgggactgtaaactagttcaaccattgtggaagacagtgtggcgatcctcaaggatctagaactagaaataccatttgacccagcagtcccattacttgctatatacccaaaggattataaatcatgctgctataaagacacatgcacacttatgtttattgtgtcactattgacaatagcaaagacttggagccaacccaaatgtccaccagtgatagactggattaagaaaatgtggcacatatacaccatggaatactatgcagccataaaaaaggatgagttcatgtcctttgtggggacatggatgaaaatggaaaccatcattctgtgcaaactatcacaaggacagaaaaccaaacactgcatgttctcattcataggtgggaactgaacaatgagaacatttggtctcaaggtggggaacatcacacaccggggcccgtcatggggtcgtgggagtggggagggatagcattaggagatatacctaatggtaaatgacaagttaataggtgcagcacaccaacgtggcacacgtatacatatgtaactaacctgcacattgtgcacatgtaccctaaaacttaaagtataataaaaaaaagaaaaaagagacccaattgttgacaaagttatgaaaaagatagtttttaaggagtctttaagtaatattgtattttctgcaaacagacaatttgatttcccctattccaaatttcaggacatttcttcttttttcttgtcaaattgttctggctagaattacagtaccatgtagaagtggtggaaaagagcatttttgtcttgttcaacatcttagagaaaaggctttcagtttttccagccttggtataatgcaagctgtgggtttcacatatctggactttattattttgagatatgtttcttgtataccaagtttgttgagaatttctataaggaatggaggttgaatttttttctatgactttcttaaagcaattaatcataaaataataataagcaggtcaatacaagatccataaattagtggaagctagttatttgcactgctgccatagagtaggatcactacacaactcatggtgttgatgggaaactataattctgcaataattaaagactagtgatttacactgggctctattgagagatttggttgtcaactacagaaatcgagatgaaggggcactgagaaacatttcgcttcatatcatctcaacttctaatatcaatttttagtactaatacagtcctattttctcagtatactgtctcacaggttatagtatatgtcttagaaaattaagggttgtttcattctaataattaactcagaaaaattcatttcctattatggatgacaagtgtaaattcatatcttaataattacccacactccaaaacactactacaggcaaaggcaagagaaaggcaggtatagatgagattctctgaggtcagttatgtaaatacccaaggactattgtctatgaccttgaatgtcactttcttcccttccatgagctacatccaggatattctgtgaatctgagagcgttgagcatgtttaattattttatctcactgccccttagtcttgctttctccagttgacaaccaaatctctcaacaataggcccagcgtaaatcaccagacttcaattattgtagaactatggtttcccaacaacattatgagttacaaaatgatactactttatggcagcagtgaaaatgatgaacttccactaacttatgaatctctgaatggctagcatggaggtgtgtatgtatcagcgcactgttctagaaatgttccgtttctgtccattattttatgtagtaatgaggacaacgtgaactaaagggagtatccatggccttataagcacagagaccacatccagtgcaggtgcagagcaaggctgcaacagtcagcaagttgctctctgaagagtcttccaattcccttgcccaaagcatctgctcattcatgggctgagaaaagggaagtcatgcatgcagtctactctctctacagagctgacaggggacacggacaacatcgattattcatggaattttcccataggaatgcagctgtgtgcacacacacataatacatttttaaatgttttttttatttatcctctccaattttaaaaaagtcatcaccttttctcctaatcaaagaggattttgaccagaatgcttggtgggagccccctgctctcccagatgcccacccttatttctcttgaagtgaagaacggcagctctcttgatttctactctcatcctctaggactaaaaccagaaggttccacgccccctgggtgaacatccaagaagaccctgtctgtagcagcaggagcctcaagccttgactgagagctatggtcctgaaatgagacagtgtcccccatggagagcacacgtggacgcccacaactgagggctcactgctcttcaccacagatgcgctcccttactgagtcctgagacctgagtgcaccccatagggtagggctcagaagaggggatgcaaatctccaccagctccacccttctctgtgttgaaaagccgagcatggggacctagttcagtgactcctgtgccccaccacatggagctttactccacgcttctcctgctgactgtcccttcctgtgagttcagtggtcagggaatccttcaggggtgaaacacctgttcttttctttgtgggcttcatcttcttatgctttctccacaggggtcttatcccaggtcaccttgaaggagtctggtcctgcactggtgaaacccacacagaccctcatgctgacctgcaccttctctgggttctcactcagcacttctggaatgggtgtgggttagatctgtcagccctcagcaaaggccctggagtggcttgcacacatttattagaatgataataaatactacagcccatctctgaagagtaggctcattatctccaaggacacctccaagaatgaagtggttctaacagtgatcaacatggacattgtggacacagccacacattactgtgcaaggagaccacagagacagagcccagggtgcctcttgtacaagaacccaggctgcttctcagtggcgctccctccccacctctgcagaacaggaaagtgtggctgagatgccatttcctgtcagggtctgggtgtcttatcctatctgactcagagccttgtcttcctccctcttctttagtaataaatggcatgacccctgttagtggttcatgcaagcagaggctgtatcctgtttgacaaagattcagcatgaaaggttcctgttacttgagccagatgcatcactgatatgtggccaccagtttcttagactcataccactttaagggaccaaatacaaatgtccatagcatatgccattcttaaactgcagaaatgatgtcaaagaagaatgtggagataagagagcaggaggaattatgaaaatctggatagcatcttctcttctagggtggaaggtatgctagtaaagtaatttaatgaaacaatcagacagatgcaatatgtcctcatcatggagtgtctcacatgggcagtgcacaaataaatttctaaaaattccataaggtagatgtgatggatgaggcttatttccacacagggagcccacaaatatccagagaagtaaaaaatctgacacttggaaagaaaattgcctcatcttgacatcagaaacccatttcaacatgtccgaggggcaatgtggaaaagaaatggaaacttcaaaaacacatttcttatgaaatgtctagctcatgtttgaacataaaaacagaattgtccatgattttagaaaaaccaacccatgacagcgagtcactacactcagaaacaccactgagtcaacagacttcagtctgtgagcaggtcagtactgaggccccaggtgaatcaaggctctcacgtacattgtacagaacccagaattgagccacacaatctataaccaagtcttctttgacaaactttacaaaaattaacaaaaaaatacaccagagaaattcaatatatgaaattcaatatacccattcaatatatggtgctggggaaattggttagccacgtgcagaagaacaaaactagacccccaccctcaacacatatatactcaacacaaaatgaattaaagacttacatataagacctcaaactataaatctactcaaacaaaacaccaggacaactcttctgggctttggcctaggtaaagaatttatgactaagaccccaaaagcaaatccaagaaaaaaatagacaaatgggacttaattaacctaaagcatttttcacagcaccggagtgaacagacaagttgcagagcgaaagaaaatttttccacaccacacctgtgacagggaactaatatgaagaatttgcaaggaactcaaactactctacaacaacaacagcaacaagaaccaaataactccgttaaaattagcagaggacatgagtagacattttcaaaagaacacataaaaatggataataaatatataaactacgctcaacatcactcatcatcagggaaatgcaaattaaaaccacaataagatatcatcttccaccagtcacaatgactattactaaaaactcaaaaatatcagatgttggtgaagatggaaaggaaagggaactcttagacactgttgatgaggatgtggatgaggacaacttctatggaaaatggtatggagatttcccaaaaaactagaaatagaactcccctttgatccagcaatcccactactgggtttactacccaaaggaaaataattttttatttccaaaagatatccacacttctatgtttatcacaaaactattatcaacagcacatatgtcaacctgagtgtccaccaacagatgattttataaaagaatatagcatatatgcacaattcaatactagtcagccacaataaggaatgaaactgtcttttgcagcaatatgcatagaactggaagacaacataattagtgacctaactcacaaacagagagtcacatgtcacatgttattatttataagtggaaggtaacaacgtgtccacaaggatatggagagagaaatgatggacaccagagacttagaaggatgggaggtggaaggtgggagcatgaggagacattacctagtgggtacaatgtacattatttgggtgatagtacactaaaagccaagaccactatggaatatagccatgtccaaaagtggcattcgtagtccttaagtttatacaagtaaatgtacacacaaataaaattaaaaatataaaataattaacagttgaccaatgatcttaaaagttgatttaaaatataatcaataaatgaaatgaatatcagttgaacctcattaaatttgaaaacgttttatactcaaatgactataagaaaatgaatgtcaagtttcagatgagaaactgtttgcaaatcattagccaccaacataagtataataagaaccctcagaactcaactgtgaaaaaaagaaacaacccatggatagaataggcaaaggtttgtgcagacatttcatcaaataagatgtacagatgacacataggcatataaatgggctcgcaacaggattttccattcgaaaaattcaaatcaagccgacagtgagacactactatacaatttttagaaattaagaagaaatacagataataccaatgctggtgagcatatcagggtccaagactctaaaacgttgcaaacaggaatgcaaaatgaaactgctactcaggaaaataatttatagttttttctaaaatcaaacattttcttaatatatgacctaaatatcccactcctgaatatttgtgtcagagaaatacaatcttagattcacaacaaacttccatttaaatgttcaatatattgtgctcacgtgtgtgtgtgcacgatagaaacaaaaagtaacatgaatgtctcaaaatttgaataggtaaaaagtaggaagtgtctattaattgaataccatcagcaataaaaaataacaaaatgactgatacacaaaccattacaggtgaactccagacatgatgctaagtgagagaagccagtctcaatgatcaaagggacacatctgtaagcaccacggtcatcctcaggtgtcagtggtttgggctgggctctctgtctctttcctgaccagacccagatgttgagctccgccacttgcagatggaaaattctactattttcaacaatgcactgaggtttgaactgcttcacagactgaacgaaacaaacacgggctcctttgaacagtgtgcagcatttgttccaaccacaagagaatgtctcccagctctgccccttctcagttttccctgcaagccagcagccctgcagtttagcctgcatctcccatgcatgcacccatctccttccaagggccttactccacaacctccacttattttgagtgcactgactggctttgaacttttccacattctgttgttattgaagttaggatgtttagagccatattaaggatcatattttatgactgaattccagtgccccctctctcctgggacagagcacgtaaccaacattctgcatgtggagacaaagatgagcttttttcttcctcagcctaggagatgagcgctcagtggagggttggatagaagcttcccaccttctcagcactccagttctggtggggagaacctctgccataggagcagagctagaaaccagggaccgaatgttcccagtgacactggacccagggtagagcctccatccacgagtggggctccatggaagaagcgagtctctggctctcagtagcttttgtccagaactgagccttaggatcgtgtactgtgggcagagtcagagggccaatgtcctggctcctggggaacagtttcctctgaagggagctgggtagaaggtgtcctgtcttcttggctacatctgtttgcagtggagtttacatcatgctgagttgggatgtggaaggaaggaggagcatcttagatcaattatgatggctagacttactgaattttgtagattttcttgaataaatgtttcttcacttgctgtatgctgtgagagcctttccaaaccctgtattttttcaaaataattttcactggtctcatgagggcatggattcattgagcccctcatgctatcaaagagaaatagaactttttttgttcactttttagagaacatccatgggttataaaacaatgggttgacttctcttccaaaactttacagataccgtcaattttcctcttgcttgtaaggttttatccagaagaatgctgtcatcattttttctgcttttttggaaggaatgccccttctactcacctcaaattgcctgcatgtatttctatttttctttggttttcagcagttttaataagatttagctaaatgtgtgtggggggagcagggagtgtcattctgctgttctgtgttctctgagatgcatggattcacggtttactctgtctccattttggggaacacaattagaaaaaatgtcagtgtgagcccagaaacaagcctccctgaagtgggcagaggaccacctgggggcgctcaggacccactgagcacaagagccagccccagggcaggtgcagacgggggttaagatctggtttcccgtcagccctgtggcttcctctccataaaacagttccctcgggggcacgtctctggattccttatcttgttcttactgtgaagtctctgaagaataaacatttgttgtaacaagagaaaaattttctcccatgcaccaaaggcagagtcacctacagtcaattagtcctgtttctcaatgttaataaactatcaatgtttctgaaggtacattgtacagaacccagaattcagccacacaatgtatagccaagtgatattgacaaacttaacaaaatatacaccagggaaaggacgtcccattcaataaatggtacttgggaaaatggatagaaacatgcagaagaacaaaactagatccccaccctcaacacattagtcaggtctctaaaatgcaggagtacatatctaaaatttattattttattgtgcatttttacgtgttccagaaggtgggagaaatttctttctgtgaagagcatcccaaagtcaggcactcctctagaacacgtgtttaatccttgtctttggcttattgatgagctctgttggctgcaataacttctgccatccgggctgactttgcatcatgtagaggagcaaattctgaatgaaagtttgcactactcaattgagtgcataacctacagttttgttactgatgtatgattcatcagagatgatatcagatcaaggatttcaatgagaatctaatctaaaagatgtaaacaaattttcctaatttagataaaattactgtgagcacactgctagtattcagccatgtctcctatcacattgaatctacactaagtttgacctaaaagctagcacttgttctcatgttccaatatgttatttttattttaatgtattcagattactatgtgttgctattttacccaaagtgaaggaaagcaattttaactgactgaaaatgagaaaaagcacaacctaatgaaatggaagtcaggacatgagtgtctccagccttgtctatttcaaaaattcacgtacgcagggggatttctttcctcaattttacacagagaaacttccaaaatgtttgtttcctctcccatggactctatcatcagtttctatgtcagtttgcttagaattttggcctccagctccaaccaatttggtgcaaaaacatgatttcattcttttttatagctgcagagtattgcactgtgtataagtaccatgttttctttatgcagtctataactgatgggcgtctaggttgattccctgtattaggtaatgtgaattgcacagagataaacacatgagtggatgtgtctttgtgttacaatgattggttttctcttgggcatatacccagtaatgagattgctgaggggaatagtagctctgttttaagttctttgagaaatctctagactgactgaattgttttctctgtgaatggtgataattatgtcaatatttgtcaaattttgaatgtattgtttgaagattgttatttgtcaatattacctcattaaaactattaaaaatggaagtgtataatttggtagaaaaggattaaaagaaagataaaaataatacaagaaaagtcacagactcctgaatccacatgtgaattagcactcagtttttctatattatttataaaaacactaagatacagccaaataatatcatgatatccttataagaagagtgtttcgtaaacctcactgggaatttctagctctgtcctagagttaatttagggagcagtcggatccagtcctgagcaacacaggccagacactgagacttaccacatcttaccagatgtgagctcttagacacgtcacatggcctctccatgcttgggggtttaccttcacatctgtaaatgaaggaaacattgactgccacagaacatacttcatgtgcatctatacagtagaaatgctaataagaattaattgtttatgaagtgtaatcactctgggacacagcccactcagaggcatcccttccagaacccgctatatagtaggagacatgcaaatagggccctccctctgctgatgaaaaccagcccagccctgaccctgcagctctgggagaggagccccagccctgagattcccaggtgtttccattcagtgatcagcactgaacacagaggactcaccatggagttgggactgagctggattttccttttggctattttaaaaggtgattcatggagaaatagagagattgagtgtgagtggacatgagtggatttgtgtggcagtttctgaccttggtgtctctgtgtttgcaggtgtccagtgtgaagtgcagctggtggagtctgggggaggcttggtacagcctggcaggtccctgagactctcctgtgcagcctctggattcacctttgatgattatgccatgcactgggtccggcaagctccagggaagggcctggagtgggtctcaggtattagttggaatagtggtagcataggctatgcggactctgtgaagggccgattcaccatctccagagacaacgccaagaactccctgtatctgcaaatgaacagtctgagagctgaggacacggccttgtattactgtgcaaaagatacacagtgaggggaagtcagcgagagcccagacaaaaacctcctgcaggaagacaggaggggcctgggctgcagagggcactcaagacacactgaaaacacggttaacactgggacaagttgctcaggaaggttaagggctggtttcctttcagagtctttgctgtttctgtatctaacagtttccccaggaaccctgtctagatttgcgatcttgatctgcttaaactgtctctgtgtcatttttcttacctgtgactttaggggagctgatcgtggacactccagtgtgtggagatttcctggtgacagcaattgtgtgttctgtctaagcatgtctagggccggtcatcaggaaggacaggaaggacaggctggaattcttggaaacagctgcacctgccatccaccagggaactttattgtcttctgttctgctaaaattaaatcaggcacaccaagtttaactagcactatcttcctagcttaagaaaattgatggcaggtttcaataacacctatattaaaccttcagagcaacacctacattagtgtctgatttgataattgagactatgttctagccaagcagacacataaaactggtgattgccatgcttagttcatatttcatatttatcaatagaatctggctggtgttataaacagatttgccaacacatgtgtgttagtgtttgtcttcggagaggcacattctatgactggattaagtttgtgtacaggttcctaaggaacctgttcatgcttttgagaggaaatgcagagggggtggaaggcggctggggaagctgaaggtatacgagggaagtcagtccctgagtgaaggagagagggaggagaactgggtagaactttcctaaacttctgtgctggtctaggaaggtccagcaagatcactgagtcagattcgtgtcaaagtttcccatcggggacccccgtgactcccagcagtggctctgctcagatcagcacagagctcgttcttctcctgagagtggagcagaggatgtggctccagcaccagccatggcatggacgtcagagagcagccccaggcacctgagtcgggtgcattgtgccccctgcaggtggacggagggaggtgctgactcagggcccacacgctgtgggttctatacagaacacacacttttacttcatttctgtggatgacatagaaacaaacatgcagtctattaacagcggtgattcctacatttgccccaattgctttattccttgattccgcagaatatcctgacgcagaattgtctttctctcgtggaattgcgacgtgtttaggacgtgtgttccccactttcagtgttctgctccatgaacagagatcctgagtagagtacagctgaccctccttccacactgttcctctcctccccacaggaagagcagataattacctgaggctgaatctgaggtgggatctgtcctctgaacctcagagcctgcagagacccccggctgcagattcatggagtcaggtgtttgtacatgtgggaaacttgagctgttcttttgtcagtgaacactccttagaactaattgtgggttcagaattaggacacccattgatctatcacacctcagctcattctgccactcagaatctccagaaattcaggaaatggttcaatttacatgtttgtgacacattgttctcatttcatttagttgtgagtttggtcagcaaaagtgctaccatttatgtgtcccaacctgatgaagctaacttgcttcaccagatgttgggagctcctgaattttatcctaagcccctctctctccacttcatgtgaaattcggtttgacctggaattctggtgtgttgatttagccagatttccccatactgagtgtctgattttcctggatatctgatcagtttccttgtccttcaccataacttgggtgacatctgatcaccctgggctaacttcaacaaaaatcctggcaggttgccttaagcaggatttacctcactcctgatgtttcttcttgattttccatcctttgccccaaccctgctgcatgcctataaatccccacgttctcactctgtatttggagttctgctgaatctctccctcattgcaaaatcccactgccctggtccctacacctatcatgagggccctggataaagtcttccttactgtgctgtagaaagtgtctttgtatatacattttttctttaacaaatctgcctttagtatttcctaattgatcaaggaacctcaaacattgaatgaaagtgaggttttccattttactaacatatgtgtatctgtgaatttcaatttcaatgtgtggtgtccagaagtcctgagcaccaacagttgtgcttctctgtccaattatttgattctgaaacctgggagtcatcccaacacaggtaaatatgtgattttttttttttttttggtttttactgtttagtgactgacttatttcacttacactgaagcttcatgaacacaatgatgaaaagtagagagaggacttgtttgaaaatgccagatttatggtagactttaccacccacgtgtgtctggaggtcttcttaaggttccaagaacaggacatttttcccacaacaagacaaggatgagaacctctgagctgtgaggatggaggacaggcagggccatgtgtggacaaggacgggctgctgctatgtccagggtgttctctactagcaaccactccatctccttcctcactctgtggtatttgtcagatgggaaacatgcctagaatttatctttgacatctggatggaagcccaggcaagaggcatttgacagcttattcgtgagcctacttctttaaggaatgccagatcccttgctctccttcctagttcttaacccctttaactcccttcccctcctgcacccatccactgcctatttacagccacgtccccacacccttcactgtagcaccattttcttgggctcctgggaaacacaacagctttggtttaactcacagctcaggcacactcacgggtcctttcagaggctctcaacttccctcctacagtccctcagctcctcctggggtcctaacttggccatctctatcctctctgctgagcctggccatacacaatccatcccatctggatatgtgtatagcagtgggttaactcagcaggcatgaatagttcaaaccctccacgttcctaaaaaggtaaataactaaaaaataaaaacaaaagtaaacctttgttcatttatggctgtctgttacctcctgggatgagatctccgagtccatgaaatcttacacctgataaaagtgtctgcagatgtctgcagccttgggacatgctgtacgagtttaatcacagtgatttatagtgaacgcctgcttttgttttgctggggagggctgtggtctgagtattgtggtcagttacccaggtgttccatagtctatgattcattccccaaacacagccctggacaagaaaactcaggggcactcccctgggtgttgacacttcacacatgtcatcttacctcatagctggagcattacacatgtgcagaaggctccacagtgggaggacccctgagagcttgtgcctggattctcctgagcttcactctttgtgccttttttttccatgtattttcaattgtatcattttgctgtaataaactgttcctgtgaatacgagttttcatgagtcctgtgtttttactgagttttgagcctgagggtggcagatgcaacttctcaatgcagttgtatcagaagaaggatttcctagagagatcctaagtgacacatggctgaagtattgttcagaaaacataagtattcaggtgtggaatggcaaaatctgatacttgggtggcaacagaattacccggtctgagacagcagctgaactgaagtagatgtctggagataaatgcaatttagaaacgataactcatactcccaaagagctggctcaatcgatacataaggaaaaataaaatgataaaaaataacctaaatatgcaattactatttgtgagaacatccgggagagtgattgcagggaaagtggcctgcgccgacctcagattttggccaatgtcatttctggctgatgggctccagggcactacctaagggagcaattatgctgcaatgacagacagaagcttcgcaagctctctccacccagaaggtggttcaggtggtgaagtgcggggactggtgagccacaaaacactgaaatgagggaggaaagtgagaaagtgaaaggcttttgagctttttctttagcttaataatttttgttaattattaacaaaataattggacaatgactaatgtaaaagtggaccgtgttttgagtcccttagaacggaggagaatgcagcggtcaatgttgtgcccagagattactatagaacaatagtaggtggttgaacatgctccaaacacaaagcctcttgttgctgatgggacagctgccctcgtctactgcacaacagcttctccaaagtgtgtttaccctgagcattgagattgcctttctcttgtaagtgaaaaaatcggaaaactccaaataaaggaggagttgtaacgctctatgtgtaagaaattctaatgtggatttatgataactgggatatgcatccacttatctttttatctgtaaaaattcatgggtgaaagtgcaattttgttacatggatatattgttcagtgatgaagtctgggctttgaggagagtcatcatctggatggtgtatattgtacccagcaagtaatttctcatcccacacaccactcccaccatccaaaccttccaagtttccaatatttattatgccacactctatattcatgtgtgcacattatttagttcttacttatatatgacatgtggtattcaactttattcttctgagttatttaacttaagatagcagcctacagtttcatccatgatactgtaaaatacataatttcattttttattattgagtagtaattaaatgtgtgtatatatattcacaaatatatataatgtatttgtgagggtgtgtatgtgtgtatatatgtgcatatatacatatacaacatgttttctttatccaatcattcattaaaaacacttagtttggtaccgcatatgtgctattgtgaataaggcaacagcaaacataaatgcagcatctatcgaatataaaattcatttttctttgagtcgataccaagtagtggatttgccgaattaaatattagttccatttaataagagaacttaccaacatctgtttcttgtttagtttagtttttatttttgactttttaataatagttattctgactggtttaatatggcttctcgttttgacttcaaattgcatttctgtgatgattaatgacattgattgttttttcatatcctggttgatgatttttatggcctcttttgaaaaataaatgtctgatatttgctcactttttaatgtggctatttgtgctttttgtgttgctttagtttcttgtagattccaaatattagctctttgtcagatgtagtgtttaaaaatatttttcgtcattctgtaggttttctgttaactttgttgattatttattttgctgatcagatgttttgcttcttatttgtattaagtccaaataacctattttggtttagttgtgtttacttttaaggtcatagtcatgaattctttgcctagcacaatgttcagaaaaacacttcctaggatttcatttatgactttcagactctcaggcctcccagtcaagtcttttatccatattggtgtaatgtttgtatgtagtgagacatatgggtccagttttattcttctgcaaatagctgttcagtttttcctgcacaatttattgaacaaggtgacattttcccagggtatgctttttgtctggttggtcacagtcagttggctgcaggcacatgactgtatttctggaatgtctattctgttccaagtatctatggttctctggttgattgttacttgtgtataaaaatcctactggcttttgtatgcttttttatcctttattctaaaacttcactgaattaattcatcaattctaggagtacttctaaagaatattagtttttaagtacaaaatcatattgtcagcaaacacacacaaaaaactgacttcttcttttccaatttgggtgcctttatttctttctggtgtcttatttctctggctaggatttcaagttctatattgattaagagtggtgaaagtgggcatccttgacgtgttctgagtcttaggaggaatactttcaacatattgctactcagtataatgttgtatgtgagtttgtcatatatgatttttattaatttgaggtatgttttccttctattctaattttgttgagggttttttatcataaagaaatcctaaatgttatcaaatttttttttctggacctattgacatgattatatgttttttgtttatgtggtggatcacagttattgagacatgaacgttgaactatccttgcatccctgaaatgaaacttagcagattgtagcatattatctttttgatatgtagttggacttgattttcttgtgtcttgttgaggatttttccatctatagtcatcagtgatattgatctgtagtattcatttttgggtccttgcatggatgtggtatcaggctattagtggctttgtagaatgagttagggagaaaaaccctctcctcgtttttttggaaaaagtttcagtagaattactagcagatctttttgtatattggacagaattcaccttttaaaataatatgctttacggctttgatgttgagatttttttaaattactgcttcgatgtcactaatttttgttggtcctttcaggatttttatttcttcctatttcaatcttgggagattatatatttccagacatttatctattcaccctaaattttctagtttatgagcctggagatgttcatagtagactatgttgatcattatatttctatggcatcagttgtaatcttttcttttttgtttctcattctgcttatttaaattgtctgtctactttacttgcctaatctagctagtggtctgtaagttttgtttatcatctcaaaaacccaatgttttattgtattggttctttgtatttcttggttcttaactttatctagttctgctctggtctttgttatttgttttcttctgctgtgtgtttggtttgatgttgtttttctagttatttgatacgtaatgttaggttgttaatttgtgatctttctttttgatgtggtcatttaacattataatcttatcccttagcacagcttttgctgtaaaccagaggttttggtatgctgtttctctatttttattcatttcacaacatgttacaatctttttaaattttatcattgacccaaagttcattcagttgcaggttgttaaattttcattgtgtgtgtagtcttgaatattcttctagggtttgatttctggctttatattactgtggtctgagaagatatttcatttttaaaaagttattgagtcttttatttctggcatagtatataatccatgtttgaaaatattccttgctaatgggaataatgtatattctgcagtcattaggttaaatgttctgttaatgtctgttaggttcatttggtctagagtccaatttaagtctagtgtttctttgttgattttctgtcttaatgttttgcctagtattatcatttgggcattgaaatccatcacaattgtattgttacctgtgttcttccttaggtctaatagtatttgttttatgaacatgggttttctggtgcagagtgcatatatatttagaattgtcatttttaatcaatcattttatcattatataatgactttctttgtctttacttactggtgtttatttaaagtttttttatatgatatagatagtcttgcttgcttttggtttccaattgcatgaaatatattttttcaccctcttgatcttgaatctacgtatttttaccaattaagtgagtttcctgtcagcagcataaatttcaaaactcttttttattctttccactaatctatatattttaggtgaagaatttaactcatttatattcaaacttaatacagatatgtgaggtctggcttctgttgtcatgttaattattaactagtggctttgtagtcttaattgtgtaatagttttatgagtgaattttataattttgtgttgtttatgatggtgagtactgacctattgcttccatgtctaggtctcccttgagcatttcttgtaggtgcggtctggtgtaaataaatgtccttggcattttcttaccttagaaatactttatttctccttcatttatgaagcttagtttagaaggatacaaaattaatttctgacatagaattttttctttttttttctttaagtagtctgaaattgggagtccaatctcttctatcttataactttatgctgagaagtacactgtcagcatgatagaatttcagataaattattagacacttttctattgtgaattttaggatttttttcttcctatttactttagatagtctgaggactatagatcttggtaatgtctgtcttccagtgtcttctcatgtagttttctgaaccacttttatctgcatatgcaaatatctagcaagactagtgatgttttcctcaattacttcatcaaattggtcctctaaaactttttactaattttctccctcaggaatatccatgattattggctaagttgttttacataatcctatacttcccaatgattttgttcatttttttgttattttcatctgactgggttaatgcgaaatatctgtctcttaggtttgatgttctttcttctttttagtgtagcccattgtgaaagttttaaactattttttgtaattaaaattcaatgaagtctttactccctgaagctttatttttaaaatattaaagtcttaagtaaatcttgaattgttctgatttttttttttttttttttgacacggagtctcatactgtcacccaggctggagtgcagtggcgcgatcttggctcactgcaacctctgcctcccgggttcatgcaattctccttccttagcgtcccgagtagctgggactacaggcacacaccatcacacccagctaattttttgtatattgagtagagacagggtttcactatgttggccagactggtctccaactcctgacctcgtgatctccgctccttggcctcccgaagtgctgggattacaggcataagccaccacgcccggcctgagttattctgatttatttgtgttggttctcaaatttcttttggatttaattgagattccttgaggtcaacattttgaattatttatctgacatttcaaatatatcatgttgtgtaaattctatttctggagagttaaggtgatatccggcgtcttgtaattgtgttttttcatacttccacaattgcttacctgcttgcttttcattggctaaactatctcttactgtttttgaattcattttgattttcatgaaaatttcattccctttagaatgtgaatataacgtatattatgtgggtcttttgatttggttcttggtttactcattggcaaaggctctgtaagagtttcttgtatatagatagtcattatttagtggctttctgaaactatggttgtagtaataatctactgggcctgtgagcaggctcactgcctcctgcaggccctaaatagtggaggcctcagaaaccatttcttatttgcaatgcacttgtttcagcacattttatattgggatgttaagttcacctacacattagtatgtgtccttacagatttgagctgactgtggtagaagcagatgagtacatgcttgatatctgtacacagggagaagctctctgttgcctcaggcgatggactggtctatgaagtgcacagtgacttgagttctctgatcagcccctgagtgggggatgaagctggacagagatgagccaccgagcctggcaagcaaaagcgccagccttgatggaaatggcgagctgaggggcatctactcagtgtggtttcttttgttattaagagctttagtgtggtggctttttcaaattcccgttgtagtagtaacatactgagcatgtgagcaggcccgcggtcttttgcggggttggaatcacagaagtattgagaagctaatctcattttcaactgctgtacactggtggtattgagtttgtatgaggtcatgcagtttgaacgtcaggccagtaggtggtgctcgcaggtaagagccggctatggtggcagcagaagggtttatgctttaccggtggttaaagtgggaaatttgtcatgttccagatcttagagaaaagacttttagctatttctcattcattataatgctgcctgaaagtctctcgaacataactttttattatgtcgagatgtgttctttctatacccattttttacattttttttcctgaaaggatgttgagtttcatcaaatgatttttcagcatcaattgaaaaaaactatatgtcgattaaagatctaaatgtaaaatctaaaactataaaaactctggataataacctaggaaatacaatttaggacattagaactggcaaagacattatgaagaaaatgcaattttaacaaaatcaaaaaatggcaaatgagccctaagtaaactaaagagcttctgcatagcaaaagatactatcaacagagcaaacaggcaacctaaagaatggaaaataaaatatttgcaatctatacatctgacagggtctaatatttatagcatacatgcaattaaacaaacatacaagaaaaaaagtgcccaaaggacatgaaaagacacttataaaaagacctacatgtggccaacaagcataggaaaaaatgctgactatcactatcattagagaaatacatattaaaaccacaatgaggtaccatctcacatcagtcagaatggctaatcttaaaaaaataataacagatgctgctaaggttgcaggaaaaagggaacatttatacacttctagtgcaagtataaattagttcaaccattgtggaaagcagtgccatgatccctccaataacctaaaacagaagtttcatttgacccaacaatcctacaactggacatatacctaaaggagtataaacgtataggttcattccagcactattcacaatagcatagacatggaatttacctaaatgcctgtcactggcataatggatagagaaaaatgtgatacatataaccatggaatactatgcagctaagaaaagaatgaaatcatgttctttgtaggaatatgatggaactggtagtcattactcttagaaaactaattcaggaacagaaaaccagatactatatgttctcacttattttttggagataaataatgagaaatattctctcagggcctgagtcttccatattcaaaaaaaaattctaaaataagtgttcaacaagttgccgacatgcctttaaatatcctgtttcatctggaccccttatatcactcaataaagccatgagaactatatttaaaagtgggattctatgataataaataacttaacagtaagaataggaaggatatggatggttttactaatttaatgggtacataactgtggtatacactatattcctatgaataagatattctgatttcagagctaagtattgtttcctacgttgtgtgtgtgacttggttgtgttggatttgagagtgtagcacgtgcacagaccatgtggatcagaaatccacatgtaaagatgacaatctatggatgtgaactacaagtatgtaagtacttcaagtaattctatttaatggagtttgaaataaaactcaaacttattcaaaacactaattacttggtatttattttgagatctatgagtttatcaagaaattcaaattcctatttctatttaaactcccgattcctactctcagtgggagggaaaactcacagccaatcacacatcacaggacaaatctgtaaacgaagagtcattcctctgaaggtcctgggtgttcaggactctcaggcaggtgctgaggaccctgtcttgggagtgcccagcagatctcagaaccctacatggggcctgctggacactcatgtgggataactagtcgccacttattcagagttaccagtgagctttgactgttccgaatgggaccagcatggagtcaaggtgcctgctcaatgtcagagacagcgatggtctcagaaacaatccaggtaatctctaggccaataaaatgtggattcacagtgagaagtacatcctggaggtggagcttgttcttcagtgggaagagtgctgtgcacagaaagcttagaaatggggaagggggtgcgtttcctcaggcaggattagggcttcgtccctcagcgtcccactcttgtatggctgatgtggcatctgtgttttctttctcatactagataaggctttgagctgtgaaataccctgcctcatgaatatgcaaataacctgagctcttctgaggtaaatataggtatattggtgccctgagagcatcactcaacaaccacatctgtcctctagagaaaaccctgtgagcacagctcctcaccatggactggacctggaggatcctcttcttggtggcagcagctacaagtaaggggcttcctagtctcaaagctgaggaacggatcctggttcagtcaaagaggattttattctctcctgtgttctctccacaggtgcccactcccaggtgcagctggtgcagtctggggctgaggtgaagaagcctggggcctcagtgaaggtctcctgcaaggcttctggatacaccttcaccagttatgatatcaactgggtgcgacaggccactggacaagggcttgagtggatgggatggatgaaccctaacagtggtaacacaggctatgcacagaagttccagggcagagtcaccatgaccaggaacacctccataagcacagcctacatggagctgagcagcctgagatctgaggacacggccgtgtattactgtgcgagaggcacagtgtgaaaaaccacatcctcagagagtcagaaaccctaggggagaaggcagctgtgctgggctgaggagatgacaggggttatcaggtttaaggcttttttgaaaatgggttatatatttgagaaaaaaataacaatagaaacaagtacacactctaattttaagagatatattcaattcaagaattgtagaagccgaattcacagtgggaaaggccacactcaataaagttgataaaaacattccaggaaggtgctactgtgaacaagttttcaaattagatgaataaataatttggagcaatgttatttgatcatgaggtgagacagtatgattcttaaaaagtggaaaaaattctttcaaatgtttctgccactctttatcataaaattaattttagagcagttttaggattacaatgaaattgcacagaaggcatgagaattcccatgactccctgccctacacaggcagagcctcctccactatgaccatccagcaccacagtcacaaatcagttacaatggaggaatctccaaggacatttgattctttcttttttggtgatgccctaatataacaagcctaatttatctcggaataccacaagttttgttcagtggatttctaggaatcatattagttagagggaaagttggtgaggctcttactatttgaactcattcttccaaaatccacaaaacatatattaatttaaagcttatcttacttctggtttacaggatccttcccagagagtaagatttttaagattttagaggcaggttcatgtctctaaaaggccagcaagttctggggaatcccataatgaacatcctttcatgggaattggagaccctggcaatgagagactccatgtataatgccctagagttggattagatgcactgtgagctcttgggtggtggttctgaaaaaggtggtctgtgcagtaaatgcaaacacatgcacgggacacaggaaggagcaaaagcttccctttacaaagtgtgtgggcacctggaagaaaccctcacaagggcacgtctcacccttaatgactgcacattagccaggggcatgatcatgattggtcttacaaggaaagagcaccactgaggtcataggttatgaaaatgtcatcctccagctgagaaattccatctgctggcatgtgcgtgtcaaccccgtggagggtgcactctgggagttgacgagatgcatagaaacctcctgtcatgaattatcgtctaccacacagtcagaatcaacctgtgctccagaaagagatacatgcctgtagaaataaacagagcttaaggattttcttacctgctgaatatagtgcccaaaaccacactttcaggaagattagctcagaaatgtttacaaagtgactgaagggcagtggcgggtgaggtgatgggacagcctcagggctgcacttgaggagggctccctctcccatgcaggcttttcctccaggagctgcatcaggaactcacagaggataagggagaattctgagaacatgctactgtggtactgcctagagaggaaggataaatgatgacaaatacatctctgagtaacatatgggcatttgttcatgaaaactgttttttctgaaagcttatgaaggtcttgaaatgcccctgattagctgaggacaaacatttaaaccctccttccacagggagttcaagcaggctggatgtgtcctgctatggatgatcttccccagccccttcctcttcccagctcatccctggctctctgtgtaaaaagttttcatcagtggaaggtggttgatgaagtgaggtcttcaatttcctcatcttctctgtggtcatgttattttcctcatctgaggtttaaaaactcacctgcatgcagcacatgacaggctaaaatctcttgtggacaaaacagtaacaaaggcacccaccatggttgagcacccgtgttgctgacagtgaccaccaagggtcaacgtcctcttcacaatcctgtgtcagagcagcacttgagtgatttcactagcaacttcccaggagaatcggcttaaaactacttgtcgcattttccatacagatataacacatctattttcctgaagaaatagaaagagctgaatgctgaatacactgtatgtctgctggttctgcaagtttgtgactatcactttctaatttctgatctgtgtggaccaccctccagatttttctcactggtgtgaccagccttctggatgtcaaatataattaactttttttcatataaaagtcaacacaagctcctcatggtttcggtgctcactgactactttaaacttacacaatatgtttctttattagttttgttttctggtatctctactcagcatcttcaacacacccatgttaagatgcttgtacaggtaattgttaattttaaatttactggtgtttagtttaattaaataggcaggcaatagcttagaatttagaaacaacaatgtaaaggaaaagtaaatgcaataaaatttaacataagaaaaccagcagctgaaaggaagggaaatctattctgccacctaagagggtatggtgacctcatagtacaacgaacttctgcagtttaatcgatactgctcacaagtgatagcattctctctctttatatcagagcattccctaacatgtacaataaagagtgagcagatacctccaaccagactgaccagtacctctccctgagtgcctcagctgatagagatagacatcacatttgtctaacaaaataattacaggctgtaaggatacccaccagtcatatggagataatttgaaaaacttagtcaaagcccaaaccttataggtagtcatttatacttagaagaattaactcttatcttcacatgtatttttcttaatcatagagaagctactagagtcactgtccaagttactgaatatcttattcctagaatgagacattgcacaatgtgttctgacatgagggaatgtagctatagttaaaggataggagatgtgatcacggaaacacgagtctgcgatccagcagttctttctccctcacatttgcccagaaacaaagaccccagcagaaaaatggaagggttgacttcagtctccaaagtatgatgtgagatatacgtcaggtatttcatgccattgttttatagtaggaaatttaatctctaaagaaggtcattttcaggataatactattctccaggatacttaaatgcccgaaaacagagagcgctacagtgcccagtgtccaggagctacctggcacgggtctggaaaccagtggacagaaatatcagtttctcttaccacatgtatgttggaaatttgaagaatgtttctttccttcttcgtaatcataggctgcaatggactggaggtcccagtacataagaggaaatgtgtctccagtaggaacacaattagtcccataaaataattgtgctcacactgtggtgcccacactgttggaccagctgactgagaaagtgttgtaagagctgcagtgtctactgattcctatcatatttggggctacattcgcagctaccaacggaaagagagagaagtaaaactggcttaggtagagtctatggatttgctttctttccttcaaactgaagtaaaaaaaaaaatcacatcaactaaaatggggacgatgatgaagtgatcaaggacaagagccactcagtgttttaggtgggttttaacctaaagtcccacaacatgtgagaacctgaactctggagtccggggcatctctggggagaatgtggaaggtgggcgggaggaaacagtgattcatgtctagggaaatttcagggctacctgctctgggggaaaggaaagcctgagcctctccgacagtgtcctctgttaaaattgttggctgacttattgtattcttcaacaccaatatttttttagtcctcttttaattttgtttttattattatactttaagttctagggtacatgtgcacaatgtgcaggttagttacatatgtatacatgtgccatgttggtgtgccgcacccattaactcgtcatttaacattaggtatatctcctaatgctatccctcccccctccccccacaccacaacagaccccagtgtgtgatgttccccttcctgtgtccatgtgttctcattgttcaattcccacctatgagtgagaacatgtggtgtttggttttttgtccttgcgatagtttgctgagaatgatggtttccagcttcatccatgtccctacaaaggacatgaactcatcattttttatggctgcataggattccatggtgcatatgtgccacattttcttaatccagtctatcattgttggacgtttggcttggttccaagtctttgctattgtgaatagtgacacaataaacatacatgtgcatgtgcctttatagcagcatgatttataatcctttgggtatatacccagtaatgggatggctgggtcaaatggtatttctagttctagatccctgaggaatcgccacactgtcttccacaatggttgaactaatttacagtcccaccaacagtgtaaaagtgttcctatttctccacatcctctccagcacctgttgtttcctgactttttaatgatcgccactgtaactggtgtgaggtggtatctcattgtggttttgatttgcatttctctgatggccagtgatgatgagcattttttcatgtgtctgttggctgcataaatgtcttcttttgagacgtgtctgttcatatccttcacccactttttgatggggttgtttgttttgttcttgtaaatttgtttgagttcattgtagattctggatattagccctttgtcagatgagtagattgcaaaaattttctcccattctgttggttgcctggtcactctgacgatagtttcttttgctgtgcaaaagctctttcgtttaattagatcccatttgtcaattctggcttttgttgccattgcttttgctgttttagacatgaagtccttgctcatgcctatgtcctgaatggtattgcctaggttttcttctagggtttttatggttttaggtctaacatttaagtctttaatccatcttgaattaattttcgtataaggtgtaaggaagagatccagtttcagctttcctcatatggctagccagtttttccagcaccatttattaaatagggaatcgtttccccatttcttgtttttgtcaggtttgtcaaagatcacatgcttgtagatatgcggcattatttctgagggctctgttctgttccattggtctatatctctgttttggtaccagtaccatgctgttttggttactgtaacctcgtagtatagtttgaagtcaggtagcgtgatgcctccagctttgttcttttggcttaggattgacttgacattgcaggctcttttttggttccatatgaactttaaagtagtttttcccaattctgtgaagaaagtcattggtagcttgatggggatgtcattgaatctataaattaccttgggcagtatggccattttcacaatgttgattcttcctacccatgagcatggaatgttcttccatttgtttgtatcatcttttatttcattgagcagtggtttgtagttctccttgaagaggtccttcacatcccttgtaagttggattcctaggtattttattctctttgaagcaattgtgaatgggagttcactcatgatttggctctctgtctgttattggtgtataagaatgcttgtgattttttcacattgattttgtatcccgagactttgctgaagttgcttatcagcttaaggagattttgggctgagacgatggggttttctagatacacaatcatgtcatctgcaaacagggacaatttgacttcctcttttcctagttgaataccctttatttccttctcctgcctgattgccctggccagaacttccaacactatgttgaataggagtggtgagagagggcatccctgtcttgtttcaattttcaaagggaattcttccagtttttgcccattcaatatgttattggctgtgggtttgtcatagatagctcttattattttgagatatgtcccatcaatacctaatttattgaagagtttttagtatgaagggttgctgaattttgtcaaaggccttttctgcatctatcgagataatcatatggtttttgtcgttggttctgtttatatgctggattatgtttattgatttgcatatgttgaaccagccttgcatcctagggatgaagcccacttgattatggtggataagctttttgatgtgctgctggatttggtttgccagtattctattgaggatttttgcatcgatgttcatcagggatattggtttaaaattctctttttttgttgtgtctctgccaggctttggtatcaggatgatgctggcctcataaaatgagttggggaggattccctctttttctattgattggaatagtttcagaaggaatgctaccagctcctccttgcacctctggtagaatttggctgtgaatccgtctggtcctggacttttttaggcaggaatttccttgtcctaataagcccaggagtgctacaggagaccagggcttatttcatccctcagcggcgaccgtaaaagacagccatcccgaaagcagccatttcagaggcctcccctcagggatgcattctctttctcagggatgttccttgctgagaaaaagaattcagtgatatttctcccatttgcttttgaaagaacagaaatatggctctgttccacctggctcaccagcagtcagagtttagggttatctcccttgttgcctgaacattgctgttattctgttcttttttcaaagtgcccagatttcatattgttcaaacctacatgctctacaaacaatttgtgcagttaacgcaatcatcacagggtcctgaggctacatacgtcctcctcagtttacaaagattatgggattaagagactaaagtaaagacaggcataggaaatcacaagggcattgattggggaagtgataagtgtccatgaaatcttcacaatttatgttcagagattgcagtaaagacaggcataagaaattataaaaggattaatttggggaactaataaatgtccatgaaatcttcacaatttatgttcttctgccatggcttcagccagtccctccgtttggggtccctgacttcccacaacagtttattaactttgtatgactaataatgtaaaatgttccccatatttttagcaatgttttacttatttgtgaaaggtgtgtttattaatttttcattttaaggtgtcacatttatctttcttgtttctgggatttcattctagtagatatagctgaatgcattttaacaattattgtaatcatctcacattttatatttggatttgcatatacattttattaagattttgattttgatataaaatattttcttacaattgtctcttttctatttttatgagataaaattaatgtatgcataattgcatacatcttcaatgtacagtttcagggtttctgacatatgtgcacacatttgtctccagcacctaagttaggatgaggagcaggtcagtctccacaacaagtgtcctcttcagtgcttccagtcagctctcacataaggatttttatttaatttcaagttttcattttcactaatcatcagagaaatgcaaatagaaaaacgttctggtttctgtcactacagttcaattttttcctgttttgggcatcacataaatggaatcaaatgttatagttcattttttgtaaggggctacttttgctatttgtgaggttcattcatgtatttgcatctaccaaggttttgtcatcatatatatacacacacacacttatatatgtactaatgcacatataggtatttcatatctcaatcagtccattacgttaataaatgacagtttattaagtaaatccattcattaagtgaataagtgacaaaaaatatatctattttcctgttgatggaatttagtttccaaaataaatatcgtaaacacatctgttataaatatctttgtacaagttcttctgcttatatctcccatttttattgataaaatatgtataaatataagtatgcattataacttttcagctttatggagctataactgacaaataaaattgtatgaatttaaggtacaccacttgaggtattgatatacatggggaaatattcatcgtgatcaaagtaattggcatgcctatcatctcagagaatatcattttatgcctttaatttattgtgagtctgtgatgaaaacacctaagatctactcttctggaaacagataagtttataatataatattcattagtatagttacattgctgtatgtttcatctccagaactccttcaacctgtgtatcagtccattctcaaactactttagagaactacctgagactgggaaatacatgaagagaagggagttagttcactcacagttctgcaggcttagcaggaacttatagggaggcatcaggaaaattacgatgattgtggaaagtgaaggggaagcaaggaccgtcttcacatgctggcaggggagagagagaaagagcaaggggagatgcgccacacttttaaacctcaagatcttgtgagaactctaacacaagaagagcaaaggggaaagccgcctccatgattcagtcactccccatcagacccctcctacaacacttgaggatgaaaatttgacatgagatttgggtggaaacgctgagccaaacagtatcattatacccggccactcacaaatctcatatccctctcacattgcaaaatataattatcccttctcaacagtctcccagtcttcactcaattcagcattaacacaaacttctacagtccaaagtctcctctgagacaaggtaagtttcttggatgtataaccctgtaaaataaaaaacaagttagttacttccaagctaatatgagatgaatgcactgggtaaatgttcccattctaaatgggagaaattggccactacaaatgggctacaggccccatggctagtccaaacactagcagggcagtcatcaaatcttaaagctccaaaaaaatttccttttactccatgtctcacatccaggacacgttgatataagaggtgatctcccaaggcctttggaagctccacccttgtggctctgcatgttagactccccatagctgctttcataggctggcattgagttgctatgtcttttccaggcacaccatacaagctgctggtggttctaccattctggggtctgaaggacagtggtcctcttctcacagatccactagacagtgcccaagtggggactctgtgtgtggaatccaacaccatattttccttctacactggcctagtagaggtactccattagagctcagcccctgcatgagacttctgcctggatatccaggcattatcatacatcatctgaaatctaggaggaggttcccaaacctcaactcttgcctcatgtgcaccagcaggctcaacaccacgtggaagcaaccaaagcttagggcttgcaccctctggagcaatggcctgagctggaccttgaccccttttagccatggctggcacaggacagacagggatgcaaggcgccatgtcccgaggctgcacagagcagtggcgtcctgggcttggacaaagaaaccatttttctctcctgggcttctggacctgtgatgggaggggctgccacaaagatctctgaaatgccctgcggacattttttcccaccggggtccttgttacttatgcaaatttctgcagccagtttgaatttctccccataaaatgaggttttttgtctaccacatggtcaggctacaatgttttatcaaacttttatgctccgcttcccttttaaacgtaagttccaatttcagaccatctctttatgaatgcacatggcttatgttttcagaaacagccaggtcaactcttcaatgctttggtgcttagaaatttcttctgccagatataccttaaattatgtctctgtagctcaacatttcacagatctctagggtagggggaaaatgccactagtctttttgctaaagcatagcaagtgtgaccttcactccagttcgcaataagttcttcaccttcatctgacaccacctcagactggacttcattgcccatatcactatcagcattttggtaaaacccattcaacgagcctctaggcagtttcaaacttttccacatcttcctgtcttcttgtgagcactccaagcttttccaacctctgcccattacccagttacaaagtcacttccacattttcaggtatcttaatagcagtatcccactcctggtgcaagttttctgtattagtccattttcacattgctataaagactacctcagactgggtaatttatgaagagaagagttttagttaactctcagctctgcccgctaaacgggaagcattattgggaggcatcaggacgaacaatgatggtggaaggtgaacgggaagcaagaaccttcttcacatggtggcaggagagagagagcaagtgagcggggaggtgccacacttttaaaccatcagatctcttgagaactttatcacgagaacagcgaagaggaagacaatcccatgaccaaatcactttatcttaggcccttccttcaacatgcagggtctacaatctggcatgagatttgagtcggaacacggagccaaaccatatcaaccttcataacgggaagtttttaccctttgaccaacaatacccaattttttcctcctcccagcccctgcgacctactattctactctgcttccaagagcttgaatattttatactttagattctatatataaatgagatcatgcagcttttgtctttctgtgtctggcttattccacttagcataatgttttctatttgttgcaaatataagaatttctttgtttttaaaggctgaataatactcagttttatgtaggtataagccacattttatctgttcattcgtagatggacattgactcgttttccttatctagactattatgaataatctcacaatggacatagatttgtcacactcagtttattttctctagatgtatgctcagaagtggggatgctctatgtccagttcactgagtaatcttcatgttgtttttcatactggctgtaataattcacattttgttccaaaccatacatggatacctttgtaccacatattcaggtctttgtgtaactcttgaatccatttttagctgatttctgtgtattgtgtgaggtgagttctatctatttcttctgcatatggatgcccgtttttcacaccactcgttgaagagactgtcctttctctactgtgtgtcttgggaacttgacaaagatcagtttattaggaagaaatgggttggtttccaggttgtgtttaatgttccattggattatatgtctgtttaaatgccagcattataccattttgatttatatagatttgattttgaaattatagattatgatatattcagctttgttatttatgcccaaaattactttggctatttgaagtcttttatatttttatataaattggagctttttaaaaacattttgtaaaatcatgccatggagattatttatttattttattggcatatagtagatatacctattttatgggaacatgtaatatattgatacatttataaatgtgtaaagattagtgtaagatttacatatctgtcacattaaaaatgtaccctttccttgtgctgagcacatttgaatgactcctttcgctattttaatgttgtgcattagattattattaactatagtgaccttactgatctatcaaacatttaggtcttatttctcctctataaatgtatatttgtatacagtaatcaacctctccttatctccttctctcttctatccatccaggattctggtaagcaacagtctattctatcttcaggcgatccagtattttagttttgatgtaaaataagaagatgcaatatttgtctctcttttattggcttatttatcttaacataatgacttccagttccattcatattatagcaaatgacagaatattgggtttcatggctgaataatatcctatcgcatacatagattacatttactctatccatttgtccacctacagacactgaggtgctttcacatctgggctattgtgaaagagctgcaaagaacatgggaggggacatgccttcatgaggtggtggtggttttatcttctttagaacatacccagaagaggatttgccaagtcataaggtatttctgtttttaatttattttggaatcttcatactactttgcacatagtggaaacacaaatggagtaaacattaaaaaagcagtttcggttttgatgtataatccagaaacaaataatgtttgaccatgattctcattaggagtctctaatggatctggtggaaatgcaggaagttttctaaccttgttcaggaaattatgagtttgcacctttttctttttgaggcttgaaattggcatgattcatgatgcatactgttgggaggtttcagaatgatatggcaaaaatcataatgaaaaggcaagacagagagagagggagagagagagagtcaggcctagaaagagaaaaaataattttctcaacaggagaaagtgctggatatctgtatcagtgttgagttttgctcatagacacatctgtaccgagtgaggaaccatgaagtcaagggaggggtctagaacttgttcaagtgaagcatcagcatatttctcacaggcaccaatttccaccacatcacaagggtgatgcatttttgaatgccattaaatatgagttcacagtcagtaatcatgtttccatgaaattcagttaaaataccaagggtgtgtccagatcactcatgcacaaatacacaaaatttgctttttcatgtgtggctatctagagacaaagtgcactgaggagacttcagcaggttacagagatttgcttaagtttggaaaaccatagaagagtgcctttaagtgaaggttggtatataaattaaataggtcaaaatcccctctatggagtagcgttccaattgtgtggaatttttaattccttattcagttgtaaaacataatccctaggactgactccgtggagttttactgctgtgttgacaaaaatatctaacaagcttccttccagtgtttcaagggaagtttttctctaaattttttccaatgtataaattttcctggctaaagatagtaaaaggctgttaaaaacacaactggaatggcagctttaatcttttgctgattgataggagtgagcataatacatgaatctctttgagtgttctgcctcatccaaatacaataggtcaaaggctagtactggaggtaagatttccaaatgtgtttttttccagctaccaagtcataggaaaataacagatacatccttgagacagaggaccataatgccacaatgctggtaggagtacatgtagacaagggagttcaagggtttcttaaaactgataattttaatgtaagaataccattcttttaaacttatgtggaagactgtgggaggttataacaatgccatattttagtatcagccctgcctcacagaatcattttataacagttcctttcatgagtgtgcttcactcggttcatgcaaaaacctggcagatcacaggctaaaaacagaaaatatagaagcttttaatcaactgaaagagctgtagcctttgtcaaggaattattggaagacacagagaacacagatagatgataaataaaatacattcatatcccgttaagtgtggaaattgaggaaagtttacataaatgtgtccaagtggcaaactgtttatttaatctggtaaccaatttttctataaattgtagagttgaaatgcaacaaatacatatttgaaatgatctggcacaaattaagcaaatatggtaactatgtattttcactcatttttatttaagatcagcggctcagcattgatatttttgataatatctgtgactcagcagctttaccttttgaggatatgatctggtatggcagttttcttagcttcaatgttacctctttttgcattgacttccacctttatatctgccaggaatctggggaaaaggagtgcctgtaaacgttccctaacttgcccattttggtgggttttccagaatgtgtgagatgctttttttttttttttcaaagcatcctgaacccatgcactgccctgaaacatgtttatttcctagtttaacaaattggcacttctaataaatgcaatctcttctgccatctgtgctgattttacatcagatagaggactgtgttctaaaggaaatcttatattagtaagagcaattttgtcattaacctagagttttattattgaggtgtgattcataacatataatattaggtagaggttctcagtggcagtgtctaaatctcttgggtgtacagtgtcttccccgttaacatgaagcatttacgagcacagtcatagtttccagccatgcttctccctgtctcacaatcaccacaaactaactatgaccacaactggaacttggtgagttattctttaataagttttaagtttgtctttaatctttatgcctctagattattatgtgagacataatctttatgcctctagattattgtgtaaagctatttcagaagaaagttaaaaagaacattttaactgactaaacaacacaggaaatcattaataaaatgcaaagtgtagatgtgagaggctccaggcctggataatgcaagagttcatgtatgcaggcagtttctttgcccaattatactgatacaaccagcatgtcagcttcatgccccatttgactcctattatgcaagcgcatggaaatgacatgctcaagggtcacacacagatatgaaaactggtgggagcaggagaggagacgactctgcacttctcctctgaaggaccaggaaagcctggacagaccatctccccagcctccatgactgcgcgacgtgcccacatggacactcatctctgacaagataagaagactccattgatgaggctgaacattttatgatttaaattactagagacttacattgaggtttcaataactaatttttataacccaaatttacttacccccatgttgttacctctttcttcagtgaaaaattgcttttgctgtaattgagttttaggaagattcccagtgttcacaactgagcttccaagagagtgttgagaacaaaaactgaatgagggcagagaaacccatctttactgtgttcaccactaaactcaagtggactcggcactgcctttgatcactgttgcttctctgcagagttcaggtttgtatttctcacaattctaacacagactctccctctcctcaaaggtttggcctccactggctgtaaggtcacactgttctgaatttcttgtctgaaccgttttatgagggtggtgatgagccatttaatggaaattttatatcatctcagcatgaatcctatgggcggtcacgaattattattctgattatggtaattgatttttctcagcatattcattactagtgatattcaaaaaccctttttatttaaatctttgatgcttcatttttgttgctatgacactttttcttctactgagtcttcccactagcattataacatgacctaatatccagggctcagttgttatataacaaccacatatgtcaaaagctatgcattcttttcacagcagacataattttctcttttctggagatgaacacacactggctgagctacccccactcacaagaacatatggaaaatcatgacatttttatttacttgactaataaattatgtcattctctcttcaaattctttatcccccagaatgccatgacaaactcttctgcatctgttcaaaccataaactcagaaaccacatggtgagtaaaagctcacttgattcgggatattgggtcaagctcttcccctccaatgtcccacagcattgggacctcagcccacctgtccaggttctatcaagagagtttagctccttcacagtgaaggaaacaattgagttaagagggaacctgcagaagatagacaatattgaaaaccattcatatgacaagggattactatcaagcatataaaataaactcaacccaactgcaaataataatgtggctaataatggaggaataacattaatacatatttctcaaaagaagaaaagaaaaagggcagatagatgatagatagataaatagatatattagtatgtatacatacatatatcgctagaaaacactaatattcaggaaaatgcacattcacaatgagatgtcttttcatcctttatctttgcttgagagtcagaaaatctaaataaataaataaataaaacaggagctggccaggattcatagaaagggaaactcttatagaccattggtggaaatggaaattagtgaagccatcatgggaaaaaatagaactaccatataattcacaatccaactgctgagtatgtatctatttaaatcattaaagtaaaaaactaatattgaagagatacatgtacacccatgtttattgcagcactatccaccatagctaacatatgaaatcaacatatgtgtccatcaacagatgaatggataaataaaatgtgttatatttacacaatggaatattgttcagtcttaaaaatgaaattctgctgttagaagcaacatggatggaactggacaccatcatgttgagtgaaacaagacagacacagaaaaataaatacagcattttctcagtgttatgtggaaattttaaaaagttgatcttctagaagtaaataatagagtagtggttatgagatgccgggaatgggaggagactgagagacaataagaggtttgttaacaaacgtataatttacaggcagataggagggatgtgctccagtgatctacagtgcagtagggtgactgctgttaacaatatagtgcacattttatgtttacaagtagccagaagacagaaatttgtatgttaccaacaaaaagaaatgttagtgtctaagctgatgaatttgttcattgttctgatttaatcataccacatggcacacatgcatagaaatatcacactgtaccccatacagttattatgtgctaactttaaaaaatcctttaattaaaacagattttatttgcatacattacaaatgcttcaacacagagccaggaataaataccatttttctttgaaatgtgaatttcctaacaacgtagttacattcatttgaaccaaaccgtgtatttgatcatggtaagaatagacaggcttatgcatagaatgatatattttaattttagacttctacttaataccataaattcaaataattttaaaacaactaagtaaaaactataaagttgaggaaatgtgtacgtggtgtgtgatgtgtgactttttccttgcgcaccactctgtccatggtggatgtgtggtgtgggtgtctgtgtctatttctgtttactctgcttgaggttctctgtgattctaggatctgtagttcagtgtctttcacaaaactgggaacgttcttagccattatttctttcaaatactgtctctgtatctacaatttctcctttcagatttaaaatgtacatatacaatactttttaatattaatgtttactttcttcactctcttttccttgcactttactctgtaaaatttctagtggtattttaagtgagtggtttcatttaaaaggtgagccagctctactgaagggtgtgcccaaagcttactcaatgtttatactgcattgcttttgatttcttatgcatttccatttgattttttcttagtattttcaactctcagttccctatctagtccttcattatgtatacagtttccttaatagatttttacatatgaattatagttactttatatatcttgtttaattagatagttctaagatccatatcatatagaagtctcattctgatcatttgtttattatgactttggtatttctcattaatatatgtaatctttgttgatagccagatattttaggttggacagttgatattggcttattacttcattttatgcattttctgcctgtatttgaccatactttatttttgccaggcctttaatgtggaaatgtttgaatcttctcagagctacatttgacgtttacttttgcagtagacgtcatagttgaagtctgttcttctgtgtccaccagagacttcagatcctccagtgataccttgtttttctttcctgcttggctttgtctcttcaccctgttccttcctccagagaatctctttcagctccttcaggtggattaagatattatattgaactgacaattgtgaaattggtggaaggcaatagaataaagggagattttctgacctttcatgggtctatatttctacgaaggcattgtgaccctgagtctgggtgtgacattgccggtgtttctgaacttctgccagatgagatgttggtctgtgtgttcttgctgttttccctgctgtggagtcctcttgttttccccagttgttccctcccacagctccaatgttctcttttggtgttatcagcttccagagttgatgacctgacctagagattaaggctctgattaaataagaaggaggggagatacttctcaatggaacttaggtgaagacctctttttccatctcagttcctaagggatggccccagtgcccctaagatcctggctttggtggcttgctcctgcagagtaatttcttagttctgcaatggggattaaggaggtgggtctgaatgcatttcagagtgtgggctctttttctctcccagacagacacattgggacaaaagatttttgtgactgtccccatttttgggaaaaaggtttcaaggtataggaaagctcttcagtatgtggtccctgagaaattcacgctacaacacatttaccacacttgacttcaccaattcagtatgtatgtatttttttctcttataatagcctacatttttatatgccagactctgcctcagttcaactcatacccatgcctttttactctctgcaagaacttgtctctccctaaatttcggatttgatgattatcttaaaacctccagtatttaaagtatattttaaaattggcaaaattccatctcctgtgtttatctgttatgttgatgctgtaaaacagtaagtaaaatatactcctcatctatgtacattttgaagctgagttgcaggttttttggtaagacccagagtcacagagaattcaaatattgttaagctgcttaatagaaaaacaaattatggtaaatgtgttcactggaatactacccatgatttataataaataaatgcctgacacacagaacagcagcaaaaccacacatgctcttattacagaaagtggcttctgaaaaccacaccgggcacgtacagctttgtcctggagttggtttagggggatgtcagagccagtgacgagaagcacagggccagatggcagcgttcactcatcccagacatgagctcctggatgcatacagagcccccccatgtgtgggtttacttccacttctgtaaaaggagaaaatactgactcctacagagcataatttacacattttttaaaaaatgtaatagggtgatcagggcaaagtgtttatcacagcacaatttcataagacagcatattttccaaataccatcattgtcagcaaacttctgcagagcaccgtcttcttatatgggtacagcctattcctccagcatcccactagagcttcttatatagtaggagacatgcaaatagggccctccctctactgatgaaaaccaacccaaccctgaccctgcaggtctcagagaggagccttagccctggactccaaggcctttccacttggtgatcagcactgagcacagaggactcaccatggaattggggctgagctgggttttccttgttgctattttagaaggtgattcatggaaaactaggaagattgagtgtgtgtggatatgagtgtgagaaacagtggatttgtgtggcagtttctgaccttggtgtctctttgtttgcaggtgtccagtgtgaggtgcagctggtggagtctgggggaggcttggtccagcctggggggtccctgagactctcctgtgcagcctctggattcacctttagtagctattggatgagctgggtccgccaggctccagggaaggggctggagtgggtggccaacataaagcaagatggaagtgagaaatactatgtggactctgtgaagggccgattcaccatctccagagacaacgccaagaactcactgtatctgcaaatgaacagcctgagagccgaggacacggctgtgtattactgtgcgagagacacagtgaggggaagtcagtgtgagcccagacacaaacctccctgcaggggtcccttgggaccaccagggggcgacagggcattgagcactgggctgtctccagggcaggtgcaggtgctgctgagggctggcttcctgtcgcggtctggggctgcctcgtcgtcaaatttccccaggaacttctccagatttacaattctgtactgacatttcatgtctctaaatgcaatactttttttgtcctttttgtttctttgtttttttgcaacaggagtacatatcctcagctccacagaagccagggtgtcactttgggggcagaaataatcgtttcgtggtcaacaggatgagagtcctgaggaatcccagggaaacctggagagtgttttccaattagactcagggcagagacctccatgggaatttctgattagaacgggctttgagctctgatgggagccaagagacaggctcacccagggtcggggtccttaaagcctgatggttttcacagctatcccccctcgtcttgtaaactcagactgattcagttgaccctttttctgctaatccattttgcttctctgtaggtttgattctcacagttcgctttcttcttctcttccctgagaacaaacgatgtgttttctgttttcagggaaaatcccagggctcaggtctgcaggacctgggtaggctgaggagactttctcactcaccattgtctggacactcctgttgtcttctgtgcatggaggcatttgggaaatgaagtggacattagtcattaagggaataatactagttttctccaattggatattgatgtagagctgaacttgtgcttctcacactgtcacagagtttggaccctcacctataactttgaggagagttgatgatggatagtccattgtgggtgagctctgggtaacagtaattgtagggtctggctaggcagcctaaggtcaatacttctggacctcaggaaagacaggctggaattcctgggaagacctgcatctgccatccaccgtggagtcccatcatcttctgttatgctgtgattgaatcagccccacctagtttatctagaacactcttcatgacttaggaaaacataatggcaagctctcctaacacctgtatcatgccatgggagcaacacctaagctagtgtgtgattgagtagatgagactgtgatctagtcaagacgacaggtaaaattgattgttgtcattatgatattttatatttggcaatataatcatgctcatattataaatacttttgctacattttttgagtgtgtcagaggctttggaactggaacaacttcatcttgaataggggctaggaaaaataagaccgagacctgctgggctggattcctagtaagttgatgcagtaagttagtcacaggatgagataggaggtctgcacaagatccaggtcataaaggccttgcagataaatcttacagtaaagaagctgggcaaagccctccaaaaccgagacagtggctaaaatgacctcagtttgtcctcactgttcattatactctaattataatgcattaacatgctaaaaaacactcccttccagcccccaagacagtttacagttgtcaaggcaacatcatgaagtttccttgtgtggtttaaaaaggaggggaggaacactcaacttcaggaattgcctggaggactcatgaataatccatccattgtttaacatataatcaagaaataaccataaaatggacaaccagcagcccatactgctgctccacctctggtgtagccagtctcattattttacttgcataagaaacttgttttcattttaatctgtggattttccccaaattgggacccctttctcctaatatttgtgctattattcgtgttctgagcagaaaaccccaagatggaatgaagtttccctacatttttataagaagtacattcacccctttgagcgaaaatgcacagggagtggaatgaggctgggaagctaatggcgtatgatggaagcttgtccctgactggaggagagagggagggaggattgggaggaaggttcctatatttttgtgctatgcaaggaagctgcaaaagataactgagtctcgtgtaagtcagtgctacctctcaggggatccctgtgactccaagaaagggctcttcttaggaatcactgtggagtcagtcctttcattagagtagaccacaggacatgggcctcagcacacgccatgccacagatgtcagaaagcagctgctgggaacctgatccacctgcattttgctgcctgtaggaggagggagggaggtgcattctcagggtcagcacactgtttgtgaatttttatagagaacccctgcttttgctgtatttttattggaaaatatatgaacaagtgtgcacctgcaaacaactgtaattttcacatttccttcagttgcattatttcttaatcctgaatgacgtcctgacacagagttgagtttttcacaggcattgttcgaaggatcgagatgatggcattttccacattcactggtttttctccatgtggcagagaccttgagtagagcacatctggcccttatccacactatctcttgtgtcccctgggaaagagcagagatttgcctgactgcagaatctggggtaggagtctgcacacctctgagcctgcagagaagctcagcgaagttttgtggagtcagagagctttccgtgtggggaacctctagcttcctcactctcggagattaatggtcagctgtacttgaggggttaagaattagagcaccttgggagcctgtctcatcacagttccattatgtaacttaccaccattagactgcgggtaataactcaatcttgatttttctgacccgattttttcatcttattcattactaattttgtttatggaaaatgttatgtttagtttatgattaaaacctcagaactttctgaacttatcaggaataatacaaatgtgtccagtttgggggaaatgtaaatgaatgtccatgcagtttgggtgtgtgtgtgtgcgtgtgtgtgtgcatgtgtgtttgtttgtgtgtgtgtggatatgtcagtcacttacaccacaatgaacatgattgctgaattacatagtcaaactaaaattagatttgctgaaaattgcctgcagcgatgtctgtgaagctgaccctgtcactttgctgtgaagaaactcagtgtacaggcgaggttgcacgggagagctaaaagcttctgcacacaggacaggctgagctcctgaactggagccaggcacaggactgagcacctgagaaacagaacccccagccctcctttatctgggctggatgggcaccagaggacccgcaggagatgctcagaactcacacaagacagagcctcagtgaggagcagaggcagcgaggaaccagtccagggagccctgtgaccgccacctcgggttgtcttattttgcttaacagcatccaaacctcaggagaccatttattacgttatttagacttccatgccctttctgtcccgaagtaaaacaaacataaatatgactctgcagttagctctttgaacctgggttatttttctgagaatgtcatcttcgtcatcaacatcatggtcatcatgtcaaaatcaacaggcaaatccagtcaccgtgaagacagtttcatggcatgattcatacacaatcattccattccacagagaatctctttcagattcttaaggtggattaaagtgttatatttaattgccaattgtgaaattggtggaagacattatactaaaggaattgtctctgacctctcatggggtcatatttccagaaaatcattgtgatcctgagtgtgagctgactttccaagtgttcccaaccctcctccagatgagatgctggtctgtgtgttcttgctgcttcccctggggcagattcctcttgttttccccagttgttccctcccacagctctcataatctctgttggtgtccccaacttccagatctgctgccatgacctgcagattaaagctctgattccgtaagaaagtgaggggagctgcttctcaatagagctttgatgggaacctctgttcatacctcaattcttaaggggctgcaccagtgccctaggatgctgattttcatggcttgctcctgcagggtaatatcttagttttgtagtggggatcagagaactgggtctggatgcatttcagaagtgtgagctcattctctcccagacagatactatgggaaaggaagatgttttgcaggggtaaatgattcaagagattagggcaactctccagtatgaggtcccttagaatttctcactataacatgcctaacacactcgacttcaagcaatccagtgtatatttgttcttcatcttgtaatagcctacattttatatgacagcctctgcctcagggaatttcatactctggcttcattactctctacaggaacttgcctctccctagatttcaaatattttgtttgttttcaaccctcaattatctgaagcattaagtaaaatttgcaaacttccatcttttctgtttatctgttattgttgatactattgttgtaagaatgaatatatgggcccggcgcggtggctcatgcctgtaatcccagcactttgtgaggccgaggtgggtggatcacgaggtcaggagatcaagaccatcttggctaacacggtgaaaccccgtctctactaaaaatacaaaaaattagccaggtgtggtggtgcgcaccagtagtcccagctacttgggaggctgaggcaggagaatggcgtgaacccgggaggtggagcttgtagtgagctgagatcgcgccactgcactccagcctgggtgacagagtgagactctgtctctaaaaataaataaataaataaataaataaataaataaatatgtgtgtatatatatatatatttctcatctatgtacatttttaagcttagcagcatattttttagtgagatccagaataataaaagaatccaaacatttttcagctgcctaatagagaaacaaattctggtaaattttttcactggaatactactcaacatttataataaatatatttctggtacacagaacagcaaggaaaagtatctaagtatttatgctgagtaaaataagccagacaaataagaatatgtactatattactccatttatgtaatttatttcaaatgaaaaaaatctaaagtaatatacaaaagatgagtagttacctgggaaaagggtagaataaaggaaggggaaatgtggaaacatacagaagaacaagagaaaatgttgaggggaactcacttgtccacctcagtaatgatgacgcttacatcatgttttcaattctacactttaaatacgtgaagtgtattatctgccaattaacactcacaaaatttattgcaagcaaacaaatgaaaaattagaccaaaagcggtggtataaagatacaaaatatccattaaaagtcagaaatatatgagaatttgcctcctgaaccctagttctctccttatttttaggtgaatgctagagtgccacaaaaatcactcaagttctcaatacaggaagtgggttccacaaagcacactaggcatgtccaattcttacctggagttggttcagggagtaactggggccactgatgtggagcacaggccaagctaccagggctcattcatctcagacatgagacacacacagcccctcctccgtgtgtgggtttatttcacatctgtaaatggagaaaccattgacttctacagaacataatttacacaaatatgtaaaaatataatagtgcaaaatgtttatcacaacacattttcataataagacagtgtattttccaaataccataattgtcacccaattcctgcggggccctgtcattttatctggggtctgccatctcctcagggttcccaccccagagctctctgtgtagcaggagacacgcaaatagggccctccccatgctgatgaaaaccagctaaaccctgaccctgcagctctggcagaggagcctcagccccgggattcccaggtgtttctgcttggtcaacactgaacatacaggattcaccatggagttggggctgaggtgggttttccttgctgctattttaaaaggtgatttatggagaactagagctattgagtgtgaatggacataagtgagcgaaacagtggatatgtgtggcagtttcttaccaggatgtctctgtgtttgcaggtgtccagtgtgagatgcagctggtagagtctggagcaaacttgacaaagcctgggtgtccctgagactctcctgtgcagcctctggattcaccttcagtagccatagcacgcactgggtcccccaggctccagggaagggtctgcagtgggtcccagttattagtggtagtggtagtaccatgtactacgcagactctgtgaagggccgattcaccatttccagagacaataccaaaaactcactgtatctgcaaatgaacagactgagggcagaggatgcagctgcatatgactctgtgagagatacggtaaggagaagtcagtgtgagcccagacacaaacctcccttcagggtacctgggacaaccagggaaagcctgggacactgtgcactgtgctgaccccaggggcaagtgcaggtgctacaagggctgggtttcctgtcttgatctggggctgccttgttaccaaattacccgagggaacttctctagatttgcaattctgtactaacatttgatgtctgtgactgctaaacttccctcacatatttgttttttgtttgtttgttttgttttgttttttgtaacaggaagacccatcctcacccctacagaagcccgagtgtcaccttgggggcagaaatgaccctgccttggtcacattgatcagtgtcctgaggaagcccagtggaacctggggagtgttttccagtcaggctcagggcagagacctccgtggaaatctctgattagaataggtttgggattcagacttgggccaagagggagtctcacccatgggagggtccttaaatcctgacagtttttacagctgttctccctcctctggcaaaactgtgcacatctgactcagaactgatccagctggcccttacttgctaatcaatttttcttctctctacacttcattctcatagttcccttttcttcccttcccagaaaacagagagtgtgttttctgtggtctaaatctcagggctcaggcctgttacctggaactcaggtgtggcccaggctgtggctcctgtgagacctggggaggctgaggggactttcccactcaccattgcctggacccgcctgctgtcttctgtgcatggaggcatttgggaaatgaagtggacattagtcactgaggggataatggtagctttctcaaatgagatactgatgtagagctgatcttctgtttctcacactgtcacagaatttcctccttcatctgtgactttggggaaagctaaggatggacactctattgtgctgtgagctctgggtgacagcaattggagggtctggctaggcaaatcctacagggtttcaggtcaatggagttggaatttctgggaagacctacactgtcatcctccatggagtcccatcatcatctcttatgctctgatggaatcagccccacctaggttatctaggacaatcttcctgacttaggaaaaaaatgatggcaggctttactaacacttatattataggatcagtacaacacctaggttagtgtgtaactgaataaatgactctatgagtcaaggggacacataaaattgattgttgccatgacatttatttatttatttatttatttatttattggaaaccagagttttattgttactgaaatgagtctcgccaagcattcaagaatgggattttttaaggatagcttggtgggttgggggcagccagtgagtcatgagtactgattgatcaggtcagagataaaatcatagggagctgaaggtgtcttgtgctgagtcagttcctaggagggggccacaagatcggatgagccagtttattgatctgggtgatgccagctgatccatcaagtgcagagtctgtaaaatatctaaagcattgatcttaggctttataatagtcattttatccccaggagcaaactaggaagggttagaatttgtagccaccagctgcatgactcttaaaacataatttctaatattttggctaattcgttagtcccccaaaggcagtctagtccccaggacgaaggagatttgttttgggaaagggcagttattgtctctgttttaaactataaactaaactaagttcctcccaatgttaggtaagcctacacccaggaatgcacaaggacaacctggaggtttgaggcaagatggagcaggttaggtcacagctctttcactgtttcagttgcagctttgcagtggtggcttcaattcctccctttgagttttgaccttatcgacttgttttgtttctctttaagtgatggttttataaccatctatgaaactctaacaggtgctctcacatgcagatttctgattaaaaactctgaagatggttacaatagtatagagataaaactatcaaatagaagactatcttttttgacttttcacttaaaatgttgcccaagaaaacttttcttttgagctatttatagctttcaacaattgagtatagtcctgtacataaaatttggagaatatttgtttctctctgtccactttctccagaatttggaaactctttgtgaatatccttaacttatggcaatatgatttttcataagtgcagtaagattttttttttttttgcaacaggacacaattggagaaactggttattttaccaaggctttgactgtaatggcgtgcttcaccttaagcaatcgaacttgacttatacagccaataagagccccttgggaaaactggcctgtaccttgtccacacagtctttgtacaaggttcctgaccagtggtaagtaaagaatgtcactttctaacaggcccaagaaccccatgttttcctgggaccccagaggaaaaataatttaccagacttacaggtatttgatggtaaaaactcatggctgggcttggctttaaaaaagtcttatctgagattccttatggaacagagttccaccaaagccaattttaaaagcctgtgtaaacaataattatttgtattgtgctttatgcaaataataaggccatgaataataagactaaagtttattttgcaaataaatcagtcctatcttgatttgttttaaataaaaatggggacaagagagaaaaaaattatgctttaaaaatatagtacacctgttgtttgctgttcttgtttttttttcttcagcagtttggacgaaattctaaattatttgtaggctacaaagccataaactaatgcgttcaaatctttacttttaaaactgcgaattgcactccttaccccagttctcattatgtactttatagtatgttgttccctccaatgtggtgctggaattatagatgacagcactgacagctttgccatgcaagccttggaaccccacgcaggcctgcgtgagtacactcagacagttgcaatgaggttccagtcctcttatcttgaggtcagcacctacccctactacgccccaggtcatcaataaaaagttgtaacagtcttggcccttcttacatcttcattatccaacaccatgatttttgttttttgccaaaacaattgccaaatatagtcataatcataggataaataattttgctgaaatatatgtgttattattggtcttttgagatggaaagtccaagactggattatgctttcatgcatttttcataagaagtacttccactcttttgacaggaaacgcacagggggtgacatgtggctgcagaagctgatggcatatggtagaaatctgtccctgagtaaaggagagatggacggaggattgggtgaaacattcttaggtttctgtgctgtgcaaggaaggtgtaaaacatatttgagtctactacaagtcaacattacccaagggggaacccctgtgactccagcaatgactctgcctcagaatcactaaagagtccttcctttcattagagtggaccacaggatctgggccatagcatagacgtcagaaagcagcagcttgacacctgatccatgtgcattttcctgcctttaaagggagggagagaggtgtattctcagggtcaacacactctttgttgatttttacacagaacactggcatttactttatttcattgaaagatatatgaacagatgtgtgtctgcaaatgattgtaattttcacatttattccaattgcataatttttaaattctgcttgatgtcctggcacacagttgtgttttctataggtatttttcaataaatcaagaaaatacattttccactttcactggcttttctccatgtgcagaggccttgagtagatcatgtctgactattagtctgttttcatgctgctgataaagacataccagagacttggaagtttacaatagaaagagttttattggacttacacttccacatgactggaaaggcctcacaatcatggtggaaggtgaaaggcacatctgacatggtggcagacaagagaagagagcttgtgcagggatctccctttttacaatcatcagatctcgtgaaactcatgcagtattacatgaacagtgctggagaaacccgcagccataattcaatgacctaccactgggtccctaccatgacactgggaattatgggagttaaattcaagatgtgatttgagtggggacacagccaaaccatattattttgccccatggcccctcccaaatctcatgtcctcacattgcaaaaccaatcatgcctttcctacagtcccccagagtcaacttgtttcagcgttaactcaaaaatccacagtctaacatctcatctgagacaaggcaagtcccttccacctataaacctgtaaagtcaaaagcaagttacttcctagaaacaatgggggtactggcattggataaacacacccatccaaatgacagaaattgcccaaaacaaaggggccctctgcaagtccaaaatccagcagagcagtcaaatattaaagctccaaaatgatcccctatgactccatttcccaaatccaggtcatgctgatgcaacagatggtttcccttggtcttgggcagctccacccctgtggctttgcagggtacagcctccctcctggctgctttcacaggctggtgttgagtgaatgtgccttttccaggcacatggtgcaagctgtcagtggatctaccacactgggatctggaggatggcggccctcttctcacagctgcactatgcaataccccaatagggactctgtgttggagctctgaccccatatttacctttctcactggcctagcagcggttctccatgagggtcccactgctgcagcaaacttctgcctggacacccaggtgttttcatacatcttctgatacccaggcagaggttctcaaggaccagttcttgacttctgtgtactcactggctctacaccatgtggaagctgccaaggcttggggtttgcaccatctgaagccatggcctgagccctacattggcgtctttcagccatagctggagtggctggacacagggcaccaactccttaggctgcacacagcacgggcaccctgggcctggaccacaaaaccacttttgcctcttaggcctccaggcctgtgatgggaggggctgccgtgaagacttctgacattcacaggagacattttccccattgtcttgaggattaacatttggctcctcattacttatgcaaatttctgcagctggcttgaatttcacctcagaaaataagatttcttttctactgccttgccaggttgtaaattttctgaacttttatgctgtttcccctttaaaactgaatgcctttaatagcactcaagtgggctttttgaattctttgctgcttagaaatttcttctgccagacaccctaaatcatctctctcaagttcaaaattccacaatttgctccagttcccaatgagttcctcatctccatctgagaccacctcaagctagaccttattgttcatataactatcagcatttttggcaaagcaattcaacaagtctctaggaagttacaaactatcccatattttctggtctttttctgagccctgcaaactcttccaatctctgcccgttacccagttaaaaagtcacttccatatttttggttatcttttcagcaatgtctcactctactggtaccaatttactgtattagtctgttatcacgctggtcccaagactggacaattcataaaagaaaggtttattggacttacagttccacatggcttgggaggcctcacaattatggtggaaggtggaaatcaggtctcacatggtggcagactagagaagagtgcacatgaaggaaaactcccctttttaatccatcagatctcatgaaactcattcactatcacacgaatagctcaggagagacccatgcccataattcagtcacctcccatcaggttccttccatgacatgtgggaattgtggaagttacaattcaagatgaaatttgggtggggacacaaacaaaccatatcactgaccttctccgcatcatctctcatgaccccagagaaagagcagagatttgtctggggtaggagctgctcctgtggaacttagaggctgcagacgaccccagtgcagttttatggagtaagagagttttcccatgtctgggaacttctagcatacccactgccagagattgctggttggctgttattgaggggttcagaattagatcacctggtagcctatctcactgcagccccattgtgtaacttaccaccaatggccttcacgtgaggactcaatgttaactgttctgacctcattttcttacctcctttatttgtaagtttggttacagatttttttttactttaatttcagggatatgtgtgctgaatgcgcaggttttagtttcttattcaagccttataattgctcaactgatcaggaataatacaacatgtatgcagttttggggaaatataaatgaacatccatgcaaaattttttgtttggatatgtccgtcagttacacccctatgaacataatagccggtcctcaccagaaattgctggtcctcaccgatctcaaaagcatctagatcttcaacttcctagccttgagaattcagaaaacaatgtttatgatatttctgagccacccatttaatggagttctgttatagcagctgaaacagactaaaccatttaccaagtctcagtaagggcagtgaggatccaccatgcttgagagacaagcattactctctcatttgcagctcaggatgacagaagcatgatcatgagctgatctgaaaagaagatgtggctttctctccctcggatctcagttgaagccatggtgtcacatctctatggtggagactaaattccagtctgtgatgtaatggatgcctgcctcctcccaccctcacttacgagacagagtttccatgccatgcgttattgaccaagaaccaagaaggactccaattattctcacccctgctcacttgtatggcagaggttctggggatattcctgggagaggcataatgagactatttaagtccacgattcccaaacagttttatgctcttaaagcaggagtatcactttgagatatatgaataatttcatgtgcactaaggtggaggctgttatatttttataggtaaagatgcatggcataaagacagagatacagcactctggaaattgtgtgactatgtttgcagttgactgtgaataatttttaccatgaagttatcctaaaacacataatatatttttactgtaagtaattaatgaaaagctgacagctccacaagagcaatatccacttggtttagcagagagaatgagaaatagcataatttaagaataatcagttagacactgtgccatgtgcctgtattttcaactagtgaggatgctaatgtgggaagatcacccaagcccaggatttcaaggccagcctgcaagatattgctagacccattttcttaaaaaaaaaaaaataacattctgggtcatgacaaacctcaaaaactgaccctctaaataggaacaaatttaattgcattaaaatgtggatgaatttttgacacaaaacagtgacagcatgccagcaatgagtacagaataacatccagttgttatgttaagagatacagactccgaaaaagagacatcaggtagaggctgtcaaaggcctcactgcctaatgactgcttttccattgatactgtgtgtatatcccggaatgcacctgtgaatgaggacatcatgtctttcatagtgtgagagaaagagacattactacccatctgacaaaggattgatcagaatataccaggatctcagacaactctataggaaaaatatctagtaatccgaataaaaagcaggcgatatttatttcttaaaataagactttcaaattgcaaacaggcatataaaatgtgctgtgtaacactgatcatcagaacaatgcaaaacaaaactacagtgaaatatcatctcatctgattttaaaatgatttcatccgaaagccagacagaaacaaatgctgggaaggatatggagaaatgagaacactcataacctgttggtgggcacttaagtttataaaaccactatggagaacagtttagagtttcctccaaacctaatagtagtgttgtcatataatccagcaatcctgctgctggcatgtactccctcccacaaaaaaaaaatgttgtttgcactaccatgtttgttatagcactgttcgtaatagccaaaatttgaaagcatcctaactgcccattaacagatgatggataaataaaatgtggtacatatagcatatggattaatattatgccataaagagaatgagattttttcatttgcaacaacgtggatgaaactggagttcattatattaattgaaataatcccagaaccgaaagacaaacttcacatattctcatatatttgtggaagttaaaaattaagacaactgaactcgtggagatagagagtgaaaggatggtcaccagaggctgggaaggtctatggtagatggggattattggggatgctcaatggatgaaaaaagtggttagaaataacaaataatacatagtatttgataacacaacagactaagtataatccttaataacataattatagattgtaaaataactaaaagtgtataaatggaatgttggtaactcaaagaattaatacttgaaaggatgtaggaaccattcatcataatgtgagtattatgcagttcatgctatatcaaagtcaggtaccccataaatatacacatataccatttacccacaaaaattcaaaattaaagtatttatgtatctcatcttctgtatctatattacattaaacctaagaagatactggtttcttcacactaccaagatccacatagacatccgtagcttctttctttgcctgtccataatctgacattgaaaaatgaggaaacctttcctatcatatgacattaatttacttagtgcacaatttcaaaatacacaaattgtgttagaattattaaactgacccttgttgaaaatatgtttatcgactagaataccgtgcttatatgcagcttatttatattttacaatcacaacatcaaattatttccaaagatacttgtttctgatattcatgcccccctttctgcagtgaaattagtacaaacctgtttatcattgttagatatttttatacagctttcattttattctgtgtttcatgaccagctaaatacttttgaagttgtatgcatttaggttaacactttgtctcaaaaaattatgagttttcacaaattatttatgccatgtgtttatcattgaacaccatgaaaatagtttcattgtgattaaaaagtgtgtgtttcacctaatccacacaccttttccccagattcctggaaaaccacaaaggtttactggatctatatttttgtctttggcaaaatagcctggctattctcttagcttcttctgcaaagcatcaagattcaccttcactgactgcagcatttattgggccctgatggctggaggagaggggctggagtgggtggtagccatgagtgacccaagtggaagttctcagtggtgctctgctccagcacaaagaagattcacagttcctggggacaacacttaacatcacaatctcccttaaaattatctactggaaagctgaggagtaggcagtgtattactgtgagagacacagtgagggacatatgggtgagtctagacgcaaacttccctgcaggaagacaagaggggactttgtggtaaatggtgctcagaaccactaggggacactcagaaccactaggagacactcaggatagcagaaggtgctcaggatgccgcagggtgctcaaaacactaggggtgctcaagaccagcagggggcactcaggacaccaggagacacttaggacatcagggggcgctcaggacaccagggggcgctcagcacaagcaggggccacagaatgacaagggtgcattccagaccaccaggaaacactcaggaccaacaagagattctcagaaaccaccaggtgtaacaggaccacctaaaggcccacaagacaaccaggagacactcatggccactgaagaacattgaggacaccaggggttcagggccaacagggagtgctcggggccaccatggggctttcagtaaccacgagggaatcaatcactcaggacaccacggttttcttaggaggcagctccacatcaggtgcctggggaaggtgacgtttgcttttagacctagctgattcctgagctggtcaagcaaaagtcttcccacgatctctcactatttcttccttgtaacccatggtttctttcacatacaaatcattaacttaggataggaattcaattcaacttttaaccttgcatatttttagaataataatagcaatagtaattcaatgtgttttgataataagaaattgtgtatgcctaattcaaactctggttccacgcatgggtttttgtttcttgtgctgtgccagtcacactacagtcaatgcttttctaataataactcaacaatgtcacggtgttaagtttcctttcattttgtctgccatttgtggagatgaaacaccactttcacgggtcagttcctccactttggttgggttctggtcttctgctcttcacactgtttctccaccttcccttctgtcaaatccttttgtcttcctcagtctcctggcaaagaagcaacaaatctatttattttgtctcctccacgtctggtgaatctgttcacttctcttcatgatcattgaacccaaccatgtttagaaggataacagttcaccttacaatatgctcatgtaggtcaggtgcagtggctcactcctgtaatcccagcactttgggaggccaagacgggtggatcatctgaggtcgagtttgagatcagcgtggccaacatggcaaaaccctgtctctactaaaaatagaaaaattagccaggcatggtgtcgggcacctgtaatcccagctactcgggaggctgaggcaggagaatcacttgaacccagggtgagaggctgcagtgagctgagataatgccacttaactccagcctgggcgacagagagaaactccatctcaaaaaaaaaagcatatgttcatctatccgcagactctctgacatcgtcacccttttctagggtcctgcagacatcaccccacaacatccagtccttttcctaagtaccacagagtgggctctgcagctcctgctgctctctgtgtgctcagcgctgaggctcaccagtgctttgatgatgaagttcaaatccctaatgtgtttgcaattctcagacaaccctctagcaagctgccattgtgagtgcattctggggatcctgggctgatttcaggtccatattgctggatgttctctagcatccaggcgtgttggcaaataaacatctagaatttgtattgaaaatttgtggaaaatcaatggtagaaaacaatcctaatttctaaataagaacattttatcctgactttataaaaacacaatgttaatttaaccaataatgtaataaaatgtgtttaaagtgatgtttatcttgttattagatgtattaataattggtattttaaagtatactaacagcataaatgacaaacaaaccaacacagcgattatacataaataccattgtacattaattaatttggcaagaatggcatttattttcatttctaccaaaccttgcctttaaatatgtttgttaattggcattaggatagtgaaacaatcacacagagcaacaacattttggaatattacattatactataaaatagtacattcgattcaattatataattaaaataacattaaataaattcatgttttggtttgatatttggatatgtgttcatttttgtattttctttttttgtatcttttgtagagatggggtttcaccatgttggacaggctggtctcgacttcctgacctcaggtgatttatcgggggaacccacccccaatatttcaatgtagggtctttctattttctgtaagtgtcggctggtctgagaaataaagagaaagagtacaaagaaaggaatgttacagctgggccaccgggggtgacatcacatattgataggtccgtgatgccccctgagccgcaacaccagcaagtttttattagggattttaaaaggagagggggtgtacgaacagggagtaggtcacaaagatcacatgctttaaggggcaaaaagcagggcaaagatcacatattccttccccagggtattaattactaatattccttgctgggaaagaatttagtgatatcttccctacttgcacatcagtttataagctctctgcaagaagaaaaatatggctctattctgcccgaccccgcaggcagtcagaccttatggttatcttcccttgtttcctaaaatcgctgttgttctgttctttttcaaggtgcactgatttcatattgttcaaacacacatgttttacaatcagatttcatattgttcaaacacacatgttttacaatcaatttgtacagttaatgcaatcatcacagggtcctgaggtgacttacatcctcagcttacaaagataacaggattatgagattaaagaaattatgaaagtattgattttgggaactgataaatgtccatattaaaatgaaatcttcacaatttatgtttagagattccagtaaagacaggtgtaagaaattataaaagtattaattttgggaactgataaatgtccatattaaaatgcaatgcctagggccaacaaaggagtcatattaatatgaaaaataatagctgaatattttggaaatgacacatgcagtaacaaatgtctatatgaaattaagaagatattgacacaaaattgagaaaaaattaacataattatgctcactactggtttataaaatgcctataataacactttttaaatcatattatagaaaataaaataactatataaatagcactctctttgcttgattttagtatttggtgcttcaaatgttttttatacaaataaacattggtcattttttgatggtaatttcaatattttcttccagaatacatgttcataaatgtaattgaaattgtataattttcagaaacttattttatcagttgtgacttgtatttttatgatagactttttacatttatatacttttgattcagaataattatagataaaaaaattataaagttaatacagtgtgttcccatctccaagtatctcctaagatgaatatcctctatcatcataagacatggtgttaacacatttacattgataagtgtaaatatattcaataccagaccttattttatttatcatttttccaataatttctattgtaaatgaaaaataaaattctaagcttcctcaagcaactaaatgaactcaaccctcagccaagggaatttcaaagtaaattctaaaacttgttccagcaatgatgggaaagtgagaggtcagacatgcctcattacatgctcctctctttggaattaaggcaccagtggccagcattagtactacaacaaagatcttaagacgggcaaaactatatttttgctgtaaacactttctatagcaaaaagacatcaaattacaacttgattctagtatagcatcacatgacaaatagcaaaacctaatgatttattctgtatgaaatctgctacctggaggcttcatctacataataagaactatgatctccaggaccccttatcttaatccagacactcagttgtaatgattgtattaccttacatttcaaccaattgccaatcagaaaatctttgaattctcctatgtcctggaaccctgtgcataaactttcctgcctttctagactgcataaatggtatagctcacatgtgttgattaatatctgcctgtaacttctgacccactaaagtatataaaatcaagctgtaatcaagccattttggacatgtgttctcaggaattcctggggtcgtgtcatgggccttggtaactcatatatatctcagaatgagccattttaaatatttcatagtttgtcccttttagtggatatcttcttttcttttttttgggacagaatctctctttgctgttgctttcgtatatttgtttgtttccagattccatcaaggccatcagtttgaattcagttgtcttgttcctttattctcttctggtaaatgacagtttgtatttctgaagttttctagttgaatattttatagataaaaatttatcaagtaggttgatagtgccatttgggactcttatatctttacctatttaatcattgcttgttttctcaatcacaatgagtgttgatttctccatgttctatacatgttagtctattttctgttccaaatccatttattaggtcttttaaaatggattttggaaaagttgatcctattattttatgcaatatttcacttgagttgcaaaggtattctttttatgattattttgtctgaaattaacatagctattcaagttttctttggtttatattttcatggtctatatttttccatcttatttcttctctttgtgaatatgttaagaagttttcttggagaaagataattgctgggtcttttttttttttagtcaactatgaggaattattttttaatgatattacccttttgtccaataatggttgttttgtctttttacaataatatgtattgtttctattaatttattatttaattattattgatgaatatcttattggttaccataaggataacaataagacatttctataattgaattctaattcaaaaatgtagtacttctttctctttcttatttctttgagacggagtctcactctgtcgcccaggctggagtgcagtgggacaatctcagatcactgtaagctctgcctcctgggttctcgccattctcctgcctcagcctcccaagtagctgggactacaggcacctgccaccatgcccggataattttttgtatctttagtagagacaggctttcaccgtgttagccaggatggtctctatcttctgacttgtgatctgcctgacctggcctcccaaagtactgggattacaggcatgagccaccgtgcccagcctacccctttatatatagaacagagatattataactatatatgtctaattcctcttttctatcccttttttattttatcagtttgtaattacataagctataaaaatgtaatattgacatttttataattgctttacacatttatgtaataaagaaaacacaaatgcaaaaactaaatttaaacctcatttttttcattgttgacaatctttatcttttggatacattcaggtattggatgtatatcatatggctgctcatctagaaactctgctaaaacgtctatggcaagattaatatgctgggaatagattttctcaggatttgtttgtccgacagagtatttatttgtctttgatttatcatctcaagagacaatgtcaagaagatgctgtttctgcaaatgggcaatctgcaaaccaaggacacgtcactacattactgtgcaagagaagcacatgaggaaaggccggtgtgagacacaaacctccaggaacacctgggctaatgagctgcagggggcgctcaggacccactgatcagtcaaccacagaggggagtgcaaaggttaggactgctttcctgcaagcattgaaaaaagaagaaaaaaactccgtctgacagtttctccaaggaacttctgtaattttagaattctgtgcctaccaatgacatctccaaatatttttttaaaatattgtgtttggaggacatactctcacatggacaaaacacaaattgacacagagatgaaaagccctcaaccatagtcaccaaaattggagacatgtagaagctcactgggacctgttgagtcttctccaatcacactcagaacagagaccttagtgggtctcccttagagtagtcattaaggatggtgataacagcctaaagatggtagaccatggtcagtgtcatatagaatatggggaccctcacaagttttttgtctgacccttctcctgacactaaattatgcaaattaataacactgatctggtgcttcttttgattctaatttattttatttttagttgtcgttctcacttttcctttggattttcctgctccctggaaaaggtaaatgtggtctccgtgacctcaattcaagggctgaagccctttccctgtagctcagctggggctcaggctgtggctactgcagccatgtggaagaggctgaagggactttcttcactctccttgctcaggaccatccactgtattgtgtataggcttctctggaaatgcaagtggccatttgtagtgaaagaaatatgtttgtctggttaaaatgggaggtggatgtagagttaattggctgctacataaactgtccttctccaccagtgcttttaggatgagattgtgaaatttgtaagaatcaaaatggagtcacatatgttaaaaccctgacaaatggattcaggaagtgtagggagaattcttacacacatatccctgacaacaagaactatcataaaatagttcttgcaaaaagaccaacatgacctcataatcatgacttctgcaaagacttctactcagaatctacttgcccagccttagattaatgccatctgaattacactgatcatgttactatcactggtcctcaccacagatgcaacaccctcctgagtcctgaaacctgactccatcccatagagtagggcacagatgaggggaatgcaaatctccaccagctccaccctcctctgggttgaaaaagccgagcacaggtcccagctcagtgactcctgtgccccaccatggacacactttgctccacgctcctgctgctgaccatcccttcatgtgagtgctgtggtcagggactccttcacgggtgaaacatcagttttcttgtttgtgggcttcatcttcttatgctttctccacaggggtcttgtcccagatcaccttgaaggagtctggtcctacgctggtgaaacccacacagaccctcacgctgacctgcaccttctctgggttctcactcagcactagtggagtgggtgtgggctggatccgtcagcccccaggaaaggccctggagtggcttgcactcatttattggaatgatgataagcgctacagcccatctctgaagagcaggctcaccatcaccaaggacacctccaaaaaccaggtggtccttacaatgaccaacatggaccctgtggacacagccacatattactgtgcacacagaccacaaagacacagcccagggcacctcctgtacaaaaacccaggctgcttctcattggtgctccctccccacctctgcagaacaggaaagtgcagctgagatacgttttcctgccagggcctgcatttcccatccccattagactcagagccctgtcttcctccttcttctttaataataaatggcatgactcctgttaatagttcatagaagcagaagctgagtcctgtttgtcaaacattcagcatgaaatgttcatgttacctgggccagatgcatcactggtatgtggccgccagtttaatgggctcatactactccaagcggccgaatacaaaacagcagaacatatgcctttattaaactgcaggaaatgacactggagaaaaatgtggggataagggagcaggaggaattgtgaaaattcagataatagcttttctcgtagagagaaaggtgcgttaataaaataattttataaaacaataaaacagatggaatgtgtccccatcacggagtgtctcacagtaacagtgcagaaataaatttctaaaaatgtcgtagggtaggtgtgatagacaaggcttatttccacacagggagcccataaatacccatgtaattaaaaatccagctcttagaaagggagtgcctcaacttgacatcagaaacccacgtcagtgagtctgaggagcaatgtggaaaagaaatggaaaattcaacaatacctttcttatgaaaatcctagctcacgtttcaacatgaaacataactgtctacaattttaggaaaaccatcccatggcaacaagtcactacactcaaaaggtactgagctaacagagttccagcagtgagcaggtcagtgctgaaatccccggagaatcaaggctctcaggtacgttgtacaaaacccagaactgagccacacaatctatggtcaagtgatctttgacaaagtcaacaaaaatatgcacggggaagaggccacgctcttcatgccatgttgctgggacaattggactgccatatgcagaagaatgaaactggacaccaacctgtcgacatatacataaccataagaaaatggactgaaggcttgattataggacttcaaaatataaatgtactcgaagaaaacaccaggagaactcctctggacattgggcttagtaaataatttaccacaaaaacctcaaaagcacaagcaataacatcaaaaatagatgaatggaatttagttaaactaaagagcttccacacagcaacagagtgaacagacaaattgcagaatgctaaaaaatatttgcacacattgcatctggcaggggactgataggcagaatttacacggaactgaaacaaccccaccacaacaacagctatgaaaaaacaaataacctcattaaaaattggcaaaggacacgagtaggaatttttttaaagaacacatataactggacaagtgctaaacatcactgattatcagggatatgcaaattaaaactgcaaagaggtatcttacaccagtcagaatggctactataaaagaagcaaaaatagcagacatcggtggcgatcaaaggcaaagggaagtctcagtcattgttggtgaggatgtagatgagcacagcctctatggaaaacaatgtggagatttttcaaagaaataaaagcagaactacctttgattcaatgaccccaccattgggtaactacccaaaggaaaaataaatcatcatatcagaatgataaccaaacttttgttttcctgcagaactattcacagtagcatagatatcaacctaaggaattaacctgtgtcttacaacagataattttatttaaaaagtcacatatatatacaattaaatactatccagccatattaaggaatggaatcatgtattttgcagctacatggatggaactctgggtcattattttaagtctaataaacgagaagtagaacagcacacaccacactttttcacttataaatgggagctaagtaatatgtgcacaggcccatagagaaaggaatgatggacattgcagactcagaaacatgggagagcagaagttgggagaatggtgagaaattacttaaagggtatgatgtacattatttggatcatggatacattaaagccaagacgactatgcaatatatatatgtaacaaaattgcagtcactccccgtaaatgtatacgaataaaataaaaaaaaatacaattgaaatgtgaaattattaacagttgatcaacaatcctgaaaattaaaacgtgtgatgcaataaatgaaaataattttagttgaacttcatcaaattttaaaacattttctattcaaccgactatcaagaaactgaaggacaagcttcaggggagaaagtatttgcaaatcatacatctaacaatgtaattataataagaaccctcaaaactcaacagtaaaaagaagcaatctgtttataaaataggcaaaggtttgtgcaaactttctatcaaagaagatgtacagatgacacatcagcatatgaatgtaattttccagtagagaaattcaaatcaagaccaaaaggagacacgactttaggctttagaatgaggaaaaataaagaagaaatactgacagtaccagtgtcagtgagcatgccaggccccgagagactaaaatattgctagtgcaaaatgaaagagtttctgggagaactgtttacagtttcttataaaattaaacatgtccttaatccatgacctagaactctcatccctgagtatgtcctacaaaggattaaaatcatgtgttcacacacacacgtattcagatgtttaacattgtgtgtgtgtgtgtgtggtgtgtgtgtgtgtgtgttagaaactaaaaacaacatgaacatctttgaaaatttgacacaaaccattacaggtgaactccagactttcttctgagtgacagaaggcctgcctgaaagatccccagagacacagtcatggatttcactgtcaccctcacatgtcactggcttgggctgggctctctctggctcttccctgaccaggaccagatgttgagctccactacctgcagttggaagtttatattttcaacaatgcactgagggctaagttgctctacagactgaaccaaacaaacatgggcgcctttgaacaaacagtgcctgacatttgtactgaccccaggagaactcttcccgctctctttcttcttggttctctcctgcaggccagcagccctgcagtttagcctggacctctcatgcatctacccatctcctcccaagtgcattttaccacagcctccactgtttttgtaattctccacactctgttgtaaatgaagtcaggtccttcgagaccagattcgggactctattttatgaccaaatttcagcctcacccccactcctgagacagagctcctaaataagattctgcaggtggagattaagagcgtttttcttcctcaatgtaggagatgagtgctcagtggagggatggggaggagctttccactttaccagcatgcagatcctgctggggtggaccctctgccataggagcagggctgggaaccaggcagccaatgtcctcctccttggtgctgcactcagggcagagcctgcatccatgagtggggctgtgtggaagaagtgagtctctggttctcagtaagtcttgtctagaactgagcctcagcagcatgacctgtgggcaaggtcggagggccaatgtcctggcccctggggaagagtgtgctctgctgggagctgggcagaaggaatcctgtctacttggctgcagccatctgtggtggaatttacatcatgctgagctcgggcatagaaggaaggaagagaatctttgatcaaatatcaatatcatgtctgaccttactgaggttttgtagattatctcgaataaatgttccttcactttctgtatgttgacagggcctttccagacccgttaatttttcaaaattaatctcaccagtttcatggaggcatggatatatcgagctccttataccgtcatgtgagatgtggaactgtttccttcactggttataaaataatgggttgacttttttcccaacactttacagataccatcaattgtcctattgcttatatggttataaccaaagcaatgctgatattattcatttctattctattgcaaggtatgccccctctactcgtctccaattgctggcatgtatttccatttgtctgtatgttttagtaatttgaatatgattcacctaagagtgtttgtgtgtgtgtgggtatgtgtgtgtcgtgtgtgtgtgtgttaagggcttatcctgctatttggtgttctctgacctgcactgatccatgacttacaatttctctaatttggaggaaaaaatagagggaaagtgagtttgagtccagacacaaacctcactgaagtgagcacaggattctaaccccaggggtgctcaggacacgctgatcacaagagccagcctcaggggcaggtgcagatggaggctgagctcttctttcccgtcagcactgtggcttcttctccataaaacatcttcccttgaggaatttatctgaattcatgattttttgcttatctccaaagtctctgaaatgaaaatgtttgttttaataaaagaaaaatcttctcacatgtgtaaaagacagtttcctacagtcgcttaatcttgtctttaaatgtcaattatcaatgcttctgaagtaaatcagctaaatctataaaagacactttgtttaactcaacactgcagcccagcatgacagcactgaaagggccagcaagcagcaggcaggatacggtgcatgccagacactggggcggaaggagttagtatccagtgcaagagaagaaagtgcccgtggtggtcactgtcaggacccaagctcacagctccaattgcaggtgaccccatgcaaaggaagagataccctcaccaatgtttagtgtggatgtcgagtctgatggtgccacattcacacaccacgtgaatatggaaagatttaccaactccattattgaggcgtctgctgagggctgcacaggcctctcaataaagtccaaactggctcaatagagcaggaaagaagctgcctcagggtttttatgatggtttggtgttgaaggaatggtggggcttcctactaaggggaaggagcttgtataatttgaacctaatactggcatccagtgaggacacttccatgattttctactaaatttcccatgtgtgggggacaaaagtgaaggaaaaggattaatcctgtcatcagtaatgaggcatcaaaatagagtctgatgacttattctacttagcaacttaagcaaatgagtgaaaaatgaggtaagtgttcactctgggtggacagcaaataggtctgcagaaaatagagtttttttaagtgtaagcacataacaaaaagaaagagaagaacaaattgaacagggatcttggaccaatgtcctgggtggaagctcttcactctgtgagatcatcagcttgctctgagggtctcgggtcaagtccttcttcaatatatctcaggccttacaggatacatgggaatgctcagcttggtgtccttcactagggaaaagaaagagaaatcagactgtcactgtgtctatatagaaagggaagacataagagactccattttgaaaaagacctgtactttaaacaattgctttgctgagatgttgttaatttgtagctttgccccagccattttgacccagccactttgagccaacctggagctcacaaaaacatgtgttgtataaaatcaaggtttaagggatctagggctgtgcaggacgtgccttgttaacaaaatgtttacaagcagtatacttgataaaggtcatccgcattgtctactctcaataaaccaggggcacagtgcactgtggaaagccgcagggacctctgcccttgaaggcggggtattgtccaaggtttctccccatgtgatagtctgagatatggcctcgtgggatgagaaagacctgaccgtcccccagcctgactcccgtaaagggtctgtgctgaggagggttagtaaaagaggaaagcctcttgcagttgagatagaggaaggccactgtctcctgcctgcccctgggaactgaatgtcttggtataaaacccgattgtacatttgttcaattttgagataggagaaaaaccaccttatggtgggaggcgagacatatttgcagtaatgctgccttgttattctttatgccgctgagatgtttgggcggagagaaacataaatctggcctacgtgcatgtccaggcatagtaccttcccttgaacttaattacgacatagattcttttgctcacatgttttttgctgaccttctccttattatcaccctggtctcctactacattcctttttgctgaaataatgaaaataataatcaataaaaactgagggaactcagagaccagtgctggtgcaggtccttggtatgctgagtgccggttccctgggcccactgttgtttctctatactttgtttctgtgtcttatttcttttctcagtctctcatcccacctgacgaggaatacccacaggtgtggaggggcaggtctccccttcgtacttgagcagccttacaactgggtgggtttatgaattaattcctcggttgcattacatgaaaaatcacacaatctacaaattttaaaaaataagcctttactttttataaaagattacagccatttcacaggctgggaagcacagccattggtgaagacgagagacaggcactcccaaggaggagcggtggggcagaaactttatgctgaacgtgttggctaaacagacataatcaacggattacaggaggggctatgcgtgttcataaaggtggtcatgacacatgaatatgggagcaaacatacacgtcacatgtgacccacttagcagtggggacttagcatttaaatgtgttacagttaggccctaagtgccaaaagctggagcaggggcacaaagaccctcagagcgcagcctccataaatggccagaaccaggccatggtcagtggtctctgatcaggagaaaattcctgaaatcaatctggtgtcccatccaagctggggttatggctgtggaatggggggtcagttagtcaggggatgagctgcagttggttaaatcgtgcttatctcaggatcagtgcttattttgctgctacagaagaaaataacagtttattctttaagagttggggtgagggatgtaacccctgcctggcatggccttaggtcttgtttataacggggcatcttattgccccggagaatctgttctgtcagtcttatgatctccattttaatgttagtgttggtccatgttgtctctgaaccacaaaagggagtgggtataatgaggtgtgtctgatctcttgttctgcccagctgggaactcagtttttaggtgtttttggtgcctccttggccaagagggggaaccactcaatctcatggggtgactgaaattttacttttagtttaaagtttataaatatggacctaagtattgacattctaaaagtcactcctttgttttggctaaaagtacttggcaagagtccttgaaatgaggttcaagagcagtattttctcatgactttatttgcaatagacacatgagagactgttgaaaagatgaagtaccaaagtagccttaatctgttggtgaatggagttggtataatacagaaatcactttcaatattttgtaacacatgcatgcatgcaataagacagcggtgagcactgagtgtaaagtctctaaaggtacgatctttcagccaccaaataatagtgtaataacggacatactctggaggagctgactataataccgtaacaccacggggagaaactttggccaaggaagtccaagattttcttttccttttcctttttttttttttttttttttttttttgttgttgttgtttgagacagagtctcactctgttgcccaggctagagtgcggtggtgcgatctcgactcactgtgacctctgtctccctgattcaagcgattcctgcctcggcctcccaaaagctgatattacaggcatgtgccaccacacccagctaagtttttcatatttttagtagagacggggttttgccatgctggccaggatgatctcgcactcctgacctcaagtggtcctcctgccttggcctcccgaagtgctggtattacagcgtgagccaccacacccagccgagattttcttaaagttttgaaaattttaatttaagggttacaattttttcaacatttccagaaagctgtagacagtattattctgtgttatatgagtgattgtagttccttccatttttagatagtattacaaacaattttagggctgcttgctttaaatagatagatgatagatggctacatacatacatacatacgtacctcgatagagatatagttgcaaacataaatacatagatagatagagttacagatgtattttagttattatgctacttttttctttgccttttcttcctatgttatgttagtcaggtctccaggacttaggagtgcatttacaatcccttcccttgtccattttgacgtgttctagacaatgcgagaatcctttgtgtgtggatcacttccaagtcatgcactacccttgcaataaatgtgtttgtgtatgtctttgccttactgacaagctctgctgagtgcagttatttctgccgtctgagctaactttacacttggtagagaaatatattctagatggaggcttccactattaatttaaattactaattcataacctccagcttaattattgaggtataatctatcagagatggtattagaacaaaggtttccaatgaaatctaacagaagggatgtcaaaaaattttcctaacttaggtaaaataaccctgagcccattcttagtatccagccatgtctcctatctatcacactgaatcccacactaactttgacctgacttgggacttgtaagcttcaaatatgaccttttgattgcaatgcctctaattcaggacgtgtggttattttagccaagagtaaagaaaaccaaatttaactcgctaaaaatgacaaagattaaaacctaatgaaatggaaactgggatatgagtggctccagacttggctattttaagagtctatgtgcccaggtgatttcttttctccattttacacacaggcaaacccaaaacgtcagcttcatctcccgttgactctcatcatctcgttcttcatcagcttgcttagaatgttgacttccagctgcatccatgttgccacaaaagacatgattttattctttttctgtgaatgcatagtgttccattgtatacatgtaccatattttcttgatcaaattcaccatgaatggacacataggttggatttatgtcttaggtattaagagtagcatagcaatgaacatgtaagtgggtgtattttttggtagactgatttattttcttttgtgcatatacccacatatgagatggccgggccaagtggcagctctgcttcaaatacttttcaaatctccagactgctttccacagtgcttggactaattcacattccacccaacactgtacaagtgtttcctgttctccgcagcctctctccagactgctttccaagattcctctcctccactttgacactttggtatatccatgtgtgtcctctctggttcagccagggacagagaaccaggaagacatcatgcattttctagagggagctggcttggggaatcaacgaccggagtagaaagtgcctttgtccatgcatcacaggcctgagggccctgggcaggaggtcaggaagagaggatgaccagacagctggggaaaccgggatgaataaagccagtttccttcctggtgaggaggggcaggtcgaagcctcgtgtccctgtagggatgaagcacactcacctgccactgctacctgccaatcaggtgacctgcagagcagcagctcctgagtcactgatggtgacttcctcctcctccaaaccctctaggatctgtgcttctcagagtgggaaccccagcaggtccccaagttttcaatggattcacctagctagtgtctctcctcagccccatccccaggctcctgccctggtgctgtgtacagtgtcacaacaggggtgacagtaacagctggtgcctgcactttccaggccaagaagtttgaaagaagcaagtcacagggccagccgggatatggggtaatcacacaaatttccttcttggaggaagtgctgggaaacatccttgagtcctcctcagctcacgtgcagctgctgctgttcatcccagtgcgggggacacatgagccctccccatgcccaggatggagctgtttcaatcacagcaggatgggaatgtgtcttctctatgggggcttttgaagcacagctctcctgttcctgagatttgagatttataaagacaagtcccacagagtggacctgcacaaataagacagtacaggatccccaggagagacatcccataagagaagggacaggcgggtcccatcacagacactcatcctcagaaaccctgaccggctactcaccttcacaggtccccagttcctgatcagtgcctgtgtctgctcctgagaagagatgaaaactcaagacaaatacttctcatgatcataggcttaaaaattctcaacgtaggaaatcaaatccagtagtttatcaaaaagttaacacactgcaatcaagtaggctacattctgcaaaagcaaggctgctttaactgctttccacagtgcttggactaattcacattccatccagcactgtacaagtgctttaacctatgcaaagcaataaatgtgatgctctactaaacagaatcaaaagcaaaaaccatgtgagtattccagcagatgcaggaaaaaagctttcaatagaatctaacaacgcttcatgataaaaaccctcaaaattatagacattgaaggagcacacctcaatctgatgagccgtctatgacaaacccatggccaacatcatactgaatgggcaaacactggaagcattttccttaagaacagaaacaagaaaaggatgcccgctctcaccacttctattcagcctagtactggaagtattcaccagatcaggcaagagaaagaaataaaaggcatccaaataaaagaaaaagaagaatgcaaaccctctgttttcactgataatatgattctatatgtagaaaatattgaaggctctgccaaaagtctcctagtattgatacattcgtttaggaatgtttcaggatataaaatcaatgtacgaaaatcacagtaacatttctagtcaccaacaacgttctggctgagagtggaatcaagaacatgctctcccaatagccaccaagacagtggaatacctaggaatagagttaagccaatgagatgaaatatctctaccagaaaaacagcaaaacacatgtgaaaaaaatcagagataaaacaaataaatggaaaaataaacattccatgcttatgaatttaaacaataaatatatgaaaaagttttaaaatttgtgattaattctacgtagcaatgccatttttttcaacatttacagaatattgttgctggtaatagcagtttagcatttgagtaatggaaacaccttacagaatcactttataacagttgcttcctgtagtgggttgcttcagttacctgatgaaaacatctgcatgtcacaggttgaaaacataaaatatgtctatcaactgagaaggttgtaggcttttgtcaaggaattacttcaagtcattcagaaaaacagcagacagtaaacgaaacttgttcaaattccatggagagtcaaagctgaagaaaatccaactagaagtgtccaaaggcccccaaggctcagttcctcggcaagtcccaccttctcaggttttccagaattttgtttttaactgatttacactgagtgaagtagattaccaggagttttccattattttaacataaaatcgggggctaagtgttgttattttataaagacatctttgaatctctcaggaaatttacctcctgagggttcagataagatcctactctaggttaagattacatgtttggcgcaatgaactggtacaaatcttactttagctttcatgttatctatttttccgcactgacttccacctttttattagtcaagtatatgggatggaagagtgcttctaagaggtccttaacttgcccatttcaatggattttcaagaagacatgagaaaccactttgtttgcaaagcatcccaaagccatgtcctgctccagaaacgtgatctcatttcctggtcgtttcttaactgacacgctctaatcagtgcatctgggccaatttgaaatgaggtgaagaaatgtgtcctaaagtaaagctaacattgtaataggaattcgtgtttaaaaacatttagttttattattgggcaggatccatcaacatataacagttgaagtttctcaacaggagtttaataaatataaggaatgtacagaagtgtttcctaatttaaataaaatgtagtgattacctaggctgtgagtgcaatcttggtaatcttctatgtccatgcccatcactctgtgcaccgcaaactaattttgacctcagcagaaacgggattaattttcaaattagtaatttttttccaatttaatttatttagatgattatgaatgactattttagcagaaagagaatcaaggaaacttgaactaaataaccagaatttaaaatgacaaacaattcaacaagatgccaggatgtgagtggctccaggcccaattaattcaaaactttatgtgcccaggttctgtattttcccaaaattacacatctccattccagcttcatgccacagttgactcccaccgtgtaagacatggcgacaccattcccaaaggtcgtgtgcaattctgaaaatggaataagcaaggagaggagatgatagtttatattctcctctgaggaggaagaattgcctcaacagaccacttctcctgcatctgtgactagaactatgtcacaggcacacatggagcaaaatccctcaaggggataatacggtaacattaatcagggtgatcatttttaatactataaaattcatagatgacactgcattccagcctgagggacagagcaagaccctgtctctaagaaaaaaagaacaaatcaatagatactgataccaacattttagataatgaaattttcataatgtaattttaaatacactcacatcattacataaatcttcccagaaatattcctagtcatgttgagtttcatcaacttttccagtgttcaaatctagaaatccaatagactcttgaggataaatcaaaatgagggcagtgaaactggtatctgctcagcacctgttaactcaggaggactcaatacacccttgcacactgctgcttctctgaatggctcacaaggactccagctcactctccatcctcctcaaacatctggcccccacttgccctaagttgactctctgctcttagtctgtgctctgaagtcttcccagaggtgaaagtgagctgtcagatggaacttccctctcacctcagcgtggaatttactgctacatttaactatcactctttccataatggttgatttcttggtctgttcattacagatcaaaggcatctgatttgaatctttatttctttgcatttgtctccatgacaattttgggaggttttaccgccagcactatgacacgatgtagtaacatgacacatttgtggttaacaacacctacaaattcagaagctcttcggttgtcttcccagcaaatatagctgcttcttttctgtgtatgaacacatcctggaaacacgtacacacccacatagatatatacatgcctatgacattttcttctctgtaagtgaaaattaacctcaatttcatacgaagttcatcatttccctgaaggtgaaggtaggtcgtttttcatctgttctaacaaatgctcagacaccagctagtaagtgaggagctaccctgcttctggatgttggatctgtctcttcccctttgctttaccacagaagattggccacttgtccaggtcccaagaagagagtccaggtttgtcctgataatatgactcatccaacttctgataactctactgttacacacattcatggaggtagcctattaattacataattcactaaacaaataccaaatacccacattgcaataccccatacccaagggtatgttcatgcattcagtgaaggaaaaggcttttcagagacagatagatcaggctagattggtcaatatatgggtgaaaacactggacttgaatgtatctgttttcccccatgtcacatgtgagacctgtcagacaggaccagggttccttgtgcactcagaggtgagggctcacagaattcctctctggtttccaggaaaggtaactgcagtaatcttggtaatgagaatatcctccagtgctgacctattatagagtttacatatgaaattttcactgcaattcacaatctactctttcacacagaagtgtacagaggtcaggacacatcctcagggtcacacattgagaatgatgaagatatgtcccacgagtttttcctaaggtctcagaaagaattccaggactcaaaaggtctcagagggcagctcccagtgccttagttaaaatggtggctcaggcctgtaatcccagcattttgggaggccaaggcaggtggatcacctgaggtcgggacattgagactagcttggccaacatggtgaaaccttatctctactaaaaatataaaaattagacggggggggttgtgcatgcctgtactcccagctactcgggaggctgaggcaggagaatcacttgaacccaggaggcggaggttgcggtgagccgagatcaggacactgcactctagcctgggcaaaggagcaaaagttcatctaaaaaatttattttaatttaaaaatttttaaaaaatggcccactccctagaacagagagattccctctaaacatgatggaggtcccgaactatacattaagtgaatcctggtgtgtctgaactcacatgattattacgttaagctgctgttccaatctacttcctcacctgggaaaagaggagccagggcatggctagttgaggccccaggaagagaactgagttctcaaagggcaaagcaagcatcctcatcccagggtgagcctaaaagactggggcctccctcatcccttttcacctctttatacaaaggcaccacctacatgcaaatcctcactcaggcacccacaggaaaccaccacacatttccttaaattcagggtccagctcacatgggaaatactttctgagactcatggacctcctgcacaagaacatgaaacacctgtggttcttcctcctgctggtggcagctcccagatgtgagtgtctcaaggctgcagacatggggatatgggaggtgcctctgatcccagggctcactgtgggtctctctgttcacaggggtcctgtcccaggtgcagctgcaggagtcgggcccaggactggtgaagccttcggagaccctgtccctcacctgcactgtctctggtggctccatcagtagttactactggagctggatccggcagcccgccgggaagggactggagtggattgggcgtatctataccagtgggagcaccaactacaacccctccctcaagagtcgagtcaccatgtcagtagacacgtccaagaaccagttctccctgaagctgagctctgtgaccgccgcggacacggccgtgtattactgtgcgagagacacagtgaggggaggtgagtgtgagcccagacacaaacctccctgcagggaggcggaggggaccggcgcaggtgctgctcaagaccagcagggggcgcgcggggcccacagagcaagaggccgggtcaggagcaggtgcagggagggcggggcttcctcatcagctcagtgctctccctcctcgccaggacctcagctgtccccaggcctcctctttctttattatctgtggttctgcttcctcacatcctcgctgcaggcaagaaagaagggagaaatttctctgtttaccattaaggttttaacagtcactggcacctttttttcaacaaattcccacaaggcccattttaccttcttgacaaagtatttcaaggcttctcaccatctcttgattggcgtcatcggctgcatcgtgtcctgctcttaaattcatgtgatgaaaccccaatcccagtggctctgtatttggagagagggattttaagaaggcaaataagttaactgtggccataaatgtgggaccctaatccactaggactcttgtccttatgggaagtggaagacatcagaggcctctctctccacatgcacacagaggagaggccatgtggggacgcgctgcatgagaaggtggccctttgcaagcctggaagtggcctctcaaaaaactaaccctttcttcacccagatcttggacgtcaaggctccagaacaataagaaaattaatatttgttatttgaaacaacctagtctgtggtatcttctgatggaaagccaagcagattcacagatacaattgtgttagctccgtctcctggagggagaagcagcccaccgaggctgacacatctctcagattatttttataaagaaaaatagatccaagatgaaaaccccaccacatttctgctgagtcattcacttagcaggcttctctgagatcagccctggggggctgtgttctaggtcatgtctctcactttccactatgagaatccatgtagatcatgagaaccagccagatggagtcctgatcccggcccaccttctgctgctccccaagtatcccaaagaaaaccactccagcgtcacccctgtgtcttctactctctaaaatcccactaaagctgaccttaaaccaggagatatttggggccgggctcttgttctcttcttcttagtcttccataaggtccaggtgctgagtaaagcctcagtaaagattgagcttcagttcccctaacccacatcattcccttacatccttgtcatgcatctgtcctctgtgggcactcagggcaggttacacaggaattgcctgaagctggcctcaactgatgtgctgagaccacgggtcatgcacatgtatgattccgggtcatgcacatgtatgattccaggtcatgcaggctctactgcaggacagacctgtgtcctgtggggcacagacagctgctgaccccgggtctcctctaataactcacacacctggtgtttgtgtgtgtccagatggccccatgagcacagcacactagggtggccaaccttacaggtggggccgtcagatggaatggacaggctggtcactcccatcatcagtgatttcccagtgaattttaaataaattaaacaaaattaacaacaaaggggaaggatatgtacctgtctctgggaggtatacagggtcccagaactgtgctgggagtgggtgtgaaacgcccttttgtgtggaaagccctccagcatgagtgaaagctgaaggaatgatcactgtgcaggtggaggatgataggcagctggcagggtacatttcctgaagctgttcctgggtgcatgatggttggatggcccatggtgttgagggctggactcacataggaacaaggaaattatcccatgggaatggcagaaaagaaaatggagatggacacccctggagacagcttattagatttggtggaggaaaaatagaaatttattccaatgaccccagcattttcagctaaataagagttgcattaatagacagaattatgaaaggaagggagaaggagtttatggagggaaaaaaaaagaagataaattaaaatttaaaactatgcaaatctatcaattggcagataacagagtggagctgatgcagctacttccttgttctggaaacctgccagagacacttagcattcctgtaaggccagtctagtggtgatgaacttgtccactttttacttttttggggaacttctcaaacctcctgcattattgaagaaaagctttaatccatgtaacgtatttatttggaagtttcttggctttgtttttattttcagcaacttgaacagaatcatgcacatcatgatatttcggtgaacaacaggccacctacaggacaaaggtctcattagattataatactgtattttcaccgcatttttccatgcttagatatgttcatctgtataaacatctaccatggtgattcagctgcccacagtattcactacacttacatgacatacagatttgttacctaggagcactatgctatcccacgcagcctgggtgtagcaaggtatttcatgtaggtttgtgtaaacacactctatgatccttgcacaatgacaaattgcctaaggacacattgttcagatgtattcctactgtttttcatttttttttagatggagtctcactctgtcacccaggctggagtgcagtggcacaatcttggctcactgcaacctccgcctcccaggctcaagcgattctcctgcctcagccttccgagtagctgggattacaggcatgaaccaccacgcccagctaattctttttttctattttttagtagagatgggatttcaccatgttgccctggctggtcttgagctcgtgacctacatgatccacccactttgccctcccaaagtgctgggattacaagcgtgagccactgcgcctggccaatgtatccctactgttaagccacaaatcatcgtatctcatttctctcccttttttgtccctgttaatattttcatgttgtgcgtgcattcttctcctagctcagtgaacatatttataaggtttactttgaattttctgctaggtaatcaatgtatctccttttaatttgtgtcagtttctagtgctttttttgttaaataatttggaccacttttttctgttttgtgattattgttattattattattttttactttctctgttgctttctcctcattagaagaaaaagctaccgtaatcactcttcacagaatatgcccagggaaaatgccatcacctatcaacccaggctgtcattgtggcatctcttaaaacttcataatggttgaaattttttgttgttgttgttattagtggcactcagacctacagaggattttaagttttgctcctactctaaattaggtggcattgaaattcatcctgcaggcagtctctgataaagtggaggaattgggcagttttgttatgcatatggttcataaaaataatatgagtttaaggttttctcagccaagtgctatatcctgatattttataatcacttctttgaatctctcttgggtttatcttttgaaaatttagatcagaatataaaccaggtttgaggctttttgtttggtgtaaacatctcctataggtcattgcgtgaaaaggcacagagtctatctgaggaggagaactcagggaagcctcacaacaacaggggagacaaaaccgaggtcactaaaaaaatatgaagcttctggctcctgcagcctccagacatgccccacaccctctcattgcacagaaatgaattcctttctctttcctgagtgatctttgccaagattcctctcctccactttgacactttggtatatccatgtgtgtccattctggttcagccagggacacagaaccaggaagacatcgtggcttttctagagggagctggcttggggaatcaatggttggagtagaaagtgtctttgtccatgtgtcacagccctgagggacacgggaagaaggtcaggaagacaggatgaccagacggctggagcaaccagtatgaacaaagccactttctttcctggtgaagaggggcatttggaagcctggtgtccctgtaggggatgaaccacactcacctgcccactgttacttgccaacgaggtgacccgcagagcagcagatcctgagtcaccgacagtggctgcttcctcctccaaaccctccaagatctgtccttccaggagtgtgaacctcagcagatccgcacgttttcaatgggtccacttagctagtgtctgtcctcagccccatccctgggatcctgtcctggtgctgtgtacactgtcacaatagtggtgacagtgacagctggtgcctgcactttccaggccaagaagtttgaaagaagcaagtcacagggccagcctggatttggggcaaacacacaaatttcactctgtggggaagtgctgggaagcagccttgagtcctcctcagctcacgtgtggctgctgctgctcatcccaggtgggacacatgagccctccccatgcccaggatggagctgtttcagtcacagcaggatgggaatgtgtcttctctatgggggcttttgaagcacagctctcctgttcctgagatttgagatttataaagacaagtcccacagagtgaacctgcacaaataagacagtgcaggatccccaggagagacatcccatatgagaagggacaggcaggtcccatcactgacgctggtcctcagaaaccctgaccagctactgaccttcccaggtcccctgttcctggaacagttcgtgtgtctgctcctgaaaagatgcccatcaagagtccccagggttctgcccccttccttgatgtgcctctgggagtggggctggctgggctgtgggtctggcgtgaccctctccacaggtcagcggctcagtgcaggctgcaccgactcggtggggctgggctgtggctgaccctcccagggggagcctggactcttcttaggggtatctgcaggatcccaggttctgggagaacagggaagccacagtgtgtgcagggccccatctccagtaaagtgtttgctgtcgctctgttgacaagggcatatccccaggcctaggggcactgtgggcgcacgaccaatgcgcgagacacagggagtaaggcacagttccctcccattactgtgaggacactagacacagtgtgtgtgtgtgtgtgtgtgtgtgtgtgtgtgtgtgtgtgtgtgtgtccattactgtggggactctaaccaccgtgtgtgtgtgtgtgtgtgtgtgtgtgtgtgtgtgtgtattaggagttttgcagtggcctctgagacccatgatcttgcaggtttagaaattatctgatgagatgttcatccacaggaaccgacaagagattaggtgttctcccaaagcccctggaagctcctggactcactgtgagtgtggactgatccagtgcttccagagctccacagaaggggctccctggtggtttcatagaatccttgcttggggtgtttctgcagagttcactggctttcctacgaccaatttaccattgcaagcgatggcgtcagcagcacatggtgtcacgtgtcactaaaggagcattctgagccaggacacagccacttcatactggggggaaaatgctctgggagcccagacaggagcctctctgcagtgcaagggctgggctgcagggggcgctcaaggcccacccagcacaggctccagccccagagcaggtgcacaggaggctgcggatggagtccccttaagatctgtgtcattcttctaaaaaaatctaaaataagtatttgacaaaaactgctgaagagtccataaatatcctattcaactgcaagaatttatcaatttacactggagatttctaaccctgctacatatcttaatagtaagcatctggaggtcaattaagcttttattttatataaataagtgcaacttttggagaaacacactcatcccccaaataacacattcatgtattaaagcctagaaatattttaaattacctctgagctattcaagtgtgggttcccagtgaagtcctgttctagggaaaattgttctccagtgggagaagctctgtcaacatacagtttagggatatggcagggcacacatggcctctaaggggattatagcttgaacccttagcatcctcctgttgggtaatccatgtgtcatctctccactctttctcatgctgtgttaggtatgaaatagcatcgctcatgaatatgcaaataactgagatgactatagatatctttgtgccctgagagcatcacccaacaaccacatccctcctcagaagcccccagagcacaactcctcaccatggactggacctggaggatcctctttttggtggcagcagccacaggtaaggggctgccaaatcccagtgaggaggaagggatcgaagccagtcaagggggcttccatccactcctgtgtcttctctacaggtgtccactcccaggttcagctggtgcagtctggggctgaggtgaagaagcctggggcctcagtgaaggtttcctgcaaggcttctggatacaccttcactagctatgctatgcattgggtgcgccaggcccccggacaaaggcttgagtggatgggatggagcaacgctggcaatggtaacacaaaatattcacaggagttccagggcagagtcaccattaccagggacacatccgcgagcacagcctacatggagctgagcagcctgagatctgaggacatggctgtgtattactgtgcgagagacacagtgtgaaaacccacatcctgagagtgtcagaaaccccaggggggaagcagctgtgctggcatggaggaaatgacaaagattattagattgaagactttctcagaaaatgatattaagtcattaaggaaaaggaacaatataaacgtgtatttgagaaattttaattatttgagagatttttcatacaatatttattctgcaagcaaatttcagggattgaattaataaaactgatacagaacttcctctgtaggtatctgtgtaaacatcaatttctgaatcagtgttgtaaatattttggaacacacacacaaatcacattttatctctacttttatctctatttttaaaaatgccaaaaaaactcattttgtgcatgtagcattttgaattcccaccatcaatgcatgatagttcttggttttccacattcatattgccatttatcattatgagaattgtgtgttttaaccattctaataggtgagtaatggtatctaatttttagttaaatgcacatttccctaataaaaattcacatttaacaattttcatataatttttgccaagatgcctcttctcatatttggttcatttttaactgcattgttttcttttgattagttgtaagtttacttgcatattgattataaaatcatttaacaaattaaaagaattcatttaacaaatatgtgacttggaagtattttctccaagtctgcggctgtcttttactcccttatcagtatgtattgcagaaaagtgtgtgtgtgtgtgtgtgtgtgtgtttatacaaatttagatttaaaaaatgtaaaatgttattcatccacagatcatgtctttggtattatatctgaaatctcattataaaatacagtaatagcaattactttttccacgtctctaatctcaggctacaatcaactcatgagtgtttaagcttcacctacttgattagaggactatcaacctaacatatttggaatacttctgtaaaaagatgtgttcctcttcctattatttctttatttgatcacttattaatatgtgtattggtttatggatgtctatttcatactctgaagaagatccatgctacattattcattttatttttcaaaccaccacggctttattatgtgctgggagctcattgagtttggatcctgcatccttacagctcacctcatgcttttgtttttgaacacttccctgtttcctgctattataataaattctaaactcattttctatattatctttttcatacatagaatcagccatttttctaaagattgcttgcttctgatgttaaagaatagtatttaaaaaattgtaatactgggtatgtgcattgttaatgtggtataagtacttgcaggacctctcaaccaactggcctagtaaactatgtatctaaccttctgtaatgtgattacattaaaaatgagaacacactggtctctctacccaattatgctaccacatggatctttctagccttccttccttgactgtctataacctctcactgcaaaatgaggaaccccatccaaccatatgccattttattacttagctgcacaatttcaggacacatgcatagcagtatcagaaatgtaaagctgtacccttgtaggaaacatgtttatctactagaatagagtgcttatgttcagtttctttacactttaaacttacagagtttcctcattttcaaagttccttaggtcagcaacttcattttccactttcttcagtgaggtcatttcaatgacactgtataatttgatttatttgaaattctataaaagccaaaactgtagtcaagtgaacaacaacatatagaggatattcgaggagtttagagactggtataaaataagttaaaaagacactgtttaagaagattaaaattatttttagtgatatgcaatggttcagatatgacacaattaatttgtctaagcacatagttttgtgatggaaaatataaacctaaatatatacaattaaaaaaaaatttagcagttcattaacccaaggatcaaatgcagattgtataaaattatctcattacttattttgtgagggtggagatttcatgagatgtatgcaacaaagaatgaggtaattttcctgatttgcatataagatgttgccattcactaaagacctttaattttttaaattgttttttttttaaatcaattttctatgtgacccaggtttttttctcttgacaagcaaataacccacaggattattttctttccttggttgagaaatatttccccaaacttcagctcagttcaggcatacactgtccctgaatgggcatttaccctcagatgggtacacacacctgtcaacatgtggactcttctgtcagacaaacgcacctttactcacgtggattcttctctcagacaaacacacatgtccccacgtggactctttcctcagactaccacatatgttcttacatttactctttcctcagaaaacagacatttcctcatgtggactcttgtctcagacaagcaaacatgtctccatgtgaactcttcactcacataagtacacatatgtccacattgactgtttccttacacaagtacatatatccaatgtcgaattgttctgtggcaaaatgatctcaagataatgataatcataaaccccctccctgacaaggcatagatctgtatttttttcattgcaacctaactttgccttattgtcaagaacagtagtttgcagctctaaatataccaattagagacaggtgtccattttctctggaaacgtatttttatgttcttactggacatatttgttgataatgtttgctattatgaagataccccaacagtgtccacattagagaataaaaaatagtaatgggcagattaactctgtgcatccagacccagaaatcctttgaccttgacttccctgaaatgtagacacagaggatggatgagcaatgctgagcagtgcacccatgaccacaaaaagaaagacgtggaaatgtgtcccctccacttctcatgaaaggcagctcatcccctgttccctcaggccctggcgaggagccaccccatgtctgtgcccttcctcagtgtccacaccgtggggtctgcattgatctggattctcttctcatccccgtcaatattagtgtccttcgtaaatcaggtccagctgtggcttctcctcacggggctgttctcagtctgtttgctgtgttcacggaagtcctgtgtgaagtttactgatggagtcagagggggaaaaaatttacagcccagtggtgagactctcctgcaaagcctctggtttcacctttactggttacagcatgagcttggtccagcacgcttcacaacagggataggtgtgggtgccaacagtgagtgatcaagtatgaattctcagggttactttccatgagtacaaataaattaacaatctcaagcaacacccttttaagtgcagtctgccttacaatgaccaatctgaaagccaaggacaaggtcatgtattactgtgagtgacacagtgagggaaaccctgtgtgagcccagacacaaagctcaccgcagggagacaggaggggactatgtggtagatgctgctcagaaccaccagggggcatcaggaccatcagggagggtgcacagaaccaccaggaggggctcaggacaccagggggcgctcagaaccaccagggggccctcaggacaccagagggtgctcagaaccaccaggaggcgctcaggacaccagggggcgctcagaacactaggaggtgctatgaatcactagggggcgctcaggacacaagggagcactcagaaccaccagggatagctcaggataccagggggcactcggaaccgccagggggcgctcaggacactagggggcgctcagaaccaccagggggcactcaggaccatcagggagggtgcacagaaccaccaggaggggctcaggacaccagggggcgctcaggaccacaagggggccctcaggacaccagggggcactcggaaccaccagggggcactcagaaccatcagggagggtgcacagaaccaccaggaggggctcaggaccaccaggaggtgctcaggacaccagggggcgctcagaacactaggaggtgctatgaatcactagggggcgctcaggacacaagggagcactcagaaccaccagggatagctcaggacaccagggggcactcggaaccgccagggggcgctcaggacactagggggcgctcagaaccaccaggaggcactcaggaccatcagggagggtgcacagaaccaccaggaggtgctcaggacaccagggggcgctcagaacactaggaggtgctatgaatcactagggggcgctcaggacacaagggagcactcagaaccaccagggatagctcaggataccagggggcactcggaaccgccagggggcgctcaggacactagggggcgctcagaaccaccagggggcactcaggaccatcagggagggtgcacagaaccaccaggaggggctcaggacaccagggggcgctcaggaccacaagggggccctcaggacaccagggggcactcggaaccaccagggggcactcagaaccatcagggagggtgcacagaaccaccaggaggggctcaggaccaccaggaggtgctcaggacaccagggggcgctcagaacactaggaggtgctatgaatcactagggggcgctcaggacacaagggagcactcagaaccaccagggatagctcaggacaccagggggcactcggaaccgccagggggcactcaggacactagggggcactcagaaccgccaaggggcgctcagaagaagcagggggtgctcagaacaccagagggtgctcagaagcaccagggggcgctcaggacaccaaagggcactcatgagactgtggcaagggggtgctgagaaccacaggatgtgaccaagacaccaaggggcactcagaactgccagggggtgctcaggacaccagaggattctcagaaccaccaggggatgctcaggaaactagcgggtgctcagaaccaccggaggacactcagaaaaccaggggatgctcaggaaccaccagggggcgcccacgacaccagagggcagtcagaaccaccggggcatgctcagaaccaccagggggcgctcaggacaccaggggatgctcaggacactaggggcgctcaggaaccaccaggggacgctcaggacactagtagggtctcagaaccaccaggggatgctcaggacactagggggcgctcaggaaccaccaggggtcacccaggacaccaggggtcgctcaggaaaccagagggtgcccaggaaaccaggggaggttcaggaaccaccagggggcactgaggacaccaaggggtgctcagaaccaccagggggcgctcaggaaccaccagggggcgctcaggacactagtaggcactgaggaaccaccagggggcgctcaggacactagtaggcactgaggaaccaccagggggggctcaggacactagtaggcactgaggaaccaccagggggcgctcaggacactagtaggcactgaggaaccaccagggggggctcaggacaccagaggtcgctcagaaaaccagggggtgctcagaaccaccagggggcactcaggaaccaccagtgggtgttcaggacagcaagaatggctcaggacaccagggagcactcaggacctccaaggggctctttggaggcagctccatatcaggtacctggggaggatgaggtttccttttccaccttggtgattcctgacctggtcaagcaaaagtcttccccaggatctcttacgatgtcttccttgtaactcatggtttctttcacctataaaacattaacttagaacaggggttcaattcaacttttaactctgcctattttcagagttatactagcaatgatatatctcagtatattttttttaattgtgtatattcaatccaaagtctggctctatgcacaatttttttgttttctgtgctgtcagacacactattgtaaatgcttttctaacaactcagcatatgcatggggtccagtttcttttcctttcatcggctgtttgtgcagatgaaacaccactttaagggctcctgtcctccactttggcccctggtgttctgcttctcaaactttctccatcttctctttttctgtcaaaatattttatcttcctcagtctccatgcaggaaacaggaagtccttttacttcctgtcctccatgtctggtaaatcagttcacttcttttcatgatcactgaagccaaccaagtttaggagagtaacagttctccttagaatacactctacctgcagaccctctgccctcatcacacttttctagggtcctgcagacataacccccacccattcctctttttccctaagtaccacagactaggctctgcaacttatgctaccctctgtgtgctcagcccaggggctcagtagtgctttcatgaagtccaaatccctaatgtgtttgcccactctcagaccaccctccagcaagctgccattgtgattgaatcctgcaaagcatgggctgctttcagtttcctattgctggatgttctttattataaaggcatattggcaaataacgactagagtttgtattgaaaattaacgccaaaaagttttttaaaaagtttttcaaatagaaaagttctatcctgcctagtttaaaaaaatacaatgttactttaatcaatgatttaataaaaatttaagtgatgtttgtcttattagttattcaatttattaataactgactgatatttaaaaagtaaatactggctgggcgcagtggctcacgcctgtaatctcagcactttgggagggtgaggtgggtggatcacctgaggtcgggaattcgagaccagcctgaccaacatggagaaaccccctctctactaaaaatacaaaattagctgggcgtggcggggaagctgaggcaggagaatcgcttgaacctgggaggcggaggttgcggtgagccgagaacacgccattgcactccagcctgggcgacaagaccaaaactctgtctcaaaaaaaaaaaaaagtaaataccattgtacacttaagtaatatatttggcaagaatggcatttacattcattcaaaaatgaaactgcaaatacgagttacattcaattaaataattaaaataatatagaaaaaaatgggtgtgttgttttggtgtttaatatacattcatttttgcatggacgggtatatgtgtcattgctgggctgttgtgtatgtgtgcgtgtgtgtgtgtgtctgtgtgtacaactatgaagtttaaaatatattattaaattacgtagttatattaatccaaatttatcatgttaaaatattaggaaaaaaacaccagtagagaaattacagagaacatcagcaatgcctacagcatttacaagagtcacattaataacaaacaaactagttcaaatgtttagatatgacacatgcagtagaaaacgttcacatggtattaacacaaaaatggtgcacaactgaggaaattataatacgttcatgatattggctacataaatgcttatgatagtaatgcttttcatccatcaaatgcttatgataatgcttttcatccatcatattatagatgataaaacaactctataaacacttccatcactagcgtttaatatgagatgcctcacatctttttctgaaataaataaacatctgtccaccacttcgatgatcatttcaggattatcctctgaaataattatccataataattttagtaacaatattattttcagaagcctattttataaggtctttgaactattatttttatgattgttactttatattttacacactttttatttggaataattataggttatcagaacaattgtaaggaaaatacagtgtgttcacatccatctccaagttttcactaaagttaatatgtcaaaaaaaacatgggacatgggactaatatatttacattgataagtttctgtttattcagctctgggatttatttgaattttgccaatttttaacagtttccttttttcctttttcttttctttttgagataaggtgtcactttcctattgctttttgtttgtttctttgttcaacccacgtaaccacatcaaattcagtcaccatgttcctctcatatcttctggttaatcacagtttgggttcctgctgtcttcccattgaatattctataaatgaaactagtcaaataagttgattctggtcacttatatatttacctattttatcacgtttgttttgtcaatcacagtaagtgtcgaattcgctatctgttatagatgttagcctattttctatcccagatccattggttaaatctttggtgatgccttttagaaaactgatccctttaccctatgtaatatgccccttgattcctgaaagtcttatgtctaccttgtctgaatttaacatagctaagcacgctttcttttcgttcatattttcatggtccatgttttcctgtatttaacttttctatgtagagcaaatttctgtacagagctagtagttgggtcttgctttttaaatcaactataataattctattttaaaactggtattactatttttctgttaatttctgttttaatttggcattttatgatcatgtttatttctctattaacttattgtttagttcatcttttatgaatattgtattggccctaagatatacaataagaattgtgtataatcagattctaattcaaataacgtaaaacctcttcataggttgtagagctattataacttattcttctaaacactctttctcatccgttgtcttagtttattctcagtttgcacttatatgtgctataaaatataatatgtgcatttttatcattacatagacatatattagaacaattaaaaatataaaaactacatttcaacttcattttttcattcttgaccacatgttttatttggatagattcatgtttcggatgtatatcatatggctactcaccctggcagaaaatttgccaaagcacctactgaaggatgaatgcactagcaataaattttctcagaatcgatttgtcttacagggtattcatttgactttcgctttaaatgaaatttttaatatatatagaattccagtttgactttaatttgtaatttattttcttgtactcatgtattcattattttcttcctgaagatggtcacacattccattctgctgggccttcattatagatatttgtgtgtatctattcagggctatatttgcaatttatggatgccacaattatcagagttgaagtcagcttctgctgtccacagagatttcaagttcctcccatgatacttgcttttgtgtccctgtttgatcctgggtctttatatttagttttccccagggaggctgtctgtttcagctgtggaaagtgcaccctactgacagtttaaattgatgactgtgtggtgaaggaggttggacaaagcgggacttcctccaaccttctgactgagtctccttcttatgcaggagtagtaagcatagttctggggagtggccttccacattgtcctgtccttaactctttccccagggctggaacgtcttttcccagacacaactgtttttcaccagtgtccccagctttttacccactatccttaccctaaagagtaaggatttctttcctgaggaaggagatgggaggtgtttctggatcaagtttccttggtgtcgtctgtttccttttgtttctgttgacttcaccacagctcatatgacacatgctttggtggatttcccctggaggtagtggaggtgcattcaggcattccacaggagctgctgttcttttccccagtcaacaccacaagacaccagatgaggaagttgtccgtggatttttcaagttctctaggaaaagcttgcaagcactaggccaatctaacaccattagtacatgcatactaaaaaaaaaaaagtcattaagtatttctaggttagtctgtttctatctcaaatgccatccagtggcacctgccctacgtacactagcaggtaggtcctggttctctctgcaggctcctatcttctcagatttcagttttcttgtttgcttggtgaaatcaactcagatatgttgaatgttttttctctcttttatttgtagctgttcagcttcgttgttaatgaggtcagaataaaatcacagttttctcatttttttcacattcccacactgaatagctgctttccgtataaaagccagaaactgagagaacacattgaatatccattacaggtgaatgttaaacaatttgagatatgtttgtgtactggaataaaatgctgcattacaatcaagtcatcactcattcacataaaacatggccacattctcaaataatgtagggacctgagtgcccctccatctactggcctctcctggggccctagcctggccacaccttcttgcagggcagtcttggacgccctgggatcccgcaccaaaatttctgccctggcagaacatgcctgactggtggagagctccaatcgggcagccctcatgtgcacacaccagcttacacacttcctccgaatactgtaggttcacccaggcccacgtaacttcccacatcactttgcagtcacatgtctgtataggtgggttttgcttttcttgtcccaccattgcgtggagtgcagtcccctccccccaccccaaccaccatggcagaggaagctttggtggggaaaaagccagggccgctcctgtcagcgtcccgcacttgcgctaattctgcacagagaatagcagatcatctcacacattcagaaatcactcctgcttgtggggcatgaatacggcacccgggcctgtgcccacaagtgtcccatccctgagccaacacctcctccagtgtgaccttgaacacagtcaccaacagggccccacagacgcaatgcctctgccactgtggcgaacacctgcagggaggcaggcacccagacacccactagcactctgccacagctgccacacctccaacagcccaggacagtggattcctaaccttaaggagccggagaaccaagtcagggactagtataacttcccccagagtcagagcacacagtctaggtgttgggagctgagcactggccacctaaatttttccagaaatgaagccagttggctgaatccaccttataccacaatcaaaccctcaaggtcatccaatagggtaaaagaaaataaaaatgtatccaaaggtcagcaacttcaaagattgaaggtggataagcccacaaagatgagaaagaaccagtgcaaaagtcctgaaaacaaaaagggcgccctctttcctccaaacaaccacagcacctcttcaacagcagttctgaatggggctgagatggctgaaatgacagaaacagaactcagaatatggagagtgaaaatgtagatgaatacagctatttatggagaatactataaatgttcctcaaaaaataaagaaacaaaatctactgtagaatccagcagtctcactgctggctatgtatccaaaggaaatgaaatcaacatgtcaaagagatatctgcactccatgttcacgttcattgcagcattatttaaaatagtaaagatatggaaacatcctaaattcccatgaatggatgaatgaataaagaaaatgcatacagacacaacagagtaatgttcatccttaaataagaaggaaaccctgcctctgtgacagcatgcatgaatctagaggaccttatgccaagtgaaacaagccaggaacagaggaagagtcattcatgatttcactgtatatattaaagcagtagacttgcagaggtagagtagaatgttggttaccagggcctagaggggtggactgggaaagggagatgtgggttaaagtgcacaacgttccagttagaccggaggtataagttatgcctttctaatgcacagcatgtcaactatagctgataaggtagtatatatttcaaaattactaaaaaaataaacattagaatttccccactaagaaatgataaatttgtgaggtgatgaatataagcggcttgagttacccagttcataatgtatacatgtatcataactaaacaacatatgtcataaatatatgcaaaaattatttgtaatttataataaaataagtttcatatttaaataattacattaagaaaatgaacagaaactttcagatttcaagaatattttatatatatatatatatatcttaaaacaaacttgcaacagaatatagaaataagttttacgactcaatggaaaagaacagaattcaataaaaactggctaaaagaaacaacagctgcatcattatagaaaattctggaataatcagccatataaagattctcactctcttagaactagaattccgtaggacttgtaattcctcctgacctgggtgggaggcaaaaggaagaacagctaatggtgattcagtgagttttatacctgtgtgtacttctgtgctcactcagcagaaagaaaagaagaaaagaaagaaagagagaaagaaagaaacagaaagaaagaaagaaagaagaaagaaagaaagaaagaaagaaagaaagaaagaaagaaagaaagaaagagaaagaaagaagaaggaagaaggaaggaaagaaaagaaagaaagaaagagagagagggagagagggaaggaagggacagcagaagtcattgtggtgtgtgtgaaagcacaatccttgggctcccccacatccatctctactccagtcccatcaatgtccagcaaatacattttctaagatgaagtattttaaactttctaaatcctgctagaaaacccctcagctctttcagttttgctctatcacttgaattattgaattaaatctagtttttgtgggcctatcaataccataagccaaaataacacatgaagaaattgcactgagacacatgaaaaccttctgaaagctccataatttcagatctgcattcttatttccccgaacctaaatcactgaatagagactcagaacgagttgatcttgttcctgaacgtgcacagagccaaggacatcctgtctgtctggaacagctcaggtttgttcctgtttctcctagaggatataaaatcttgagttagggaaaaacagccagggacaccctgggctttgttcttctctcccctggaggcaggatgtccttcagagctttgtcccagtgggtaacacagctgctgaggtgtacaacccacgtggcctcgttttggtcacttttgcatggtgagcctgctttgcaccatggcctacaatatgcgtgtgtaactaatctgtctccatcttcaaaatgacattattccacatcaaatctagtgcaggtgcctcacacagaacattctcaattacctccatcattcataaaattgatgccattaatttcaagtatacatacatcagactcatttaacgtattgttattctcattgtttgaaacataacttttagatcaaataattaacaataataaaaatataaattttgaagtcaggtaatgtgatttctctagttgtgttctctttgctcagaatggcttgggctgttctgcatcttttgtttttccacatatattttaggattttttaaaaatttctgtgaagaatatcattgttgttttcatagggattgtactgagtctgtagattgctttaagtattatggacattttaacaatattgaatctttgaattcataaacatggaatattgttccatcttgtgtcctctttatttcctcaatgttttatagatttattgtagtttttttttactttgttcattacacattgtatgcctgtaccaaaacatcacatatacccaacaaatagaaatatatatactattatgtgcttataacaattaaaaattatgtatgtatattgaatctattcaaaatcagaaactatttctttttactgtttgtaaggtcttgtctctaggctataaaaagaatttgtaaaactcaacagaaagcataatataaacagaattctaaaatgagtgaaaatctgaacaaacacctcaccaagaaaaaatgttatctgaaaataagaatatataaaattgttcagtatcaattgtcataaactgatactcatatttaccaaatacaaaagtaaacatgatgtatttcaacagaattgattctcaaatatttgtatactcatacagtggaatactatcagtcataaaaactatgggttattaattcagaagacaacattttaacattttttctaagtgaaggaagatggacaaaagagactaagtattgtacaattccattcatgagacctgctaaatacagtaaaattaaaaggattttaaaaacaggtttgtgataggcagggcttttggggaaagacaagagactgacttggcaaagctcaggggatatttttagggtaaaacaaactgtgtgccattgtgatatgcctaatttcttattatatttgttcagagttaatagtgtacgtttcaaccaactcggtgattttatattttctatttgctgatagagacatgttcatttttgtcaatcactttgctaaatgtggctgagaggctgttgaaatgaacgctgagcaaatgtattcaccaaatctacaagagcaaattatttgccaattgctgattgagtggggtctataatgtatttgagattgggtgtggggatgttattgtgtgagatcatgatgtttagaccatgacactctctggtgagggatcactcattcattgcacatttaatgaaaggcaggtaggaggagcagaaggggatgagtcacactcctgaccacagccacaggttattgaaggcagaactgatgtaatcccctaaggtagaccactgcccctccaaggtgaccttatcctagagttgacacacatcctgggacaccagagacaactccttctctcccctttctctgcacttcagctggaagcaactgtctcaccgagcaccttgtgttaaggaatgagagttcctgttccaggtgtgagggcccaggtgcatccacttgatccagcacaagagcaagaacagccttccagaaaatgacatcgcctgaggtataaccagctctcacctgctgcagcttcctctgaataaaaaggaaactgttgaaacttcctcataagtgtcctgctgtgccattccctttgtccccacatgttcagttgtgtctgtccagatgtcacttttgtgtagggagattagggttctgcttccagtaccagaacacacatgacctcttaggggacttcagggttttgctgacatatgtgatgatcttaaaagtcattagctccatttctacatcaaaaaacatctgaaccaaaggagcacataggctcaggcctgtaatcccagcactttgggaagccaaggcagaggaatcacttgaggtcaggaatttgagaccagcctggtgaacatggtgaaaccccgtctctactaaaaaatatatacaaaaattagccaggcgtggtggcactagcctgtaatcccagctacttgaaaggctgaggcaggagaattgcttgaacccaggaggtggagattgaagtgagctgagatcgcaccacttcactccagcctgggcgacagagtgagcctccatctaaaaaaaaaaaaaatttatatatatatatatatatatatatatataataaatatatattatatatcatatatatattttatataatatatatgtatatttttatatattatacatacatatcaatatatgatatataatatgtatatataatatataatatgtatattcatatattatataatatgtatattgatatatattacacatatatattttgatatatatatatctccaaaccatctaaatatcaagtattttttaatccatctaagagctgaaattgctgaaaaaactactccctccaaaagctgtagagacaggcacatccacagtcacagcagagacttgctgacttggaagagaagctcctggagacacattggtgagaacatttacctggtgattatgctgaatgtctggaggacaaatgtggactagggggagggtgagcactcctagaggctgtacaccccacacttgtgtggacttgccctccagggccttcaggttctcgtggaagcaattaaaatagattccctatagccatgaactggggaggagtaatcacggagaaaagatgcacaaaaagacttttctagaaagctcatccaagggaaggtattctccaaaatcttagtttatgtgggggaaggaaatacttccaaattacagacccctcctcctcagccttcctctatcacgcaaatgataaaattagccaagaggagtcagattcaaggcggtagccctgggtgcagcatctgcagaagggaggaaagagagaaaatcagctgtatcactggagattccttgtgaaggtcactgctcaggagaagagggcaaccaaaccagggagagtcaactgtaagaacataccatgctcccctgccccacacattacctcctcaacagcatcattaatatggattaaagagggcagtgtgattgctttagatctgtttgagaaagaaagtcacatactgaggcctagggtcagggtcggcggcacttcccgtgagtaagatactacgaagaaggaaaaattaggggtccataactgtgaaaatcagccacagtgtgtgtgagaatgtttgtgtttgtgtttctgtgtgtttgagtaggagttattggaacagcggacgtggagtgagctttaatccacatccatctgcagcttcaggtattctcagatgcagtattcatctgcaagagccgaaatgagaaaagagccacctccaacccccccagagttttagcctccctttgtttccagtgatccagtgcatctagacctccaggaagtggactccctggtgattttagcgattcttctcttggagccaccctgaagaggacattgggtttccaaaggcccattcactatttcaagaagtggtgccatcagctcatgttgtcactgaaggagcattctgagccagggcacagtcacttcctagtgagctacagaggctgagagaaaaatgctctgtgagacccaatgggaagctccctgcagtgcaaggtctgggtggcagggagcgctagggcctcgcccagcacaggctgcagccctggagcaggtgcaagggaggctggggaggggttcctcccagggtctgatgtcttccttttctcggacaaacatgctttaataagttaaacaagactttagtaaagactattgatgtgtctttgtgtctttcagtatacagttctatttgtaggatttatctaacctaacaagtcaatgagaatcacatgtaaaaggagaaatttctaggattttcagatatcttaataggtaggagatggagaaaagggatggttttattaattcagtgcttgccaatcttaacagagacagtagtaagacatgcagaaagcaaagcccagaaaagtatgaaggtgtcaaagtgccatttaagtatgggttcacttggaggaccatgttctgcgggaacttgttttcagcagacaatctattttagcagagttctgggcatacaaggggacacacatcattaaacaaggattgggacagggacttcagcgtcccactgttgcatggcccataaattatgtgtgttctctttctcatcttggatcaagtctagagctatgaaatagtatccctcatgaatatgcaaataacctgagatttactgaagtaaatacagatctgtcctgtgccctgagagcatcacccagcaaccacatctgtcctctagagaatcccctgagagctccgttcctcaccatggactggacctggaggatcctcttcttggtggcagcagccacaggtaagaggctccctagtcccagtgatgagaaagagattgagtccagtccagggagatctcatccacttctgtgttctctccacaggagcccactcccaggtgcagctggtgcagtctggggctgaggtgaagaagcctggggcctcagtgaaggtctcctgcaaggcttctggatacaccttcaccggctactatatgcactgggtgcgacaggcccctggacaagggcttgagtggatgggatggatcaaccctaacagtggtggcacaaactatgcacagaagtttcagggcagggtcaccatgaccagggacacgtccatcagcacagcctacatggagctgagcaggctgagatctgacgacacggccgtgtattactgtgcgagagacacagtgtgaaaacccacatcctgagggtgtcagaaacccaagggaggaggcagctgtgctggggctgagaaatgaaagggattattatttttaatgttgtttacagtatgtcattaataaattgaaaaaaagtaacaatagaagtatatactctaattatatgggaactttgttttttcagttttttcatttttttttttttttttggtttgtttgtgacagagtctcactctgccacccaggctggagtgtaacggcacaatctcagctcactacaacctccacctcccaggttcaagcaattctcctgcctcggcctccagagtagttgggattacaggcacccgccaccatgcccggtgaatttttgtatttttagtagagacggggtttcaccatgttagctaggctggtctcaaactgctgatctcaggtgatctaccctcctcagcctcccaaagtcctgggattacaggcgtgagccactgcgcctggcccaattatatgggaattgtttatataattatcaccctataagcaaaattcatggaggaggaaaagctctactgaagaaagctgataccggcattcccatgaaagtatctgtgtagaagtaagtattaaaatcagttgaataggcaaggcatggtggctcacgcctataatcccagcactttgggagaccgaggcaggtggatcacaaggtaaggagttcaagatcagcctgcccaagatggtgaaaccccttctctactaaaaatacaaagaattagctgggcgtggtggtgggtgcctgtaatcgcagctattcgggaggctgaggcagagaattgcttgaacctgggaggtgaaggttgcagtgagccgagatcacgccactgcactccagcctgggcgacagagtgaaactccatctcaaaacaaaacaaaacaaaacaaaacaaaaaaacagttgaataaagtaccttagagtcatctgttcaattaacatgtttaactccaaagaaatactgaaaatattttccaaaaaggaagtgccattttacgttcctaccaacagtgaataagattttcttttctggagccttgtcagtattcactaatgctttgctgtgcagccgttgtaatattatagtaaatgagtagcagtatttaatggttgttttaaatatacatattcttaatacaaagtcttgatgaacacttttttatacattgttttatgaggtgtgtgttcagatctatgtatgccagaaatgcctggcagcgttaatttaagcacactgtgagaatgaccctatagtttatgaagaatgtatgttcagagctctgagctaagaaatccaggagctgtcaacccagaagtttattccttgtctgtgaaggacatctgaatccctggcctatcccttggaacacaggatgtccaggtgattgatgctctttgttaaatctggaggttgctaggtagagggtgctaagtgaaaatcataatataaactacacgtgttttacaaatggtagtggttttcctgtccaacacacttttcctgggccacattgtatgcaagtcctcaatacaccctaggtcttgttcatgggctccaggtctcctcttcagccttttggacatggtgccatgcctattacagtcaataggggtctagcatgacaactggtaggcccagaacaaggtcaaagaaaatcctgcaagctcttagacaacagtgtcaaggaaggggagacctgtggggaaatcccaggcaggccatgcacatctctgtgggcccaacagctgcaatccttgatggatggggcccgctgcatgtgtacggggatgcctccaaaatgccaaaagttctggaggacctgttgcctgaggtggatgtgacaatgtgacaaagtgacagtcagattcctgagctgtggcagctgttggccactcctgactgcactctgagcaaccactgaggcagagctcattgcacaggctagggtgtgtcagccacgagaacagttgtaactataatgagatgccgcctgtagggataggatagcaaattggagaccattgtttatttggtaggccatttaaagtgttgctgactgccacaccaatgcattaggactactatgactacgtcatcctgggagcctaagtcctggcgtccgatgtagagctccagtgggaaggagatgaaggttaggatgagtccataaaggttcttgctctgcagcccctgctttgctgtctcacttggtgaacagagaatgggaggtcaatgcggacaaagtccagggtccaggcttatcagtcaaatacttggtgtcatctggttacataagactatagttattccatatttcatcatagataagataagatgcaggtctactcatgtcccaccacaccaaagcagttggaaacctcccaaggcctcctgggacattggcgatcctttattccccatttcggcaaaccccttgggcccccatggcacttagacaagaaggtgccccactgcgactgttccaaaagggaggatgagggctctgaagaagctgaagtcacagtgaaatgaatacaaaccttgggagttctagtgcagggacagccctgtgaattggatgtagtcagttaccctgaggggtttaggtggggactgtgttaaaggcaaggacataagtgtgtgtccctaagaccctggtctcaaagacagaaggaagctgaagtgagatatactgtttaggagtagcaactgcactacatgtcatgccttacgagtgtaggatgtgacaaagagggccactccacatccggaacaacctttagcaggctggctaaaggatgccttccagacacaaaagccttggaatgccaggacacagtctgtagccaaatggtacttgtggtggtcaccaccaacataaaagtgggccaactgtgccagcagaagttagccccacagaactttcccccacctaagagaaggcagtgcaccacaatgcggaattccaccactgtggaattgggggagcttagaattggattcagacacaaggggagagagtggatcacagggtggcttctctatgggatagggggtggagagtattatactctctggactcaagatgagtaaaatgacacccatcacaaaccatccagccctatgatggcacctttatggtaagtggttgcaggctccaagggggccgggtccaatgaggaagatgcccccacagctcgttctcaatggcagactatagaagagttgcaggatatcttctgggagtcgagatgaggcatgctaattatgctgagaattattgaagtcccaacaatgaattgtttactgcaaaataaaagctacagttatgtattcagtgcctacccaatggcatggtgcactgatttccacgttaagccccctgggagggcagccaacatttcatgtgccccaggtagttgctgacttaggagaaaagaagaaactgagtaagcaagggatgcaccctactgtgatgaagaacaatggcaccaaaggaagagagacagccaaggagccagtcagggtggccagacaacgaatgtgctctaactggcaacacctaccagttctctgggcccatagcggcaataggtggttatggaagggccacggaagtcagaccggttgaactagtgatacgacctgggggactgccacccagaccctgtgtagtatacacagcttccatcctagaacacatgagaatggatatcttcttaggcgtgaccctccaaacaacggccagggaattccaacggagagttagagtggtgatatgtgtgaccaagcagaaggcaaactggatgccagtagagctgccaacccatggggagtcccacagctggagcaacaccacccgccctgggaggggaagatgatccaatcatgaagattgttaaggagctagcccaggtaggcattaggaggccactgcatggttcctacaacagacctgcatggcccatgcagaggccagttgagacatggagaatgacagtagattactgggagttaaataaggtggtctcccgagtgaatgcagctgttcctaatatctcctccagtctgacgagaataggagaggtgttagccacgtagcatttccttatcagtttagtcaataccttcttcagcatttctgttgccccagagtcaagatcaatttgcattaacctaaaaagaacaatggacttttactgtcttgttccagggatatttacacagcccaaatctcacagcctagtgacctccaacctcagtcgatgggctgacccaaaggggatacatgttttccactacattggtgttatcatgataacctctgagtcttttttcagcttataaattacagcccctgtcttgctgtctcacttgctgaatagaggatgggaggttaatacagacaaaatccagggtccaggcttatcagtcaaatagttggtgtcatctggttgggtaaaactaaagtcattccatctgccatcatagataaggtgcaggcctacccacgtcccaccacaacaaagcagctgcaaactctcaaggccttctggagcatcagtgtccttttattccttttatttgacatccctgaaggaggctgctaggggagactgtgtccctcctaaattcatgtgctgaagtcccaacccttggtccttcagaatgaaatcatacttggattagtgtcctttaaagaggtgaataagttaaagtgagattcctggagtggggccctaatgcaatctgactgttgttataagaagaggaagcaggagggagggtgcacaggccccgagggacggccatgttaccacagaacagtgagaaggcgccatctgcatgccagggagcgagacctcagaggaaacccacccagctggcagcttgatcttaggctttcatcctccataagtgtgaggaaattggttttgtattgtaagccatccgatctgtggtatttcgttataaaagccctataaaatgaatacagtaggtaataggagagcttctatacattgaaaaagtcggatggccagaaaaacctagacactcctgttcagacctgagcagggtgatggacctgctttgggacaggagaggggaagagatgaacccagcacccagacccagctgagcccattcctcagcaggccgtccctgggccggagcttgcacaggtgtgaaagagcctgtcttggtcttcaggggctcatggagttggacggagaatggtgtagactcaagaacacgtcatcggtgtgcccgtgtttatctgaatgggatgtgtttctagggtgtgctcatccccaaagaagaattaatcaggtctcttgggctaaaaagaggttgtggcatttgtgtgtattaataactgtggtcggacagtaaattatgttaaactgcttatgggaaggcacaatggaaagaaacactttgttacagaaggaaaaaaaaggtgattatttaaatgaggtgcctttgaaggtcaccatgccaagaggagcccatcacatgatagtgctggctttcatgttcaggagatcaggagggtccgtccgctggcttttatgacaccctagacagagctgagagtgtaatgtatgaatggaggggaagtggagagaggggaggccaaatgtttggtgggaatggagggtcactattggagccattaggaaatacacaagcatgaattatgctggaggacagaacagtgttcctggggaatattgtgttgctttgggagctgctgaacatacaggagtttcactgttcctagttctcaaattctctagactctctggacaacccagttttaaatattgggaatataggtaagacacattcgttattaaaaattattaagagaagatgtaggaagaaatttaaagtaatccatttggttatgaaaatttagttacagcgaactgtgatgtccgtttcttacttggaataatggaatgtaagtcattagtcatctcaacggttcatttttccataaccatcaattacaaaactgctgagtaatttcctgaattgcccaccatagaaactgacctcacatttcctcaatgagaaactgccagtcccgttgatccagcctcgttcttcccatcagggattttgtatctctgtggacgtgtggcacagtgctgcatatccatcggcatatggcctcaggaaaggcgccagcctatccatgcatgatgaagcttacttaggggatgaagcccgcatgctgggtgagccagtgccaacagctgaaagaatcaactgcctggtgtatgatgcttttatgaaaacaagcccagggcctcttgcattcttctgtattagattctctggtgaagatttttattcatttctgcctgaaattgccacatataattacctggaagcattacaataaactgatttggaagttaactgacttcctggtgaggttaaaatgagtgtcaggtgcatagtgagacagaccggagacatggatgcatagcaaacttgtgctcaccatggtttctatcttagttagggaaacttctgtaccttccttagatgttcaggcactccattgaggaccctggcataacattatttattgacagaccatagctcaaagtatagaactggatactaccaaggaggatatactattactattttatctttatcttaaaatatactcttccatctgaggtgaaaattaatccagatggtagaacttattgcagttactacagcattttagcaaatcaaaagccgcagaacaaacatatggacagatggcaggtatgttttcggaatcgtaaacaagttcgtgatgactgtaaaaccaaggggtgtctcacgagggctggaaacctctcacaatgaaacaacacaatgaggatctttgaaaagtactctgacctcctggtgagctggctgatatggaggctgagctccatgtagaaagccaaaggaatttctgcaggacgtcatcatgccaagcacagccgtaacctgggtcccagcccttttcacacgctcaatggttagatcttgggagggaatcaaagaagccatagtaaaatatcaaaatttaaaccccgattttgaatttaaaaagtgttaaaatatggttgtggcctacactcagaaaatctgtgtccttcagatggtttctcagtggcaccagatggtttcaagtggctattcattaagtttctcagtgaaattaccagacatagaataaataaattgtcactgtcttaaatcaacccatgggaaaggaaaactgtgtaaatacagcagagaggaaacattgctcaagggaaaaacaatctccagaaagtattgttaaagaaacagaggccctctttccagccagcgccgagcgatgggcacctctcgggacaactggcacaagggccgcaaagctgggggcaagagaaggccctgccacaagaagcggaagtatgagttggggcgcccagctgccaacagcaagactgacccgtgccgcatccacacagtccgtgtgcgaggaggtaacaagaaatactgtgccccgaggctggacgtggggaatttctcctggggctcagaatgctgcgctggtgaaacaagggtcatcgatgttgtctacaatgcatccaataacgagctggttcgtaccaagaccgtggtgaagaattgcatcgtgcccatcgacagcacgccctaccgacagtggtacgagtcccactgtgcactgcccctgggccgcaagaagggagccaagctgactcctgaggaagaagagattttaaacaaaaaacgatctaaaaaaattcagaagaaatatgatgaaaggaagaagaatgccaaaatgagcagtctcctgggggagcagttccagcagggcaagcttcttgcgtgcatggcttcaaggccgggacagtgtggccgagcagatggctatgtgctagagggcaaagagttggagttctatcttaggaaaatcaaggcccagaaaggcaaataaatccttgttttgtcttcacccatgtaataaaggtgtttattgttttgttcccaaaaaaaaaaaagaaagaaaaagaaacagaggcatcacacttactagaaaaacatattctatttcatatattatggggatatgacgtgatgttttgacatatgcgggcattgtgaaattattaaatcaagtaaataaacatgtccatcacctcacatacttattttttatggtgtaaacgtgtaaaatctactctcttatcagttttcaagtatatagtacattagtatcatggaagtcaccatgctgtgcaatagatcttcaaacgaattccttctatctaaccaaaactctgtaccctttcaccaacgtctcagctttcacatgcccctgacgccagcccctggtaggcaccattctactctctactctgagttcaacatttttagattgcatgtgtaagtgagatcatggagtaattttttatacctggcttatttcactcaacataaagagtcaaatgctcaacatcactaatcatcagggaaatgcaaattaaaaccacgataagatatcacctcacacatgttacaatggcttagtctcagtctgtctttttgttactataaccgaataccagagactgggcaatttctaaagaaaaggaatttatgctttatggtgcttgagtcagagaagtctaatatcaaggcactggcatctcacaagggccttctcactgcctcatctcacagcagaggtgggtgagcaagagaccatttgtccacgagagaaaagagaccatcttttattagaaattcactcctataataactaacccactccattgatagtgacagtaatccattcatgaggacagagccttcatgacttgatcacataataaaggtcccacctctcaacactgttgcattaaagattatttccagatcctaaactttgggagacacatttaaaccatagcattccattcctaatatcaaaatttatgtccttatcacaatgcaaattacattcattccatcccaattgtctccaaagtcttatccagcatcagtgcaaaagtctgaagtccaaagtctcatctaaatcagatatgagtgtgactcgaggcacaatttagcctgatataaattgtttccatctgcgagcctataaagtcaaaacaagttatctactttcaaatacagtgaacaatggggcaggtatgggatagaaattcccattccaaagctcagagagaggcaaggagaaagcggtgcctagttcaaaacccaacagggaaaaaaacattaagtcttatagctggaaaatcatcctctttaacggcatcttgtgcacactggggagggggatgggcccccaaggcctccggcagtcttgcctctatatattttctgggttcagtccactcagccgctctcacaggtgggactctcaggcctctagctctcctaggctgactggaaactctttgtggtacctccaaacccacatttctgcttggcattgtgctaagggcccagtgtggtgactctgtctctgcaacaagtcactgcccgagaccttaggctgtccttaggctgcccgagaccttaggccgtccacagcattctttgaaatctaggtggagaaagccatgccctcgtggttcttgtattctgcacacctgcagaattaacaacacatggatgccatggaagttgatgacttgtaccattaaagtgatggcttgagccacacctaggtcctcctgagccacagcatgggcagccaaggagtgctgtgcctggacaccgggaacagagtcctaaagtgcctgctagaagtcaggccatagatttccttcaaatttctcccaccatataacctcgttcatggctctgaacttccaccttacagaaggacctagggatgaacacaattcagccacgttctttgccactttatggcaaggatggcctttgctccattttccgatgagctattcttctttttctcctgagacctcatcagaacggcctttattgtccacggttctactgacattctaatggtcatcacctaaataatctctaagaagtttcagaatttcctcacagctctcttcttctgagtcctcaaaagaatcacctctagtgttctattcagggcaatccagactttttatagtctgatcctccaaattattccagtctttgtgcattactacatccacttctacattttggggtatttgttatcgcaacagccccacctcttgatactgatttttcgtcttagtccactttgtggtgcaatgagtgaataccacacactggctaaagtataaggaaaagaaatttattttctcgcagctctagaggctgggaagtcaatatcaaggtgttagcatctggcaagagccttcttgctgtgatgtccatgtggaaggcaggagagcaggtgcgaaggatggaaaggggtttaaactcattttttaatgaggaacccaggcctgtagtaactaatctgctaccacaatgagtaacctactctgacgataatggcattcattgcttcatgagggcagagccctcatgacctaatcatttcttaacattcccacctctggacactatggaatttgggattaagtttccaatacacatcctttctaaacagcaggggctttttaataggttgaccacccaaggctgcaggaggctctgaagcagtggcctgaggttggctgtcctttgtgagaatggagagaagtgaactgactcatggagacacaagtagatgaggtaaaggcattcattgcttcattacatggatggtgaggtcgattgaaggcattaacggattaaagatggtggcaaaaccgtctgaggtggagaccacggggagtccatcagaaatggaggacacgtcccaataaatggtgcttcatttccctgcaaagcagaagaaagcaaagaacaaaacacaacatcatagtgtacactgagcagtggattgagagaagagtttcctaaggcataactgacagagtggagaagacacacaaatctttgcatgatgctaacatttggactgtggcttcattatttcttattaatattttactgaaatatcgctagaaggagactgaaaatgaagtgtgaaaagttaaatgggatttctgctctatgtccttttcagatgagaggaactagggaattccagggaagaaacaataatagctgctgagcaaggcttttgcagggcaggacaaggaatccccaaagagaaaacggaaacctcagcttcactttgcatctgctcctgagccaggtcctgagcgacccctgtaggtcctgagtgcccctccgtaggttctgagcatcccttggttgctgggcgccctctggtggtgtctgagcccctctggtggtttctgagccccccgccttatgtctgatcctccctggtggtgtccgagtgcccctgctagtgtctgagccccctggtggtgtctgagtccccttcttagtgtctgagccaccctattagtgtctgaggacccctgatggtgtctgagcccccagttagtgtctgagccaccctattagtgtctgagcccccctggtggtgtctgagcacaggagagctcctctgaaggaagggtctacatggggacaggcgtgcttgtctcagggaagggtccatgtggggacaggtgtgcttgtctgaaggaaggttccacatggagacaggtgtgcttgtctcagggaagggtccacatggggacaggtgagcctgtctgaggggacagaagtgcttgtctcaaggaagggtcctcatgtggacaggtgagctcttttgagggaagggttgacctggggacaggcatgcttgtctgaggtaagggtcctcctggggacaggtgtgcttctctcagggaagggtccacgtggggacagaggtgcttgtctaaggcaagaatccaagtagggacaggtgagctcgtctcagggaagggtccaggtggggacagttgtgctcatctgagagaagcgttgaagtggggacaggtgtgcttgtctcaaggaagggtccatgtggggacaggtgtgctagtatcaagaaagggtccacatagggacaggtgtgcttctctcagggaagggtgcatgtggggacaggtgtgcacatcggagagaatggtccacctggggacaggtgttcttgcctcagggaagagtccaccttctcagggaagaagtgtgctcctctgagggaagggtgcacatggggacaggtgtgcttgtctcagggaagggtccatgtgggaacaggtgagctcatctgagggaagagtccacgtggggacaggtgagctcatctgagggaagggtccacatggggacaagtgacctcgtctgagggaagggtccacgtggggacaggtgagctcgtctgaaggaagggtccacttggggaccggtgtgctcctctgagggaagggtccacgtggggacaggtgtgctcctctggagggaagggtccacgtggggacaggtgagttcatctgaaggaagggtccacatggggacagttatgctcctctgagggaagggtccatgtggggacaggtgtgcttgtctcagggaaaggtccacgtggggacaggtgtgctcaccttggggaagaggacagatgagctcatctcagggaaggggccatgtggggacaggaccaagggttgggacttcagcacaagaatttaggaggaacacagtcttccctagcagcctccttcagggatgtcaaatattttccttctgttccctgtgaaagccttaaaggggtagggaaagggcgttcaacctgcacactcgtagaggggaaaccagcttcattagtaatcgttcatctgtggtaaaaaggcaggatttgaagcgatggaagatgggagtacggggcgttggaagacaaagtgccacacagcgcagccttcgaaacacaccacggtcacgttaagtttaaatggagtgaccacattcgccaggaaagggaaatatttacacttttgaagaaacagtaatttgtgtttctgattatgatctggccttggattttccctcccctcataagcaatgacagaattggcagaaatatgtgaaacgttagttctcagacatgagacacccacagagggccccctgtgcccttccctgagagctgatcagctcctgcatctgaagaaatgaccaaagaccaggagagaaccacacagaagcatcggagggacagcacctggggctctgatggggtcaggaatagcatctgttcccaatagatggactaagtaaaaagtatcataattcacaagagttttacatagcacagaagaaaaagttaccctatatcaactgttgatcttgtgaatccaggaactctggattcaaggtggtcgggcacatcttgatttacgcatttcagggacacatgagacatcagtcaatataagtaagaaggacattagttccatccagaaaggctgagacaactcaaagcaagtcctccccacttagggcttccaggtcacaggtaggtgagagacagatggttgcattcttttgagtttctgataagtgtttgcaaaggaggccatgaggatatgcacctgtctctgtgagcagagggacaactttaaatagactgggaggcagatttgtcctgagtggtttccagcttgacggggcccaagatattttcctttcacaatctggtaacttcaaacaaaacttcaaagccacaacaaaacaacacaacaacaaaaagaataagacatgggtacttattaagagtagaaaaacattcagtccccaaggaaaatattggcagtgtctacctccacatgacaaaggagtaagcagtgtgagccacagaaaggagcactattaacccacagagcaaccgagaataacacgggtgatgcgagggcattggacgcacatcattgcattttgtagattcagaaagaaacggaaaagattgacggtggtaaaagagacagccctgcttccctctcccttttccctccccgatgaggcctcacagccatgaccctcagcctcatcccgcagtgcagcagctgccgtcctgtccaggcccaccccctgccccgccctgggactgttacctcattccctcccggagtccaggtgccccccggggtgtggtgcgggagcctggggaggccctttgttctctgtcagggtctccctgggagggacgcagccaccgcagctggttggggcctggcttcgcccaggacagtcctttcctttcccattgtctttggatgactatcgctgggctgggacatgaggcgggcagaggcgcgggtcacccttaggacccccctcttgctgctggggctctgggcgctcctggctccggtccggtgttctcaaggccgtcccttgtggcactatgcctcctccgaggtggtgattcccaggaaggagacacaccatagcaaaggccttcagtttcccggctggctgtcctacagcctgtgttttggggtcaaagacacgtcattcacatgcggaggaaacaccttctttggcctagacatctgctggtgacaactcaggatgaccaaggagtcttgcagatgggtgacccctacatccctccagactgctagtacctcggctacctggaggaggtgcctctgtccatggtcaccgtcgacacgtgctatggggacctcagaggcatcatgaggctggacgaccttgcgtacgaaatcaaacccctccaggattcccgcaggtttgaacatgttgtttttcagatagtggccgagcccaacgcaacagggcccacatttagagatgatgacaatgagacagaccccctgttctctgaagcaaatgacagcatgaatcccaggatatctaattcgctgtatagttctcatagaggcaatataaaaggccacgttcaatgttccaattcatattatcgcatatatggcaatattacaacttgttccaaagaggtggtccagatgttcagtctcattgacagcattgctcaaaatattgatctgcggtactatatttatcttttgaccatatataataatcgtgacccagcccctgtgaatgaatatcgaattcagagtgcaatgtttacctattttaaaacaactttttttgatacttttcatgttcattcatccacactacttattaaatacgtgccacatgaatctaactatgaacctgaaaggtataacttctgttcccgtatagccctgttacacattggtactccaggcagacattatttattggtagccgtcataataacccagacacagatgagaagtattggtctggagtatgatgataactactgcacatgtcagagaagggcctcctgcattatgcagcgatttcctgggatgacagatgcgttcagtaactgttcttatggacatgcacaaaattgttttatacattcaggccggtgtgtttttgaaacacttgctcctgtgtataacgaaaccatgacaacggttcgctgtggaaacctcatagtggaggggagggaggaatgtgactgtggctccttcaagcagtgttatgccagttattgctgccaaagtgactgtcacttaacaccggggagcatctgccatataggagagtgctgtacaaactgcagcttctccccaccagggactctctgcagacctatccaaaatatatgtgaccttccagagtactgtcacgggaccaccgtgacatgtcccgcaaacgtttatatgcaagatggaaccccgtgcactgaagaaggctactgctatcgtgggaactgcactgatcgcaatgtgctctgcaaggcgatctttggtgtcagtgctgaggatgctcccgaggtctgctatgacataaatcttgaaagctaccgatttggacattgtattagacaacaaacatatctcagctaccaggcttgtgcaggaatagataagttttgtggaagactgcagtgtaccaatgtgacccatcttccccggctgcaggaacgtgtttcattccatcactcagtgagaggagggtttcagtgttttggactggatgaacaccatgcaacagacacgactgatgttgggcgtgtgatagatggcactccttgtgttcatggaaacttctgtaataacacccagtgcaatgtgactatcacttcactgggctacaactgccaccctcagaagtgcggtcatagaggagtctgcaacaacagaaggaactgccattgccatataggctgggatcctccactgtgcctaagaagaggtgctggtgggagtgtcaacagcgggccacctccaaaaagaacacgttccgtcaaacaaagccagcaatcagtgatgtatctgagagtggtctttggtcgtatttacgccttcataattgcactgctctttgggacagccaaaaatgtgcgaactatcaggaccaccaccgttaaggaagggacagttactaaccctgaataacactaattcagcctcccgatccctgtaaagatacagagaatataacagcaaaatctatgaaacaggatcaggggaagggatggcaaagctcaagtccacatttcttgaagtccacaggaagcacagggtcctgtttcacatcacagggaaacgggaggcattggcttctgtcccaggttcttgtaggtcgctgatgctcactctgaaataaatcttcaaaaacacacattggtgccttccacattttcttagactcctctgggagcccaaacttggccagaacctcttgcctggagagacatgaatgagcatctggctcttgtcctgaggtctctggtcccagaattaacggaagttgccaccagctccttacagggaacattcatgacatttctccagaagagagctccagagcaatgagcttcctcattccccaggtaatctgtccttctctaaacccgaagtcagtttagggtgatccagggctactccctgttccctgtctgttcctcacgggggtgctgtgggctttgcagtgagagggacttgggttcaaatcccccaccaagcaaatccccctacctggggccgagcttcccgtatgtgggaaaatgaatccctgaggtcgattgctgcatgcaatgaaattcaactagaaaaataggtagacgtgaggggcaagctgtctgtcatttagtgtgagctctgtgagtggcagctgccccctttcttcctgcccccacatttccttgaactgaaacaggaagggaagctgagtaagtcgtgatgaggaagagaaaccaggcttgtagcagcacaggctggtccgggtggaaaacagggctaggtgtatcactgagttattgtaaaggaaaatggaagttaaatgtataaataactgaatgagataacattttattttaacttaaaattcacactaatattgacttttaaaatgcagtgtagatatgtcagagagaatttcaaaggcaaagcccaccgacggaagaaatcacccttcccataccatccacagaaaactgttggtattctagggtagtactgagatctagcatttttctgaatacatctgtggttctagatgtcctgcttccatagatattgtttagaattcccacccctttctccaaacacagcttgatatcctttctctgaacctgttagaaatttcctccattcagctgtcataaagatgcgagcaatccattcctgtgcctctgtcagtgtgttctattattttgtggctgaacgctaatggacagttaagtgtgaggtcagtgaatacagtgccctccctctatgtgtccttcgggtgtgaggggttttgctgatagagcagcaggccccatcccaccctttatgcatctccgccccccacctcacgctccagctgacctctcccctgtggcctggggcgttccccagggggaatgacctctcctctctccagggcccacccactcagtgcccgtgcaagaccaccacgcttggcacggccccacctcgtgtcagggcctgtgtcccctgccccaccccctaaacagatgggaaccactgggactctgctcagggcagggggcggaggtatgtgtgaaaggaaggcaaatgtgcactctgttggagaaatattataggtagtttgagcaaaaaatctaatgccatgggaacttttagaatgatacgtattttaacaaagaacatgaccaatagagtttgtattgaagccaggaaaacactatttagagcaacagcaatatcaaaaacacaagccaacagttcaccaagaaaaaccaccattaaccccatggaaatggtcttccaagagcatcggcacttaaatcctggaaatctgcctgcctcagcacctgttgtcctgacctgccctcctgtgtgtcctaatcactcccaaacacggggcctgcactgtgggagattcacactgtgccaggtggagggagcaggacaactgctaacaggttgttggtgtggatgccgaggccacccaagcaggtgtaaactcccacctgtggggcagggaagagtgcacgggagacatgtcccgggcatagggtgagggagagctgtgggggctctgggttctgaagtgggttctgaagagggttctggcctggcagggataagaccaaccagcatgtgaggccaggctggagtctggacctctgaagctgcaagggtcatgggctgcttggccccaggggctgtcctggttctctatggagtactttcaaacattctttcttcttccaatccccctccttctctcccaaagcctgcatctcccaaatcctctttgtcggatcctcggcttcactctgcatccgtcctgagcatcgatcttccaattccatcctcttctcttctgctatgtctaagctgctgtgaagccacctgctgtaatttactgctttatatttaatattgtaccgtacatctgttctgtttccctcatcataaatgcttcatttcatgctcagcatctgagaacacaaggccttgtcagctgtcacctccttccgttctctgtttccttcctcctatccccatattgctcatcatgtccagtctcctgccatcctgaatgcttctgatggaaggtctgagatgtctcatgagcactgtgaagattctttgtaatgtgagcttgttccaggcaggaattctccttcacccagccctggaagccaagtataggcagatggccatgctcaatcaaagactgagctaacttaacagtggctttggttttaaggtttctccaatccccagggcacaggatttcagggaattcaggtgagagtctgggtgttacccttcaggaggctgtaaactccatttcacctagtctacaccacagactatggaaactatatatatatatagttctgtccctctagagaaacctaatatgtatatatacaatatataatacgtattatatattatatataatacgtattatatattatatatattatatatatattagagtttattgaggagtattaaactcacaatcacaaggtcccacagtaggccatctgcaagctgaggagcaaggaagccagtccgagtcccaaagctgaagaatttgaagtctgatgttcgacggcaggaagcatccagcacaggagaaagatgtaggctgggaggctaagccagtctagtcttttcacgtttttctgcctgctttatatcctggccacactggcagctgattagatggtgcccacctagattaagggtgggtctgcctttcccagtttactggctcaaatgttaatctcctttggcaacaccctcacagacacacccaggatcaatactttgcatgcttcaatccaatcaagttgacactcagtatcaaccatcacaagtccaccccttgtcaacttgaacccatacaaatctcctgagatcatacataatcttcaaataaagacaataataaggtcataattacacctaatgtaatacaactatcttttgtacaaccagaaatgcaccaatccccaacccaaatgctattatgtaaagttaagaacacttaaatgctgatatgaagtcaataaattttatgtcacatgataaaggaaaaaagaaatgaaggaattttcttagtacaagtgtgtacatgcacaaacatgtttttaacaaaagaagaaggaaatactgatgacaattacagtcctcatttctgcaactgatcacgtggttgtagctggtattgatgactaccttcttctactacccattctgtattccctttgccttcagcaagcatcacagcaggtagagttttttctcctagtggagtgatgcaaaccttcattcctgaagggtctgggccatttgtagtcctgcctggattgggctgttgtagtttcccgttgaccttaatgacagggcatggtaatgttaagagacgccctaatggatctcctgtattccatacatattcttccttacctccattgtggagtaatagactgattgcatcttgatagtccaggtcaatcagcccagccaacactgtaactcccctcttagcctgtggacttaaaggtaggaggggcccaaagtggccaggtggaaatctttacttccagtttaatggaattgttgttgtttctcctgatggcagcattattcccactggaactaagacctctaggccaacagaatgtaatgtcatgggaccaggaagcaaaaattttgctagtggatcactaggggtgatggtgaatggtgccatttccacttccaccccttgattcctggatccatgaattatggctatgggagaaagagtaccatatattggatgctgatttggagcatacatggccttttggagagctttgccccagccctgcaaagtattggagcctagttgacattgtaattgtgactttgaaaggccattccattcttctatcaatccagctgcttcaggatgatggggaaaatggtaagacaagtgaatcccatgagcatgagcccactgccacacttctttagccgtaaagggagtgccttggtcagaggcaatgctatgtggaatactgtgacagtggataaggcattccatgactccacagatggtagtcttggcagaagcattgcatgcatatctgcagtaagtgtctatttcagtgaggacaaacctctgccctttccaggatggaagaggtccaatataatccaacctgccatcaggtagctcactgatcaccctgaggaatggtgtcatttgggtagagacccagagccaaaccagatcacgccacccaacccctcccaaatctcatgtcctctttgcatttcaaaaccaatcatgccttcccaacagtcccccaacatcttaactcatttcagtattaactcaaaagtccaaatccaaagtcacattggagacaaggcaagtccctttcatctatgaacctgtaaaatgaaaaacaagtcagttacttccaagacaaaatgggggtacaggcattagatacatgctcccatttcagttgggagaaatgagccagaataaaggggcttcaggtcacatgcaagcccaaactccagtggggcagtcattaaatcttaaagcttcaaaataatctcctttgactccattcctcacattcagggcatgcttatgcaaagtgggggctcctacaaccttgggaagctctcaccctgtggctttgcagctctgaccccatggctgctctcatgggctttgcagagttcagccctcctggctgctctcattgagtgcatgcagcttttccaggtgcacagtgcaagccgttaatggatctaccattctggggtctgaaagatggtggccctcttctcacagccccattagtcactgtctccagtggggactctgtgtgggggctccaaccccacatttcccttctgcactgccctagcagaggctctccatgaaggctttgcccctggcgcagacttctggctggacatccagtcatttctataaatcctctgagatctgggtggaggatcacaaagctgaactcttctcttccgcacatccctaggcccaacatcatgtagaagccaccaatgattggggctttctgaagcaatggcctgagctgtacattggacttttttagccacagctagacctggagcagctgggacacagggcaccaagtcccaaggctccaaagagaagctgggccctggacccagcccatgaaaacatttttccctgataggcctccaggcctgtgattggaagggctgctgcaaagatctccgacatgccctggaaacattttccccattgtcttgattattaatattcatctcttcattacttatgcaaatttctgcagccaacttgaatttctccctagcaaatgtgtttttctttactaccacatggccaggctgcaaattttccaaacttttatgctctgtttcccttttaaaaataagttcctatttcagatcatctctctcaagggcaaagttccacagatttctagggcagggacaaaattccatcaagcttggttttatacattttagagaggcatgagacatcaatcaaatacatttaagagacacattggtttggtccagaaaggtggaacaactcaaagctagggcttccaggctataggtgaatttaaatattttctggttgacaattggttgagtttgtctaaagacctgggatagatagaaaggtaatgttcaggttaagataaagattgtagagtccaaagttcttttgaagtcttatagtggctgcccttagagataataggtgacaaatgtttcctattcaaatcttagttgaactctttaggattgggaggttctagaagaaaaagatctagctatgttaatagagattctttacagatgcaaattttcccccacaaagaacagctttgcagggccctttctttctttctttctttctttctttctttctttctttctttctttctttctttctttcttttttagatggagttttgctcttgttgcccaggctagagtataatggcacgatcttgtctcaccacaacctccacctcctgggttcaagtaattctcctgcctcagtctcccgagtagctatgattacaggcatgcaccaccacacccggctaattctgtatttttagtagacacagggtttctccatgttggtgaggctggtctcgaactcccaacctcaggtgatccgcccacctcagcctcccaaagtgctgggattacaggcatgagccaccatgcccggcctgcagggccatctcagagtatggcaaagaaacatgttttggggtaaaatattttgattttcttatttgtctcataatgttatgccagagtcagtttggaaagtaaatcatgatatataggtttaaataaaacccatctgatgagaatttatgatttgtagagcatgcctccccagactctttagataggaatttgggcaagatgaaaaaaaaatcagagtttagtcctcactacctaagaccagctcagcttggacttcactgttcatgtcactatcagcattttagtcaaaaccactcaataagtctctaggaagttccaaactttcccacatcttcccttctcctttcaagttctccaaactgttccaaccgctgccaggaggtacccagttccaaagttgcttccagattttgagttatctttatagcagttccccactcctggtaccaatttactatattagtctgtttccacagtgctataaagaactgcccgaaagtggttaatttgtaaagaaaagaggtttaattgactcacagtgctgtgtggttagggtcggaggctcaggaaacttgcaatcatggtggaagtggaagcaggcatgtgacacatggcagcaggtgagagagagaaagagagagagagggaatgaaggaggaaccaccatacatggataaaaccatcagatctcatgagaactcactcactatcaggagaacatgaggacagcatgggggaaaccacccctatgacccagtcacctcccaccaggtccaccccttgacacataaggattactatttgagatgagatttgtttaatgacacagagccaaaccacatcagcatgtgacaaaggtctaatatcaagaatctatgagggggcagttccaaaatggctgaataggaacagctccagtctacagctcccagcatgagctacacagaagacaggtgatttctgcatttccaactgaggtactgggttcatctcacgggggcttgttggacagtgggggcaggacagtgggtgcagcccaccaagagtgagctgaagcagggcgaggcattgcctaacccaggaagtgcaaggggtcagggaattcccgttcctagccaagggaagcggtgatggacggcacctggaaaatccggtcactcccaccctaatactgcacttttccaacggtcttagcaaatggcacaccaggagattatatcctatgcctggcttggaggttcccatgcccacggaacctcgcttattgctagcacagcagtctgagatcaaactgcaaggtggcagtgaggctgggggaggggtgcccacaattgctgaggcttgagtaagtaaacaaagtggctgggaagctcaaactgggtggagtccactgcagctcaaggagacctgtctgcctctgtagactccacctctgggggcagggcatagctgaacaaaaggcagcagaaacctctgcagacttaaatgtccctgtctgacagctttgaagagagtagtgtttctcccacatggactttgagatctgagaatggacagactgcctcctcaagtgggtccctgacccccgagtagcctaactgggaggcaccctccagtaggggcagactgacaccttacacggctgggtgcccctctgagatgaagcttccagaggaattatcaggcagcaacatttgctgttcagcaatattcgctgttctgcagcctctgctgctgatacccaggaaaatagggtctgcagtagacctccagcaaactccaacagacctgcagctgagggtcctgactgtcagaaggaaaactaacaaacagaaaggacatccacatgaaaaccccatctgtacatcaccattatcaaagacaaaaggtagataaaaccacaaagatggggaaaaaacagggcagaaaagctgaaaattctaaaaatcaaagtgcctctccccctccaaaggaatgcagctcctcgccagcaatggaacaaagctggatggagaatgactttgatgagttgagagaaggtttcagatgatcaaacttctccgagctaaaggaggaagttggaacccattgcaaagaagctaaaaaccttgaaaaaagatcagatgagtagctaactagaataatcagtgtagagaagtccttaaatgacctgatggagctgaaaaccatggtatgagaactacgtgatgaatgcacaagcttcagtagccgattcgatcaactggaagaaagggtatcagtgattgaagatcaaatgaaagaaatgaagggagaagagaagtttagaggaaaaaaaagtaaaaagaaagaaacaaaccctccaagaaatatcagactatgtgaaaagaccaaatctatgtctgattggtgcacctgaaagtgacagggagaatggaaccaagttggaaaacaccctgcagtatattatccagcagaacttccccaacctagcaagacaggccaacattcaaattcaggaaatacagagaaccccacaaagatactcctcgagaagagcaactccaagacacataattgttagattcaccaaagttgaaatgaaggaaaaaatattaagggcagccagagagaaaggtcgggttaccctcaaagggaagcccatcagactaacagctgatctctcagcagaaactctacaagccagaagagagtgggggccaatattcaacattcttaaagaaaagaaatttcaacccagaatttcatatccatccaaactaagcttcataagtgaaggagaaataaaatcctttacagacaaacaaatgctgatagattttgtcatcaccaggcctgccctacaggagctcctgaaggaagcactaaacatggaaaggaacaactggtaccagccactgcaaaaacatgccaaatcataaagaccaccaaagcgaggaagaaactgcatcaactaacgagccaaataaccagctaacatcataatgacaggatcaaattcacacataacaatattaacctttaatgtaaatgggctaaatgctccaattaaaagacacagactggcaaattggataaagagtcaagacccatcagtgtgctgtattcaggagacccatctcacatgcagagacacacataggctcaaaataaaggcatggaggaagatctaccaagcaactggaaaacaaaaaaaggcaggagttgcaatcctagtctctgataaaagagactttaaaccaacaaagatcaaaagagacgaagaagaccattacataatggtaaagggatcaattcaacaagaagagctaactatcctaaatatatatgcatccaatacaggagcacccagattcataaagcaagtccttggagacctacaaagagacttagattcccacacaataataatgggagactttaacaccccactgtcaacattagacagatcaacgagacagaaagttaataaggatatccagcaactgaactcggctctgcaccaagcagacctaatagacatctacagaactctccaccccaaatcaacagaatatacattcttttcagcaccacaccacacctattccaaaattgaccacatagatggaagtaaagcactcctcagcaaatgtaaaagaacagaaattataacaaactgtctctcagagcacagtgcaatcaaactagaactcaggattaagaaactcactcaaaaccactcaactacatggaaactgaacaacctgctcctgaatgactactgggtacataatgaaacgaaggcagaaataaagatgttctttgaaaccagtgagaacaaagacacaacataccagaatctctgggacacattcaaagcagagtgtagagggaaatttatagcactaaatgcccacaagagaaagcaggaaaaatctaaaattgacaccctaacatcacaattaaaagagctagagaagcaagtgcaaacacattcaaaagccagcagaaggcaagacataactaagatcagagcagaactgaaggaaacagagacacaaaaaaacccttcaaaaaatcaatgaatccaggagctggttttttgaaaagatcaacaaaattgatagaccactagcaagactaataaagaagaaaagagagaagaatcaaatagatgcaataaaaaatgataaaggggatatcaccaccgatcccacagaaatacaaactaccatcagagaatactataaacacctctacggaaataaactagaaaatctagaagaaatggataaatttctcgacacatacaccatcccaagactaaaccaggaagaagttgaatctctgaatagaccaataacaggctctgaaattgaggcaataattaatagcttaacaaccaaaaaaagtccaggaacagatggattcacagccgaattctaccagagctacaaggaggagctggtaccattccttctgaaactattccaatctatagaaaaagagggaatcctccctaactcattttatgaggccagcatcatcctaataccaaagcctggcagagacacaacaaaaaaaaagagaattttaggccaataaccctgatgaacatcaatgcaaaaatcctcaataaaatactggcaaaccgaatccagcagcacatcaaaaagcttatccaccatgatcaagtgggcttcatccctgggatgcaagtctggttcaacatacgcaaatcaataaacgtaatccagcatataaacagaaccaacgacaaaaaacacatgattatctcaatagatgcagaaaaggcctttgacaaaattcaacaacacttcatgctaaaaactctcaataaattagatattgatgggacgtatctcaaaataataagagctatctatgacaaacccacagccaatatcatactgaatgggcaaaaactacaagcattccctttgaaagctggcacaagacagagacaccctctctcaccactcctattcaacatagtgttggaagttctggccagggcaatcaggcaggagaaggaaataaagggtattcaattaggaaaagaggaagtcaaattgtcgctgtttgcagatgacatgattgtatatctagaaaaccccatcgtctcagcccaaaatctccttaagctgataagcaacttcagcaaagtctcaagatacaaaatcaatgtgcaaaaatcacacgcatttctataacccaataacagacaaacagagagccaaatcatgagtgaactcccattcacaattgcttcaaagagaataaaataccttggaatccaacttacaagggacgtgaaggacctcttcaaggagaactacaaaccactgctcaatgaaataaaagaggatacaaacaaatggaaaaacattccatgctcatgggtaggaaggatcaatatcctgaaaatggccatactgcccaaggtaatttatagattcaatgacatccccatcaagctaccaatgactttcttcacagaattgggaaaaactgctttaaagttcatatggaaccaaaaaagagcctgcaatgtcaagtcaatcctaagccaaaagaacaaagctggaggcatcacgctacctgacttcaaactatactacgaggttacagtaaccaaaacagcatggtactggtaccaaaacagagatacagaccaatggaacagaacagagccctcagaaataatgccgcatatctacaactatctgatttttggcaaacctgacaaaaacaagaaatgggaaaacgattccctatttaataaatggtgctgggaaaactggctagccatatgtagaaagctgaaactggatcccttccttacacattatacaaaaattaattcaagaggattaaagacttaaatgttagacctaaaaccataaaaaccctagaagaaaacctaggcaataccattcaggacataggcatgggcaaggacttcatgtctaaaacaccaaaagcaatgacaacaaaagccaaaattgacaaatgggatctaattaaactaaagagcttctgcacagcaaaagaaactaccatcagagtaaacaggcaacctacagaatgggagaaaatttttgcaatctacttatctgacaaagggctaatatccagaatctacaatgaactcaaacaaatttacaagaaaaacaaacaaccccatcaaaaagtgggcaaaggatatgaatagacacttctcaaaagaagacatttatggagccaaaagacacatgaaaaaatgctcatcatcactagccatcagagaaatgcaaatcaaaaccacaatgagataccatctcacaccagttagaacggcgatcattaaaaagtcaggaaacaacaggtgctggagaggatgtggagaaataggaacacttttacactgttggtgggactgtaaactagttcaaccattgtggaagtcagtgtggcgattcctcagggatctagaactagaaataccatttgacccagccatcccattactgggtatatacccaaaggattataaaacatgctgctataaagacacatgcacacgtatgtttattgcggcactattcacaatagcaaagacttggaaccaacccatatgtccaacaatgatagactggattaagaaaatgtggcacatatacaccatggaatactctgcagccataaaaaaggatgagttcatgtcctttgtagggacatggatgaagctggaaaccatcattctcagcaaactatcacaaggacaaaaagacaaacactgcatgttctcattcataggtgggaattgaacaatgagaacacttggacacaggaaggggaacatcacacaccagggcctgttgtggggtggggggagtggggagggatagcattaggagatatacctaatgttaattgatgagtttatgggtgcagcacaccaacatggcacatatatacatatgtaacaaacctgcacgttgtgcacatgtaccctaaaacttaaagtataataaaaaaatttttaaaaaaagaaacacctgcttttttctgttttccatttgcttagtagatttttctccatccttttactttgagcctggggatgtcattgcatgtgagatgggtctcttgaagacagcatacatttgggtcttgcttctttctccaacttggcaattctctgccctttaattggggcatttagcccatttacattcaaggttaatattgatatgtgcatatttcatcctgttatcatgttgttagctgctcaatatgcagatttgattgtatagttgatttatagtggcaatcgttatgtacttaagtgtgtttttgtggtggccagtaacgttcttccattatcatatttagcaatcccttaagggcctcttgtaaggcaatctagtggtgatgaatacccttagcatttgcttgtctgaaaaggatcttatttctccttcacttgtgaagcttcatttggctagatatgaaattcttgcttggaatttcttttctttaagaatgctgaatataggcccccaatctcttctggattgtacagtttctgctgaaacctccattgttagcctcattgggttccctttgtatgtgacctgaaccttctttctagctgcctctaatattttttttcctttcaacctttaagagtctgatgtctgatggctatatgtcttagggatggttgtcatgtataatatcatgcagaggttatttgcatttcttgaatttgaatgttggcctctctggtgaggttggagaaattttcatggaggatagcctgaaatgtttttcaagtttctttttttctctttctcttcttaagggataccaatgtgtcatagatctggtctttttacataattgcacatttctctgaggttttatgccttcttttttattctttgttctttatttttgtctgactgagttaattcagagaatcagtttttaagctctgtgattctttcctcagcttggtctattctgctgttaatacttgtaattgtattctgaaattcttgaagtgagttttttagctctatcaaatcagtttggttctttcttaaaatggccatttcatctttcagcttctgtatcattttactttatttcttagctcccttggattgggtttcaacattctcctgaatctcagtgatcttctttcctgtgcatattctgaattctatgtctgtcatttcagccatttcagtcaggttaagaaccattgctgggaaaccagtgtgattatttggaggtaagaagacactctggattttagagttgcagagtttcttgcattaattctttctcatctttgtgggctgtttctttaatctttgaagtggctgtcctttggatgtttttgtcttttttgttgttttttggtgtgtgtttttgtttgtttgttcatttgtttgttttttgctcttatcttctttgatactcttgcaggtttgattgtggtataaagtggattcagttagctgtgtttcttgaaaatcttagagggtccaggctcacctcagcactcttgtggtgtgttctctgctctgggactgggcccctggctttattctctggccccttgagtttagaaacttgctgcattggaggggctgaggtgttcccagtccattggccacaacactatagtagggggtgccggccaaagcacttcattagagtggtggcagtgggatccattcttactcatgggtgccagcagttgtggagtcatggcagggtgcacatgcatctgctggggtgggggtactggcaggagcagagtggcagcatccctacataggttcctgctggcagtcacagcgcagtgaggtgcccgtgtgttggcagggacagggtggtggggcacacatgcacatgcttgctggtggtagagggagttgtgatctgctgtgcactcatgccagcaaagcagttgggaggtactatgggtggactggtgcacatcagcagaggctggcctgctggaggtctccaatggttaggcatggtctgctggcaaaggagctatgatgagggcccccaggaaacaccctggttgggcttccaaggctgtactgcaagcaggcacagccagcctggggccccaggagaggccagaaggcaaggaaattctcatttcagatgggccctgtcccatggacaagaccaccctgctttattcaggtcccatagtcactctaaggttaaaatctcctagaggaggttggtgagccttgggggatgggtgtcccctggctgtgctccactacagccattctcatgtcaaacactctgggctttacacagactggagtcctgcccctggcatctctctaagcagctgtcccttccagcacaagtgtccatgggggtcatggggtctcctgctgctaggattctggaggcccatggcaacagcaggccactcctcacctgttcaactcaacctttccccaggagttgctgggagccaggaatgagtcctggtgcttggcatccccatgcagggttcccatcttcctccaccttcagctcagcatctgtgtcctcccccgtctactctcaatccactctcaatgcctccccttcaaagatctgcttggaaagcacccgtcttcctgatgtctcactccctccatggcagatattcctcctggctgcatctagtcagccatcttgactcgcctccaaagtctttttaattaccacttcggttaaattagtaactatcattttacaatggcctgtgattctgttttgatcaaatattttgagccttttagcatctataacaaatgttctcaaaaatcaaaatcctaaatcaagtctctgccttagtcttatttctggggcttattaaggctataaaaattaatcaccataaggttgtacaagctttttacagcttccagtcaggctatgaactccagtatcaccacctccagcctgataattacatatattggaagaaaatcagttaaaggactccctctagacccttgaaagggtgtgagagacaacatggtttcgcctgccttcatgtgtcccagtccatccctgtggctgcctctgtccacctcagcttgcccactgtctttccttcccaactgtctgccctgctgacttctggcctcagtgacagatgcaaagacaaggcgacagccccacatagaccgtttaaccagtcccacatttgcataagctaaatggtcatgtcacagtctgttgcccaggctggtctcaaactcctgggctcaagtgatccacccaccttgacccccaaggtgctgggattacaggcttgagccacagtgcccagccaagaacccgtttttgagtgggcaccttggcacacacctgtaaacgcaacactttgggaggccaaggtgggagtgtggcttgaggccaggaggttgaggttgcagtgagctatgatggcaccacctcactccagcgtgggtggcagagtgagatcctttagaaaaaaaaaaaaaaaaaacttgttttctctgcagccgggctccgtgaccaaacacaaacacaaacttcccctccagagggtccaggaggggctgggctgcaggaggtgcttagggcctcttagggaatggtaagtgaccacccaacgcaggcactcagccccaggggcatatgcagagagagggtccaggaggagctgggctgcaggaggtgcttagggcctcttagggaatggtaagtgaccacccaacgcaggcactcagccccaggggcatatgcagagagagggtccaggaggagctgggctgcaggaggtgattagggcctcttagggaatggtaagtgaccatccaacgcaggcactcagccccaggggcatatgcagagagaggctgggaggacactttcagtgactggggttacaaaccccaaccataagacattgctggctctgtgagccgccacctccagaaatctcccacttagttcttagcacttatccactcttcccttttcctactctcaattcctggaggatgccctcctttctcaggctcagaccaacctaccagctccactctagacctgaacacatgactcctccctctgtctccacctggaaatctcatcagtgcctcacatttacactcctgaaaatcaggtcctgcctacccaccctcttgctccacctgattcctgccctgtttcagccagagaccttgcagtctcctttaactctcaaacccacccatgtcgtgtgagcatactgactgtgttctatgcaagaaagagcagtttcttggtggtcctgcggttttattagtccagaggcaaagcgttggcagagctggtttcttctgaaccctgggagggagattctgttttcatgccttttccagattctagaacccatattccttgctctgtgtccccttcttccatcttcaaaggccatcctctcatctctgtgtccatcatcacatcacccttcccctgactctggttctcctgcttccacttataagcacccttgtgattacatcatacccacccagacaatgcagggccatattctcccctctcgagattaatttaatcacatctacaaagttcctcgtgccatatgaggtcactaaaccacatgttctgggggtttgaatgtaaacatttgggggatgcattattcagccacccacaagcactgctccccactggccacacactatgcacagccgagatcatgcaagtgaggcacgttcatcaacagcagcttcagcaggaaactatatgctccactttcctgccatttgtatctggatttttttttcgctatcattgtagaaagagtggtattgtaaaattaaagatggattattttctttctagaacactttggcaatctatccaacattatttatccccttctgagtgtcaagtgtgaggtcattctttcattgagagctcaatgcctacaattatgataatgcatattgggtactttcacacatcagaaagttcttctttcttaaaatctgttcttgaattattcattcttctctagctttttgttgatctattttataattttagaaaaatcagaaagtaacttgaagtatctgtcatctctacaggtttacctccctctttgtggccttcagaatgtcatgacacgcttttcccttgctcatcacatggtttctatgtatgagacctcatcacaggagctgtggtcccccgggagcaggcatctgtggatggtgccttgctcctggctgctgggacctgtgtgctgccagtggcactccacgacagtgatttcccagctcagttttgcagctccagatggtgggtgagacactaggaccactttgtgaacagcgagggcttggggtttgcttttctaccatgtccagggctgctgttcatgagggaatgtttctaacctgacatcatggctgaagccaacttagaacctctctagccgtatggggagtaggtgagtgatacagatgttaattagctcagtggagccactcccctatgtagacatgttacaaaacattatgctgtacagaataaatataggtcatttttatgtgtcaatcaaaagagaaactaattatttaaaaaaaaaaaaaaaacctctctactcaagccgaaacctcagctccagtcccacaagtcacacaaggctgctcccgtcctgtgtatgttaaacctacctcagaaatgcaagggggcattcaggtttcattctcaattcaaatgccctttttaattttgtctattcctagcacctggcaacttccagctctttttttcggggctcattcattatttaaagcacgtataatttttcacccacattctaacacatgtagtactgtagagaatccttccctaggaggatctacagcattagaaaagaattaagaactccaatatttacaagaaggaaaaagcaaaaagagatcaaaaaatgggcaacttctagaaatagaaaaccctcatgagtatgatgataaatcgctggcacacatgtgaatagttacttgatgcttatagtgatgtctgggaaaataacatgaaatacttataatctgtttctcacacatgtaattcaaaagaatagagagaagatgatttgaaatattcttaagtttgtaggaaaaaagctacttccatatgcataattgcatgtattttgatactgccattattaagaactatctaagagggtccattaaaaataaaatttcttggctgggcacagtggctcatgcctgtatcccagcactttggaaggccgaggcaggtggctcacctgaggtcagaagttcaaaaccagcctggccaacatggtgaaacgctgtatctaccaaaaatacaaaaattagctgggcatggtggcatgcacctgtagtctgagctacttggggggctgaggcaggataatcgtttgaacccaagaggtgtaggttgcagtgagctaagatcataccaccgcactccagcctgacagacaaagcaagactctgtctcaaaaatattaaaataaaatttctcattcctattacagagtaatttaattcattaatgccctgccctgttacaaaactcatttgtaaaatactaattgtaattgtgaaaaaatggcaattgatactaattttaaattctaaaaacagggcacccatattaaagattattctgcagtaagagaattagctataacattttgtaataaggtggagaaaacattctccaacttacaatggttggtgagaagaaagtttccagcacggtagatggaccctaagagcccttgttgaaataataagacaaaaagatatacagagagatgagccagatgaagggagacagagagagagagagagagagagagagaggcacagaaatgagagatacaaagtgaaagagggcaacctgtggggtcatcagatatttgttttctgttttgtttattctaacataaaggcagtggtgggtcatcgatgtatttagagtttgcacaatcactgtggaacacagacagacacaggggaagaggagaaacacagggcggtggcttgcccttggactgttcttagttcctcaaaacgtaacagctttgcccaacctaagggaactttcagcagctgctcttctgccataggcctctttcctgccttgttttcatgtggctgactgtttctgttcctgcaggtcttagctcatcagacaggcatttattacctctgtgtcaacagtgggagcttccattactctctagcatgacactccccttcctcttttaggaaatttaacatggaagtgagtttgccatcggccttctccccacagtgttaacagtggtgaggaagccagcctgttccaccttgcccctcccatgattccaacactgagttcagacttgtcacatggaacttatctttgcatgtttgtggcacagacagatggacccaaccatggattagtggatggatggatggatggatggatggatggatggatggatggatggatagatggatggatggatggctgagtaggtgtgtggatggaagagtgaaaagatagatggatgcatgtatgggtggatgggtaggttgatggatgcatggatgggtggatggatgggtgagtggatgaatgggtgggtaggtgggtggctacatgcatggatgagtacttggatagataagtgagtggatggatggatggatggatgaatgggtatgtgaagggatggatgtattagagtgggtagttaggcaggcatgagctgatagtcaagtgattgttaaactgcctctctaaaataataattggtctcggctggacgcggtggctcatgtctgtaatcccaacactttgggaggctgaggtgggcggatcacaaggtcaagagattgagaccatcctgaccaacatggtgaaaccctgtctttactaaaaatacaaaaattagctgggcgtggtggcgtgcatctatagttccagctactcgggaggctgaggcaggagaattgcttgaacctgggaggaagaggctgcagtgagctgagattgtgccactgcactccagcctggtgacagagcaaagctctgtctcaaataataataataataataaataataattgatctcagccagcgccaagaaaaggcagtctcccaatagatagaaaacacccgaaactggtcatcagcagcttcctgataagatctcaggcattgggtgagtgggctcaagcatatgcactaagaggcaaagtggcagagtttaactggcacataatcttcctctaggaacactctaatagtaagagaaggacacctcaaatgagcatgtgcacatttcattaaacccactgtgtatgcagcccctcccaagtgctggcaggccactgtacatgtgggcagcccactccaagggaagaatcaagggagaagaaatacaaatcccagaaccatgtcaatgtataaaaccccaagtcaagggccggacagagcacttagatctctcaagtcgcccacttagccctcttccaagtgtactttacttcctttagttcccactttaaaactttaataaacatttactcctgctctaaaacttgcttgggtctctcactcttctgtatgccccttggccaaattctttcctccaaggaggcgagaatcaagttgctgcagacctgtatggattcgctcctgctaacagatagctggatgggtggacagatgcatgaattagtggatggacgtttggatgtgtgggtgggtgggtggattgtgggatggctggatgaatgcatggctggatgggtggacagatgcatgaattagtggatggatgtttggatgtgtgagtgggtgggtggattgtgggatggctggatgaatgcatggctggatgggtggacagatgcatgaattcgtggatggacgtttggatgtgtgggtgggtgggtggattgtgggatggctggatgaatgcatggctggatgggtggacagatgcatgaattcgtggatggacgtttggatgtgtgggtgggtgggtggattgtgggatggctggatgaatgcatggctggatgggtggacagatgcatgaattcgtggatggacgtttggatgtgtgggtgggtgggtggattgtgggatggctggatgaatgcatggctgggtgggtggatggatgcatggataagtggtggacggatggacgggtgagtggatgggtggatgtgtgtgtggatgggtggataggaaagccctctaattgattacagggctcagtgtgtgcttcaacatcatgatggcatcatcacattggtccctgtatgaagcagtgggggaggagagtgtaccaggggagcaggaatgacttttctccagaatcgacctctcccaccctgcagcctgggctgtgcaggccacattggagaaggtgcggtcgactactcctaaatgttgttgtgtccaatggcttgttgacgttgatgtaggaatgagcctacatctccaccatagatggaactgtttgggtccccaaagcagaaagcctcttctgttgcaggtgctgaagtttccatcttcttctgcttatacggaagctcacgcatcccttggatggcaggcgtcaggttcctgtgcgcactgagttccccccttacatgctttggacagaagtgtgagacacacaagattgctgcaggaagtccacctgtggggatgctgcgacttctccagcaagaacacgagtctgctcattgaccatcaccacacataacaaattaagtgtcccttttttgataacacgtcattgtttcacagagtattcttttaaagtgtataagttgactgcagttattattttttacttctgttactaatttactcataattaggcacaatttacacttaagaaatttcttaatagttttttcctccttaaggtgaactacagtcagataacatacttatcaattgtctctagctcttgtcagaaaaacatatagatgtgtgtgtgcgtgtgtcttggcctttccaatgatgaattaagatgtgcattgagaaggcattcactttatttgacgttaaggaagtaccaagaagacgctctccacagaccctgggaaagccagcagctgcaccccgaggctgtgccaggcagggaacaaggaggcagcaccacctgctgggcagggaaaatgtcctcccagtccctgccgcttctctgcagaggcacaaagagctgccccttctcctgggccttctcctgggctgatgagattgctccccgatatgccaaatcagggttgtgcatctgaggctctgtctagactctcagctccttcctactcctgcaaagtgaagaaaacaatgccaaggggtcctggaggcgtctctacccctggagagttttgactctcttcaatagtctccactaccctgccctcactccatgtcctccgtttctccctaaagcggtgcccagtctgattgcactgtggcagggataacgaggggccaggacatcaggggagagaagtttctacctgagtcacagcagcggctgccctgcagactcctgaagacacaagacacatttccatcccagagacccagcgaaatgcaacctcaggctagagacagccagttattttttcttgttctgtcctggagaggccactgagaaagtcgagccccttgttgaggaaaacatgagatctctgtgtgtcgtcctctgcctgatggctgtacctccatgtgagtgtctcagagatttcagaacgggggctgtgggctgtggtgtccgcttgtgactcatctctttgcttcttgtccctgagtgtcctgcatcagatgcagctactggagtcatgcccagggctggtgaggtcctcacagacctctgggcctggacccagcagccctctgggaaggcgctggggcacctcagctccaggggcagcacacacttcagcccagcctttctgggccaactctccatctgtagagacacatccaaggcccagttatccctgcagctgagctccgtgatggccaagggcagggccgcacattcccgtgggagacagaatggggacctcagcgtgagcccagacacaaacctccctgcagggaagcacaagaccaccaggcggcgctccagaccacacagcggccccagaagcaggttttagggggcggggcagacgtgtccgcgttgagtcaggtcattggttttactttccctgagcaaacggcctctgccaaggactcactgcacctctcaccttcacagttgttttttttttttttttaatcaccctgtagagttttgctagctaatttagatattgaggagtgcttcatacttccttgggcctctgcttgcagaaacatagcaattgtaaggaggcacgtgggaaagccccggctcggtgacccgggggatgctgctgtggccctggcaagagggcgtcgggccgcagtaacaaaggtgcagacggctctcagcctgcgcccgcggagtacaacacataagggctgtaacctaacgaaaaaagaatcgcagtgcaactgtcctgcatttgagtttgtgatcagttttgccctttgtctttaacaggttctaacataaaattttgaatgttggttcaagccctgtgggtaaaatgcacttacccacattccttaaacaaatagaacactgaggtggaaatgttttgaaaaagtagttttcagacatttggaaacaagcatcacaggatcataacccctgagaaaagaaaaacaaatgaacgaatcctgctattgcctgaaagcagctgccaggacacacggaaaggcttagtgagctgagcggacagagagcagagttcaaggcagcagcagcccgaggggaggagcaccggggagcaggctgctgtgcagccaggatgggccggggtggggcggggggagaacagctggagacttgccgcagggagggggatccctcaggtttggggctgagaactgacttatgcctgacttatgcctgcatgaaaagaaactactcgatatcagggggaaatcaccagaaacctgtggacccaaaactacacagagcctacacaaggaaagcattgtttgtgttctcccagccagggtggaaagaccttgagatatgtaaagcttcaagcaatcttccgaagtaatctcgtgagtagtggtgccacattaattcaggactaaaggctgctctgaactgaacctaagaaatgcttcaagtgtagcctggagcccgggtgcagtggctcacacctgtaatcccagcactgtgggaggccgaggcaggcggatcacttgaggtcaggactttgagaccagcctggccaacatggcaaaacctgtctctactaaaaacacaaaaattagctgggcgtggtggcagatgcctgtaatcacctcccacctggacccttccttgatacatcagaattacaactagagatgagattggggtggggacacagagccaaaccgtatcacataggaacctaaaaggataataaagtaggaaaacttcccacatcagtaaccctttatccgatagtaatcccaatctgcaaagtaaaactgtgtgattttactaagataacggaatcttctctacagaaggactttccagtgcaaaagctccccaccctcaccatgaaatgcacgtgaccatttccaatttgtgtaaagtcctcagttagtactgagacttcggaaggttagaaatccctttgctcatgctgcatggtccggatgagatgtaagaatcattagctaatagacatgcaacagcttttgtgtgaaagatgttatgagacatttaaggtatttgcttgtgattactaagcattcattgtatcattggagcacatgtgcttttataccctggagaaattccagtaattgaattgctgggttgaatgggattttgatttggattaaatttaaactatagattttatttagggaaaactggcatcttaattatgttattggggggcccttgctcccagagctcccaagatggtggcaggccgcttccaaaatgaccgcaggccacttccaagatggtggcaagcctcatgttctctgacctggggttcttggcctcacggattccaaggaatggaagcttgggccatgcagtgagtgttatagctctattagaagccgtgggtcacggaagagaaccgtggaacccagtgactagtgttcagctcgattaggacgaacccaggcacttagccgtgcaggaacaatggcgagcatttggcccgatcgagagtggcaatgggcgcctcgctggatcaggagcacagcggataccctgatggatccggagggatggaagccagcggtgggtctcccacgggggcaaacagcagtggtggacggtgagcgaaagcgaagctcgagccgtaacaaacatggaccagaagagtgcagttgcaagatttagtagagtgaagacagagctcccatacaaagggaggggacccaaagagggtagctgttaccggctcgaatgcctgggtttatatcccgatcattgtccctcccgctgtgctctcaggtgatagatgattggctatttctttacctcctgcttttgcctaattagcattttagtgagctctctttactatctgattggtcgggtgtgagctgagttgcaagccccgtgtttaaaggtggaagtggtcaccttcccagctgggcttagggattcttagtcggcctaggaaatccagctagtcctgtctctcaattacactgagttttccaatccatgcatccaatatgtggtgtatctcttcatatgttcatagcctctgagcaatgttttacaattttctgtgtaaagaactccacatcgttttatgtttcttctaaggtatatcctgattgctttttatgtcttcacaagttttttcctttcaaaattaattttccaattgtttggtgctaatatgctcaaatgtccttgattttcttagtttgaacagtccgtttttgttttggggatttatttttttttcagattctttaagattttctatgtctataaccatataatctctgaacagagacagttttgctttttcctttcaacttgaggtaggttttctgggtagttcaggacgcgcaggcactgggtgggtggtgttagcagctgcacgatgccttggagaggacactctcgggggactgtggccgctgctcagctgtgaccgttcttatagcaccagcagctgcggccaccattcttatccaatttccaaagccacaccacaggccctctcaagaacgaggcgtggaggctatgccctctcctggacacatcatcattcccaagccccacgatgtgggccccatgggacgcacacctttgtctgtccagacctcagccccacctcctcatcctgcaccagaactcttcagagcccagtgcatgaaatgggctaccaaggaaatgagggtaggttcctgagaggaaactggccctgcatttgggagctaggagtctgctaattcgcctggcagccctgtgcagccctccgtggctacagtccaccccgtgcccatcagtgcctccttcctgtgcaagcctggacctcgccctgggctcaggatgggctgtagaccgagaatgcaggcgggaaagtctttgtctatcggggccatagtcaggttctacagtgagtcagggaaagacctgtggaggtgtggatgaggacaatgggtccaccatcaacaggaggacacgggttcgaccccttgcagaggcacagtcccacatcactgggaggcagccacactcactgcctcgccctctcctcacacagtgcagtttccacgttcacagccccagccagtcaccaggaatgccctgggggcggcctttccccagtgcactccgagccctcccttggctgtgcggtgagctccatgcccaggagatatccacccatagtcctccggaaagcagctgacctgccatgccctggaaccacaaatccccacagatcagccagcctgcagtgggccttggatgtggtgaggagtggtggcacccccgttcccaccccacagatgcaacgcctgtgggtgacgcatgtgagtactgaggagtagagggtagaactgtaggccccgagaaccacagaaactcgggtgttacactctggggccatgtaaggagaaagtgtcactggacagaaacaggcccctcctagacactgtgtgcgccatagtcacctgtcattagctctcactcttgcagattcatgattgaggtggttaaaaaaaaaaaagctcctactcacccatccaaccccatcctggggtgtttccaccacccttggggtttgggatgagctgcccttgcccactgtgctctgtggacctccctttagaagctcacagctccctgcactcggctccatcctgccccaccacacagaagcaaaacccctctcctttccactgcaggcttttcctggaccagaatgctgacctgctgcccttcactcccgaagtggtgggactgcctggggtggtgtgggtgttgagccttcttactctagggacctggcacctggccccaggggcacagggatggtgcatctgcctagggatgcctcctcatgccagggggtgggggttagtaccatcggccctcaggatttgttgcatgaatgagtgaatgggtgaataaatgaaggggatctgatctatgaataagggtatatagactttggttgatgtaggacgccaaatgctggaatttcagagtcatcacacccaggggccctgcctctgagctcctctttgcatccaatctgctgaagaacatggctctagggaaacccagttgtagacctgagggccccggctcttcaatgagccatctccgtcccggggccttatatcagcaagtgacgcacacaggcaaatgccagggtgtggtttcctgtttaaatgtagcctcccccgctgcagaactgcagagcctgctgaattctggctgaccagggcagtcaccagagctccagacaatgtctgtctccttcctcatcttcctgcccgtgctgggcctcccatggggtcagtgtcagggagatgccgtattcacagcagcattcacagactgaggggtgtttcactttgctgtttccttttgtctccaggtgtcctgtcacaggtacagctgcagcagtcaggtccaggactggtgaagccctcgcagaccctctcactcacctgtgccatctccggggacagtgtctctagcaacagtgctgcttggaactggatcaggcagtccccatcgagaggccttgagtggctgggaaggacatactacaggtccaagtggtataatgattatgcagtatctgtgaaaagtcgaataaccatcaacccagacacatccaagaaccagttctccctgcagctgaactctgtgactcccgaggacacggctgtgtattactgtgcaagagacacagtgaggggaagtcagtgtgagcccagacacaaacctccctgcagggatgctcaggaccccagaaggcacccagcactaccagcgcagggcccagaccaggagcaggtgtggagttaagcaaaaatggaacttcttgctgtgtcttaaactgttgttgttttttttttttttttggctcagcaacagagatcatagaaaaccctttttcatatttttgaaatctgttcttagtctaatggagattctctaatatgtgacaatgtttttctcttgctgtttttggaattctttgtctttgacttttgacaacttgacttttgacagtgtgcctcaaagaagttctattttgggttctgtgaacctcctggatctgggaagttttcagctatgatttcattaaacgtgttttctacaccatttccctactcttttggaatacccataatgcaaatatttgttcacttaattgtgtcccataaatgctggggattttcttcattcctttttactctttttttctttttattcatctgcctgaattatttcaaaagatctgtcttcaacttcagaaactcttttgcttggcctagtctaatcttgaaggtctcaattgtacttttaatttcattcattgaattcttcaactctggaatttctgttggttcttttttatgatacttatctctttgttgaattcctcattcaaatgataaattgttttcctgatttcactgaattttctatctgtacactattgtatctccctgagtttcttagagattatccttttgaattatttttctgacattctgtatatttccttatgattggggtctgctactggagaatgactgttgtctttttcaggtgtcgtgtttcctggccttttcatgttttatgtgttcctacgttgatttctacacatctggcggaccagtcatcccttgcaatttaatggagtaggttttgcaggaaaagacttcctagtacagacgggtctcagggtgtcagtgtggcggggcgtgctggctttagttctaggttgacgcagtagcgtagtctccatgtcgtttcttcagctgccgtccacattggtgacgtttgcgagtgtctcagtggcctgggctgagaggtttgtggcagtggaagtgcaacgttgctagaggtggactcaccaggctgtttctgaggtcgaggcacatgcatgcacatggtggattgaccaacttggtgccaggctcactagggttggggacatggggctgtttctcaggcccaggatgcaaacacaagtctctttggctggcctgggggtgtggcttctgagggcaatccacagggctgtttctcaggttcaggacacaagtgcatggccgctcaactggcctgggcatgtgtctcccagggccaccccatgggctctttctcagacccaggacatggccacatggcttcctcagctggcctgggtgtgtgtctgctggggggctgcaggggcacagggttatttctcaggccggggtcatgggcgcacagctgcttgctggcttataggagtgcctgccaggggtggcccatgatgctgtttctcaggcctaatttcaggtgcagagcctttgggcaggtcaacggcatacctgtggaaattggagtggatgccacagggctatttctcaggtgcctgagtgtgggcacatatccactctgccagcctggagttagtatcaggtgctcggtggctcaggggcctctcctgctcaggggagggccctcagcagcttggccaaatcaatggtggattcaccctgggcaggcctggcaggctcttcctccagctggatgtgcagcagcaggggttgggttttttgctgtgcagggccagagtcacggccaatcctcagcctaggctctgcacagccagggttgtggcattcagccacccagatatgggcatcctgaagatggagccccaatgctagaaaggggcagtggctaccagcctcagggcaggatgcactccagaggcggctccggtctcaaggtggcgctgggctgcagcagctaggctcacagtggatgaatgggggcagggagtacacaccttgtgctcctaatctgggatcattcctggcagctcccaaacttggctgagggcttgcaaaacctgtggaattctcctgttgcaagggctgtagatgtttgcagtggcagtgggtgctggcgggaaatctgcttaccttttccctacatgggaagtccctcctgtgtccagaccaatccgatctgggtggggaagacaaggctgcaaaggccaggtgcctccatgctgccctccgatcaccacgggtgcgtttccacacctccactgcactccgtcagtctcccttcaacactccagtcaaaccttagctgtttcttctttgccttattccttcctcatggggagggtgtgggtgaacaccaggcttctctaagttcttcatccatcttgctgatgtcattctccatccaggcatgggtttttaagaagtagtgaatactgaaatttcagcagaggacacctctataaaaattctgcaactggaaaacctccttaaattggctgattgtcattacaattggaggaaaactgccaataatttcaaatttagaaggctgagactctataaacaaagactaacaatatgttttctgatatttttccccaaaataatacttttccaagacgaaaatttttccagggtatataagcacatgtgctccaatgatacaacaaatacttactaatcataagcaaataccttaaatgtcttataacatctttcacacaaaagctgttgcatgtctattagctaaaaattcttatgtctcgtccagatcatgcagcatgagcaaagggatttttgaccttcaaaagtctcagtactaactgaggactttacacaaattggaaatggtcacctgcatttcatggtggtggtggggagcttttgcactggaaaatccttctgtagagaagattccattatcttggtaaaattacatagttttattttgcagattgggattaccaactgataaagggttactgatgtggaagttttcctactttattctcctattaggttcctatgtgatatggtttggctctgtgtccccaccccaatctcatctccaattgtaattcccatgtgtccagggagggtccaggtgggagtgattagatcaagggtggtttttcccaggctgttttcatgatagggtgttatcatgagatatgatggtttaaaagtggcaggttcccctgctctctctctcgcctgctgccacataagacgtgccttgctttcccttcaccttctgccatgattgtaagtttcctgaggcctccccagccatgcggaactatgagtcaattaaacctcctctctttataaattacccagtctcaggtagtatctttatagcggtgtgaaaatggactaatacactatggctttgaattaataatttaaaatttgtcagcttggcaataaaacatcctgttgacatttattttttaggtaatattttaaattggcagtttcattcatgtttttacaaattcttattttcagggtgtttaaggcctttgctttgaacttggtggttccttacactccatgctgttagtgaagagggaccaggttgggaggcattggtttgggtggtggtcaggaagggcagagtgatttgagtagggtctgagtggataatagctcatcagtttggaatttataaatgaccagggatgatttaaggagattcctgccagacacctatgccatggccatgccctatctggatctccagccgtgagatgagaacccagccatgcgggggagtctgttcgttctgctcaatgttgtaagtggcacatgctattggataatgtagaattgaatggatatcattttattattataatttacaaacttcctacaataaacttatcacctttatacatagaaacaaatataagtacattttccctcccctatgtcattttgagccctctctccaaaccatcctcccactctgcgactcactgtcctgcatttggctatgctctggcaagtcctgcttagacaagcactcaccagaccacctactcagcctcccttcagcgcccacctggcccacctgctcaaatacatgttgagtggtcacacacatggactgaacaccatctattccatgcactgccccagtgaccgcactgagcagcaagagagaaatgatcgcattagctatcaattatgccaattcaaatgctggagtctttctcagatacttttcaatgttcaagaattgttgattgtgaattctatacccaatgaaactatccttcagaaatgagcagaaaatggataccttctcaaataaacaaaaactaaaagaattcttgctacaagatgtactcttaaagactggctaaaggaagttcttcaaacagcaaggaaattgaattgatcttatgtcctgcacacttgctaaatttcctctcaattttagcagcactgtttagattccataggattttccatacaaacagtcatgtggtctatatatagagacagattttcctcttttccagtggggataaatttatgtctttttctttctgtgttacagcaggtaggacctccagtacaatgttaaacagaagtggtgaaaacagacattcttgcctgtttcctaacgttggagtttggtcttttactatggtgtcagatgttagctgtagggtttttataaatgcccttcatcacattgaggaagtttgctcctatgcctaattttctgagagtcttttaatgtgacactcatgctagaatttattaaatgctttctgtctactaagatgattatgcagttcttatattaacatgaataattacatttatttattctttaatatcaaggcaattttgcattcctgagacaaaccccatttagtcatcatgtgttgttattgttacatattgttggattcaatttcctcaaaatttgttaagaattgttacatctatgtttacaaggaagattagtctgtagggtattttttcttataataactttgcctagttttgcaatcagggtaatgctggactcacagaatgagttgggaagctatttcctcctcttcatttttctgaaagaatttgtataaaattggaattatatcttccttaaaggtttgcaagatttcataatgaagtcattggcctagagttttctttgtgggaaagtctttgtttgtttgttttgtggtttgggtttttttttaagagacacagtctcactctgttgcccaggctggaatgcagtggtgtaatcatagctcacagcagcctcaacctcctgggctcaagcaatcctcctacctcagccttcagagtagctgggactacgggcatgtaccaccacacccagctgtttgtttgtttgtttatcgctttgtcttgtttttgaggtcttattatgttgcccaggctggtcttgaactcctggcctcaagtaatcctcatgcctcagcctcccacagtgctggaattacaggcatgagccactgcacacagactgtgggaaagtttttaactaaaaattcaattttctcttccttttccagtgagctttccagtgtctttcaattaatgtatctattttatctaagttgttgaatttattgtcaaaatttttttaaacaatattcctctcttagaggttgaacatctgtagaatctgtagtgatggcacctcttaaatccctgatcttgctcatctgtgtcgtctctctttctctaatcagtatgcctaaagtttaatttcattgattttcttaaaaaactggttttggttttattgatttttttccctagttttttgtgttacatttcattgacttctgctctgatatttactatttcctttctactgcctacagtaagtttaatttgctattttcttagtttcctaaagtggaagctaagtttattgacttgaggcctttcctctgtctggatgcggatatttgctgctaaacatttccctccaacaccatgctgtgagttttagttacagcgggcttggagttggcctgagaaattctacttaaacagctgcacctatcatgtaagtgataaatgatgtacctgcctggccctcacccctggtcaaagaatgggatgtactaatgagcaatgttgctgcgtagctgtggatttcaaggtattttctgtgtggttttatcatcagcattgtttgttgatgactgcaagactgatgatttgcacctggcctcggtgagatccccgaaagaccctgcagatgggctggttacttagcagaaaatatgacaacgtggccagcaggaaacaggaaggtacaatcggctgcaggtgagctgttggaagtaagttccaattttcctattttgtatttgcattttaatagtgagactgcgcttatgttatttgtgtgaaacagctttattcatagcactgtaatttaaagagaaaacccattcatgggaacaacaaacgacctagacaccaaggtagctcatgccatccaaggctatactgtgcagtgattgggaaaatgggcactggtcccagaagtctgatcgacactctgccactggctagtcccgtgctggggggcgaggatccacactctgccactggttagtcccatgctggggacaagtatccacactctgccactggctagtcccgtgctggggggcgaggatccacactctgccactggttagtcccatgctggggacaagtatccacactctgccactggctagtcccgtgctggggggcaaggatccacactctgccactgattagtgttgtgaagatttaaataaagaacccacaccatattctttgacttgtgctttccgtatactgagagatagtaagagtacattattattatttataaagtaaactagaaagcacatgggaagacaagaagaaaacctgaataaacatgaattaccccattttcctcaggagaaaactttcacactctgaaggtacacaaattagcctacaaatttaatgtaaagcaaatagactgttgtaggtaccaattctcaatgtcacagtgttacatggaaagtaaaatacacaagaacagcccaaaagatggaaacaatggacgtggtcaaatgacatcagtacaacatccatatggtcctaagtagccatctttaaaatgggttagaaatgccttcaatcattcacacagacacatgcattgaacaaactctaagaagtgttcttacacgggaaaagcaagttacagatgcatgggcatgatatggatgtagatgtgtgtatgtgcatcccactcatacacaaaatacccagcatcgcccacatgcctgctgtgtgcgtaagtgtgagcgagtgcacagacaacagcgtgcagaaattcaaaccaagctgtgggtacttgttaccactgggaagggagtcggtcacagagggaaagagaaacaggacatcagcctttgacttcagaactgttcctgccttttcacatcctgtgctgttttcagcatcatcggagcccttaacacacatcacgggagtaagagtgtgttagagggagcattcggtgggacagatattgccatggcttgtggatagagttcacagtccttaataatccccgagatggcagccaagagctacgttctcaatcacgcagcttcaccccagaaactgacagaaacccaacaaccaaaaggtgtccattctgacagcctcagcctgtgctggctcagatgagcaaaaatgtacagatattaataatgatgttgatttgaagagcacagaggggggtatgcatgataagggtccaaatttttaccttaaaaaagaatacatttacttctcaatcacctacataacgatcattttttaaaaaactgatcaaatttggtgttacaagggcacgttgcaaattcttctggctacttttctctgactattctaattacgttaccgtgttttctcctgtatgtgcccgttcatgtgaatgtcatttctggctacttttctctgactattctaattacgttaccgtgttttctcctgtatgtgcccgttcatgtgaatgtcatttctggctacttttctctgactattctaattacattaccgtgttttcctgtatgtgcccgttcatgtgaatgtcatttctggctacttttctctgactattctaattacgttaccatggtttctcctatatgtgcccgttcatgtgaatgtcatttctggctacttttctctgactattctaattacgttaccgtgttttctcctgtatgtgcccgttcatgtgaatgtcatttctggctacttttctctgactattctaattacattaccgtgttttcctgtatgtgcccgttcatgtgaatgtcatccaggcagatttcccaaatccggcttcctgtaaccaagggctgaaagagggaacggtttcctgggaatcctttttgcagtttattttacccggaggcagaagcccacggttccgtgaagagtctattgctctcccctctctccttttgtgtctctatttttaattgacaaaaaagcaaatgtgaagattcctggggtacaatgcaaagtgacaatgcctgtctatattgtgggatgattaaaacaaggtaagtggcatatccatcacctcacacacttatcattttgtggtgagaacatttaaaatctcatcttttagcaattttgaaatagtcattattgttaactatagtcaccatgctgtgcaacagatcaaaagaactgactcctcccatcagcagaaacttcatgccctttgaccagcatctctcctttccccgtccacgactaacccccagcccaagagaacagccaacacccacctcgctgctgccacacgacatgtcgggctttgatgggatggaggtgagggtggggaagacaattccaaagctggagcactggcctcacagctcagacactcttctacttatcctgagagaatgatgtgctgagaccaactaaacctcccctgctcttcccacatggcagaaaagaggcaacccagggaagccattgccaggacatcatggtcacccaacccttgtgcagaaaggaagcacctgcccaggatgccatagcacccaaccctcatccccaaggaaacacagcccagggcaccatggacacccaaccgtcatccccaggggaggacacagcccagggcaccatggacacccaaccctcatccccaggggaggacacagcccagggtatcttggacacccagccctcattcctaggggagtacacagcccagggcatcttggacatccaaccctcatccccagggaaggacacagcccagggcatcttggacacccaaccctcattcccataagagcacacagcccagggcatcgtggaggcccgaccctcatccctaggggaggacacagcccagggcaccatggacacccaaccctcatccccaggggaagacacaacccaggccaccattaacacccaatcatgtgcagggagggtgtccttggagcctgggactcttgccagtgaagcggtggacaagaaactgaggatgcgatcagcacacagaaatctcaggcagcctaggatacatgaggcctctcacccctgggaacactgagcagccaccaggagcccacaccttgaggtacagcaggagccatgcgctcttgctcttgctcactcacactcctgcacacagccactgacacacgccctcgtgcacgttgcagattaactccactggccttgcacttgcaacgctggaggctgagaggtatccccaggttcttttctcgtgagaggggcaggctgactttcactctcctccatgtgctagaggcagctccaccaacactggctgccctgagtggatgcacctggctctggaattcctgtcatttgctttggatccaggagcccctgcctcatgtagctacttaacagaaaggaggaatccacccaggacatgcccagacgggagcctcacaggatggacagtggtgtctggggtcacgggcagccctgacccagcagcgccagcaccagcacacccagtggggaaggcggggaggcccaaacgccacccacagtttgttactccactgggtgggacccggcacccctgccttcctgacaccctggagtccctgcctcctcctagagcccccaagcccatctgcctcagagcatccagagacagacctggggagccatttcctcaggccctggacaaggaaacagggaattccaggttatgggtgcctggggcaggtctcaggcaggtgctgggaaccagagagaggggtcaccgcgaggcctcaggcctggcaccagcactttgagcctcagtttaccagcccacgaggtgctgagtctggactggatgaccttcccacccccagtgacctctgccctttcccgagcatgtcagctctgctccagcatcctggtgtgagcgcaatgccactttttttctcaacaaatacgaaaggaggaaggtgcccccagggccctgtgccctgaggatgcctgtgtggaggggtccatttcatcactggtgtcactcacaggaagggacgaagccacctgccttgacggagcttactccacctccgccgaaggccggggaggtccctcacagagaacctgaggcccagcaggctgcagaggtgctggcatggaatgactgctcagacgcccggggccggcagagaggacggatgtgggggaggtgcacactgaggagcctctccttggaggtggagacacgtgcaccacatggaccaggacacagtccacgaagcctcgcatccccctgagctgcagctcaagggcctctctctgagcccagagtcccacccctgggaggcagctgccccagctctgagggaggagggcatccaccaggccctccatctcctgggggcaccagcccagcccagaggctctgcaggactctgcacctccaattcatggccaggactttctggatgtatcttaaggactgaggactccacatcagggaccacacaagaccggggtcccggacacgggggttgggggtgagcatgtcaccgggatgggctgtggcgtcactctggtacttcatccggacagccagggaccaaagccacgccctcagccccaccccacccctgcctcacatggcaacgcagggtctgcagatgcaggagagtgagaagcatggtagccaggcagactagaggacccgagctggggttgagcacctccctgtctacccagggcatggcctgtgagactgcaggtggcctagtgtgtgctgcaggctcaaggtcctgccccagggagcatgacattcaggcccagaaattgcatcgtgctgcacacagtccaaggggataaccctgtgaagttcaggtcaccagcaggcttggggtcaagaccgagctgcagaggacaggtttctggaaggcacagcatcatgggtggagggacttggagcaaggtccttagccccgggaccagtgaatgtgtgcccttatagggaaagggggtctgtgcagaagcaagttagctgaaaatcatgaagtggagaggctcccctggattaaaggggtgagccctaatgtaatcacaagtgtccttctaggaggttggcagagggagactgacatagacagaagccaggtgaggtgggaagcggaggcagaggccgagagagcagacgctacgccctggccctgaagacggaggaggagccgagagctcagggatggagagactggaggaggcagggaagttctccccgcaagcctggagggagcatggcctccagcacccccagaccttggccctgcaggattcatctggacctgtggtataaatggtgtttaagccactgggctgtgcaaattgtcatagcagccatggcgcattcctagagggagccctggtggggacccagcaggcagcgacggggccctcacaagcctgtgagccactcagagccgcgagagtggctaggcttggtgaggtgcaggccacgcgcacctccactaaggcagccttagggcccacacatcctctctctctctctctctctctctctctatctctctccctccctccttccctccctcccgctctcttggttggacagctctccatcatccccctggacacgaccacctcccaaggccgagctggggcgctttgctcgaggtgagcactgacatcctgggggtgtgaggggcacctgcccagcggccccgtgtgcaggatgggcggtgggccctagctggcactgggcatatggcccggctggtgcctgcaggctgcagcttttctggggtggctgggatcagtgaaggcctccagagtctgggcctgggatccctgcagtgctggctgaggacaggcggggctgggcagtgagggcactgggtcactatcaccacccacggtttattacttcactaggtgggacctggcacccctgccttcctgacaccctggaatccctgcctcctcctacagcccccaagcccatctccctcagagcctccagagacagacctggggaggcatttcttctgcccccagcagaagcccgggaggccgggaaggcacagtgggtctaaaggagaggatcccaggactgcctgaggggtgactccgacgaggcaagcatagagcccactgagaagcggggtgggagccccaccagggatgggctagttcctcatgaaggaccaggacccaggaaggacaagggggcctgctggggcagggtctgctatgccggagtccctgtgagcctggcccagacctgcctctctctttcctcattggtccccacaggtccgtggtggttgccgtatcgggaggccccatggtggcaggggtgggacacctggtatacgtcgccaggtgtgtccaataggctcatgctcacaccttctcctggcacctgggcaaagcctgagcacccaggcactgaagtgagggcaaggcctcggggccccacaggatggccgaggagacagctgcagggcgcctgggacccctgggctcaggaggtagaaggatacagcctgaaaacccacaccacaagctcaccggccagtgcaggcccacagagctcgaggaggcagccctgagcctcccagggagagatgctctgtgcacgccggcacaggccctgggttacaaaccctaggcacagcccaggagaggcccaggccccagtccagcaaggggttgcaggaagcaagaggtccccggccacagcatgagataagcccatcaagccagggccaggtgggcaatgggaggcaggcagggcttgggggtgagtccctgctgcagcgccgtccactgtcgaccggaggagtttcttccctgtgcggagtccacgggcctcctgtgagtgtgtgcatgggcacaagtgtgtgtgtggctctgctgtgtgtctgtacacacgtatgttttgggtttttttgtgtctcagaccacagagtctgcccctcccaccaaagcccaggcagaaggatgaacccacgcccctggggcccaggcctcagcagcctctgcaggatcattgttcccagttgtcacttgcctttgccacagccctatttctccacaattccttaaagtcctcaacatgcatttaaggcacaaaggtgaaactgcccagaaacatctgactccgccgtggaacccaggagcaagctgggttagctaaggagcggggccgttggcagaggctggggatccaggctgaactttggaggaggcatgtgccagcatgggctcctgactatgtcctcctgggacaaacccaaacccactctttgaatatgggagggactttgctggccccggccctgaccgcagcacttggaaactgaggagtggtcgcctcctccgtgtcacagctgcccgttcaccatcatagaagcaactctgtcacctccatgggcccctctgtggctgctgcctgggtccaagctgagcccagctgcccaggcccagaaggaaagcccaggccaggtgcccagcacagaggcagtcacataccccggggagagccacagcaagcagccaatgttgcccaggagaggagtagctgacaaggtagaacgtgagctgccatcggctcgagaggctttgctggtcctcctggggctctggacatgaccaggaggagcgagggaagaagtcgcatggtggtcccatcctgggtggggcctgatggcagctggccacccgtcccagagtggcagccagatgccagcgccattcccacagtcacatcattggtcacagaatgcaggacatagagtgtcttctttccatcacagtgctgtccagacccatagcctagggtagacctggaagattcaatgtccacacccggggctggagcgtagccatgagccacgccccctgcccgtgcatggaaagccagcccaagctctgctccatccctagccaaagtcagtgtcctttccccttctcccaagtgagctctagccacctgcctaccctgccatctgaggatgacagccttcattccattggaacctggctctgccaccagcaggcttgcagtcctgggcagactccgtcacctctctatgcctcagcctttccatctgcacaggaggaagatgatgatggtggtgatgatgatggcgatggtttccttttgcatctgaggcaaggactaattgagatgatacacatcaggcactgggtatggtgctggtccttcctgagcactcaatctatgtgagctgtccttgtgaaatgggtgtcaccacatttccccacgcagaacatcctttgtctgccatacttgaaacatctgccccaatattaacagttccttcatggaagatgtgcacacccacccaccctcatactcccaaaggtgcccgtgctttatcaagccaaagtccagccaggaactttacagcagcatccctttccctctccaagcaccaaggagcaaggcaaagcactacatcttccatctggaggcaatgccaccctcttctcccattttcactgccatccctaagaggcagtgcttccccaaaaggttccatagcagcctgcctacagcaactctgttcacacgagtttcagcatccttgcagtggctcccctgccatgctgtggctcttcattcaccctcttctcctgctccccgtgacaggcatagattctgagtgatctggatacattgctttgtttaataacattacagcttctgtgctgaaaaagatacagcagatagagaaggcaattgttgaacacaaaatagtgacagcagagatgacggcaagttggcatttttcttttctagcaataaaacttaaagctgactcaaggagaaatggaaatcataattggaacagtaatcctcaagaaagcattaagattattaaataattgccctcacagatgacttcaggccaagatggctttatgggtgaagtttagactttcacaaaactaatcagttcccataagaactgctccaggatttggaggaacatgggaaagtctattaaagggatcacaattcacagtccccagagtaaaacatgggctaacttgcattttggcaaagagccaaatgttataaatgacatcctagaaggccaaattctgtccatctcgttgaacaaggacttacaccaggaatttagaactatttatagctcatcccaccactcaggccaatgatgacccatgatcatctcaccagaaatggaaagactcagatgattaatagagtctcaatttctctgagacatctaagagcccagcccaagcccagacccaggagggcacccaggcctggacagagaacactgatatcacaccagccctccagagggaagcagagactccttcaagctctggaaacacaggcccagacagctgcctaaagttgggcaggcttcactgcaaacccaaatcatgaagctaggtaacacctttacagattctttacatttaaaaatcatcaaaacaagagtaaataataaactcaaataatattaatctaatatgtaaaggtcttgtaccattattatgcaaacaacatacataagctaataagaaaaagaacaaatcccttaagaaatcggcaaaaaggatataacacaatttctaaaagaaaacaaatggctagcacacataaggaaaacactttgtgaacagacattcttcagaacattatttataattataaaatagttgaaagcaagatagtgcctgaagaaattatggtgcatacattagtgggactattctgcaaacattcccaattatacttgtcacatatctgtgataacgtgacagccagcattcatggggtgacctcatttggtaaaagggtgcaaagctcaacacgcattgtgagatgactgtggtgtaaaattagtgggattattccgcaaacattcccaattatacttaccgcatatctgtgataacatgacagcattcatggggtgacctcatttggtaaaagggtgcaaagctcaacacgcattgtgagatgactggtgtaaatacaaagaccaaactgtgaaaaggagtccatcaattaatcgatgcttaccttcagttttgggctaatttttaaagtatgctataagcatatgctcctgttataacagaatggagggattatgagagatgatgcaggtgtgtcctgggcctcccctggcccactgggccctagagatgccttcccaggcatcgctgtcagggcttccctcagagggagtcctgtattgacctcaccaccaaggtctggagcaggggatccttagatattggttggggttatctcaccttaggtctgaatttggggttgtcttagactgttttgtgctgttagaatagaatacccaagactgggaaatttatactgaacggaaatttatttctcacagttctagaggctgtgaagtccaagagcacaggtgccagagcaagtccaagagcaagggaaagtccaaagcaagtccaggagcatctggcgaggaccttcttgctgtgtcatcacatggcggaaggcaagaaagagagcaagagggggccgaactcacccttttataacagcaccaatcccacccatgaggtggggaccttatgacctaatcactcttcatactgttacaatggcaatgaaatttcaacatgagttttggaggagagaagcattcaaaccacagcaagggtgctcctacctcctctctcagggcatctgcagaaagagctgcaactgcacgtccttcctccgtccatcctccatcccttcccaatgtccgtgcatatcctgtgacccaggaggtctggcatagggggtgctcctgccttaggtctgaggccctgtctgaagaggggtaggtgaggaggccatctgatggtctgggccaagacagtcacaggacgcatcatttatcatcaaggaggctgagggttgagtctccaggtccagggaactccccacaaagtgggaaccctgcccagctccacacagcctctgctgggggaccctgctctggtgcagagcctggggacaggtcttgagctcagccagagtctgcctccctgtcatttaggaactaaaccaagcggcaggatgctggagcccagcccccatctgaccttacagggccaaggctggggccctgggttcccctcaaggcgcagcaggactggagccccaggcagtgcaggagtggccaaagctggggcttcctccagagcccccaagcatcacggcaccaagaagggtaggaccctggcctgaggaattggcaccaaagccccagaaactaccctggacaccatggagagaggcctggaggggaagcaccaggcactgcctccccttctgatcccacctgaggtggctgccaagcccagagagccgctctgatgtcccccagccctgcagcccagggatacctgtactgtgcccctgggggacccctggccagtctgtgcaaagaagtcaccaccctacactcagagacagtgggggtcctcgtcccacatcctcagagcatggcccggctgctgcagggatggtctcctggtcctcagagcatggcccggctgctgcagggatggtctcctggtcctcagagcatggcccagctgctgcagggatggtctcctggaggccccccagtgctctattgtcagggctccctccaccccccgcaccaagagagagccagaccccagcaaggcttccagtggcttcaggtcacacccctaggctgaccccagccccattaacacctgcctgagaaagctccacgcaccagaactgaccgtctgctccaactcttgacctcccgttctcagggcgtctgctgaaaaggctgcaactgcacatccttcctccgtccgttcccgatgtccgtgtgtctcctgtggccaggaaggtctttctcgggacctgagagccgctccctgaagtgtccccattgggaaggatggggcctgtgtctccaggctctgggaggacagaatcctgacctcaacagtggccggcacggacacaactggccccatcccggggacgctgaccagcgctgggcaacttttcccttccccgacgactgagccccgagcaccctccctgctcccctaccacctccctttacaaggctgtggcctctgcacagatgataatggagcttggctcattcccctagagtcggtagggagttaaggacaaaactcagtttcctccacctgaactcaagtctgcctatgtttacctaatcacacctggtggacagtttggacaaacttgcacactcagagacacagacacttctagaaatcattatctccctgccccggggaccccactccagcagaagtctgctaggcactggcctgggccctcctgctgtcctaggaggctgctgacctcctgcctggctcctgtccccaggtccagagtcagagcagactccagggacgctgcaggctaggaagccgccccctccaggcgagggtctagtgcaggtgcccaggacaagaaagattgtgaatgcaggaatgactgggccacacccctcccgtgcacgccccctcctgccctgcaccccacagcccagccccccgtgctggatgcccccccacagcagaggtgctgttctgtgatcccctgggaaagacgccctcaacctccaccctgtcccacggcccaaggaagacaagacacaggccctctcctcacagtctccccacctggctcctgctgggaccctcaaggtgtgaacagggaggatggttgtctgggtggcccctaggagcccagatcttcactccacagaccccaacccaagcacccccttctgcagggcccagctcatccccctcctcctccctctgctctcctctcgtcgcctctacgggaaatccgggactcagcagtaaccctcaggaagcagggcccaggcgccgtttaataggaggcttcctcacaatgaaacttttagaaagccttgactacaatgatgaccttggtgtggctgtgaacactgtcagctcccacagctgctgcagcaaaaaatgtccatagacagggtgggggcccggggtcgtctgctgtcctgctcagcccacagcacgcatggaggatctgaggtgccacacctgacgcccaggccagaacatgcctccctccagggtgacctgccatgtcctgcattgctggagggacaggggcagcctatgaggatctggggccaggagatgaatcctattaacccagaggaaaactaacaggacccaagcaccctccccgttgaagctgacctgcccagaggggcctgggcccaccccacacaccggggcggaatgtgtacaggccccggtctctgtgggtgttccgctaactggggctcccagtgctcaccccacaactaaagcgagccccagcctccagagcccccgaaggagatgccgcccacaagcccagcccccatccaggaggccccagagctcagggcgccggggcagattctgaacagccccgagtcacggtgggtacaactggaacgaccaccgtgagaaaaactgtgtccaaaactctctcctggcccctgctggaggccgcgccagagaggggagcagccgccccgaacctaggtcctgctcagctcacacgacccccagcagccagagcacagtggagtccccactgaaccccactgaatggtgaggacggggaccagggctccagggggtcatggaaggggctggaccccatcctactgctatggtcccagtgctcctggccagaactgaccctaccaccgacaagagtccctcagggaaacgggggtcactggcacctcccagcatcaaccccaggcagcacaggcataaaccccacatccagagccgactccaggagcagagacaccccagtaccctgggggacaccgaccctgatgactccccactggaatccaccccagagtccaccaggaccaaagaccccgccccggtctctgtccctcactcaggacctgctgcggggcgggccatgagaccagactcgggcttagggaacaccactgtggccccaacctcgaccaggccacaggcccttccttcctgccctgcggcagcacagactttggggtctgtgcagagaggaatcacagaggccccaggctgaggtggtgggggtggaagacccccaggaggtggcccacttcccttcctcccagctggaacccaccatgaccttcttaagataggggtgtcatccgaggcaggtcctccatggagctcccttcaggctcctccctggtcctcactaggcctcagtcccggctgtgggaatgcagccaccacaggcacaccaggcagcccagacccagccagcctgcagtgcccaagcccacattctggagcagagcaggctgtgtctgggagagtctgggctccccaccgcccccggcacaccccacccacccctgtccaggccctatgcaggagggtcagagccccccatggggtatggacttagggtctcactcacgcggctcccctcctgggtgaaggggtctcatgcccagatccccacagcagagctggtcaaaggtggaggcagtggccccagggccaccctgacctggaccctcaggctcctctagccctggctgccctgctgtccctgggaggcctggactccaccagaccacaggtccagggcaccgcccataggtgctgcccacactcagttcacaggaagaagataagctccagacccccaagactgggacctgccttcctgccaccgcttgtagctccagacctccgtgcctcccccgaccacttacacacgggccagggagctgttccacaaagatcaaccccaaaccgggaccgcctggcactcgggccgctgccacttccctctccatttgctcccagcacctctgtgctccctccctcctccctccttcaggggaacagcctgtgcagcccctccctgcaccccacaccctggggaggcccaaccctgcctccagccctttctcccccgctgctcttcctgcccatccagacaaccctggggtcccatccctgcagcctacaccctggtctccacccagacccctgtctctccctccagacacccctcccaggccaaccctgcacatgcaggccctccccttttctgctgccagagcctcagtttctaccctctgtgcctaccccctgcctcctcctgcccacaactcgagctcttcctctcctggggcccctgagccatggcactgaccgtgcactcccacccccacactgcccatgccctcaccttcctcctggacactctgaccctgctcccctcttggacccagccctggtatttccaggacaaaggctcacccaagtcttccccatgcaggcccttgccctcactgcccggttacacggcagcctcctgtgcacagaagcagggagctcagcccttccacaggcagaaggcactgaaagaaatcggcctccagcaccctgatgcacgtccgcctgtgtctctcactgcccgcacctgcagggaggctcggcactccctgtaaagacgagggatccaggcagcaacatcatgggagaatgcagggctcccagacagcccagccctctcgcaggcctctcctgggaagagacctgcagccaccactgaacagccacggagcccgctggatagtaactgagtcagtgaccgacctggagggcaggggagcagtgaaccggagcccagaccatagggacagagaccagccgctgacatcccgagcccctcactggcggccccagaacaccgcgtggaaacagaacagacccacattcccacctggaacagggcagacactgctgagcccccagcaccagccctgagaaacaccaggcaacggcatcagagggggctcctgagaaagaaaggaggggaggtctccttcaccagcaagtacttcccttgaccaaaaacagggtccacgcaactcccccaggacaaaggaggagccccctgtacagcactgggctcagagtcctctccaacacaccctgagtttcagacaaaaaccccctggaaatcatagtatcagcaggagaactagccagagacagcaagaggggactcagtgactcccgcggggacaggaggattttgtgggggctcgtgtcactgtgaggatattgtagtagtaccagctgctatgcccacagtgacacagccccattcccaaagccctgctgtaaacgcttccacttctggagctgaggggctggggggagcgtctgggaagtagggcctaggggtggccatcaatgcccaaaacgcaccagactcccccccagacatcaccccactggccagtgagcagagtaaacagaaaatgagaagcagctgggaagcttgcacaggccccaaggaaagagctttggcgggtgtgcaagaggggatgcgggcagagcctgagcagggccttttgctgtttctgctttcctgtgcagatagttccataaactggtgttcaagatcgatggctgggagtgagcccaggaggacagtgtgggaagggcacagggaaggagaagcagccgctatcctacactgtcatctttcaagagtttgccctgtgcccacaatgctgcatcatgggatgcttaacagctgatgtagacacagctaaagagagaatcagtgaaatggatttgcagcacagatctgaataaattctccagaatgtggagccacacagaagcaagcacaaggaaagtgcctgatgcaagggcaaagtacagtgtgtaccttcaggctgggcacagacactctgaaaagccttggcaggaactccctgcaacaaagcagagccctgcaggcaatgccagctccagagccctccctgagagcctcatgggcaaagatgtgcagaacatatgtttgtcatagccccaaactgagaatgaagcaaacagccatctgaaggaaaacaggcaaataaacgatggcaggttcatgaaatgcaaacccagacagccagaaggacaacagtgagggttacaggtgactctgtggttgagttcatgacaatgctgagtaattggagtaacaaaggaaagtccaaaaaatactttcaatgtgatttcttctaaataaaatttacagccggcaaaatgaactatcttcttaagggataaactttccactaggaaaactataaggaaaatcaagaaaaggatgatcacataaacacagtggtcgttacttctactggggaaggaagagggtatgaactgagacacacagggttggcaagtctcctaacaagaagagaacaaatacattacagtaccttgaaaacagcagttaaaattctaaattgcaagaagaggaaaatgcacacagctgtgtttagaaaattctcagtccagcactgttcataatagcaaagacattaacccaggttggataaataaacgatgacacaggcaattgcacaatgatacagacatacattcagtatatgagacattgatgatgtatccccaaagaaatgactttaaagagaaaaggcctgatatgtggtggcactcacctccctgggcatccccggacaggctgcaggcacactgtgtggcagggcaggctggtacctgctggcagctcctggggcctgatgtggagcaggcacagagccgtatccccccgaggacatatacccccaaggacggcacagttggtacattccggagacaagcaactcagccacactcccaggccagagcccgagagggacgcccatgcacagggaggcagagcccagctcctccacagccagcagcacctgtgcaggggccgccatctggcaggcacagagcatgggctgggaggaggggcagggacaccaggcagggttggcaccaactgaaaattacagaagtctcatacatctacctcagccttgcctgacctgggcctcacctgacctggacctcacctggcctggacctcacctggcctagacctcacctctgggcttcacctgagctcggcctcacctgacttggaccttgcctgtcctgagctcacatgatctgggcctcacctgacctgggtttcacctgacctgggcttcacctgacctgggcctcatctgacctgggcctcactggcctggacctcacctggcctgggcttcacctggcctcaggcctcatctgcacctgctccaggtcttgctggaacctcagtagcactgaggctgcaggggctcatccagggttgcagaatgactctagaacctcccacatctcagctttctgggtggaggcacctggtggcccagggaatataaaaagcctgaatgatgcctgcgtgatttgggggcaatttataaacccaaaaggacatggccatgcagcgggtagggacaatacagacagatatcagcctgaaatggagcctcagggcacaggtgggcacggacactgtccacctaagccaggggcagacccgagtgtccccgcagtagacctgagagcgctgggcccacagcctcccctcggtgccctgctacctcctcaggtcagccctggacatcccgggtttccccaggcctggcggtaggtttggggtgaggtctgtgtcactgtggtattacgatttttggagtggttattatacccacagtgtcacagagtccatcaaaaacccatccctgggaacctgctgccacagccctccctgtggggcaccgccgcgtgccatgttaggattttgactgaggacacagcaccatgggtatggtggctaccgcagcagtgcagcctgtgacccaaacacacagggcagcaggcacaacagacaagcccacaagtgaccaccctgagctcctgcctgccagccctggagaccatgaaacagatggccaggattatcccataggtcagccagacctcagtccaacaggtctgcatcgctgctgccctccaataccagtccggatggggacagggccggcccacattaccatttgctgccatccggccaacagtcccagaagcccctccctcaaggctgggccacatgtgtggaccctgagagccccccatgtctgagtaggggcaccaggaaggtggggctggccctgtgcactgtcactgcccctgtggtccctggcctgcctggccctgacacctgggcctctcctgggtcatttccaagacagaagacattcccaggacagctggagctgggagtccatcatcctgcctggccatcctgagtcctgcgcctttccaaacctcacccgggaagccaacagaggaatcacctcccacaggcagagacaaagaccttccagaaatctctgtctctctccccagtgggcaccctcttccagggcagtcctcagtgatatcacagtgggaacccacatctggatcgggactgcccccagaacacaagatggcccacagggacagccccacagcccagcccttcccagacccctaaaaggcgtcccaccccctgcatctgccccagggctcaaactccaggaggactgactcctgcacaccctcctgccagacatcacctcagcccctcctggaagggacaggagcgcgcaagggtgagtcagaccctcctgccctcgatggcaggcggagaagattcagaaaggtctgagatccccaggacgcagcaccactgtcaatgggggccccagacgcctggaccagggcctgcgtgggaaaggcctctgggcacactcaggggctttttgtgaagggtcctcctactgtgtgactacagtaactaccacagtgatgaacccagcagcaaaaactgaccggactcccaaggtttatgcacacttctccgctcagagctctccaggatcagaagagccgggcccaagggtttctgcccagaccctcggcctctagggacatcttggccatgacagcccatgggctggtgccccacacatcgtctgccttcaaacaagggcttcagagggctctgaggtgacctcactgatgaccacaggtgccctggccccttccccgccagctgcaccagaccccgtcctgacagatgccccgattccaacagccaattcctggggccaggaatcgctgtagacaccagcctccttccaacacctcttgccaattgcctggattcccatcccggttggaatcaagaggacagcatcccccaggctcccaacaggcaggactcccacaccctcctctgagaggccgctgtgttccgtagggccaggctgcagacagtccccctcacctgccactagacaaatgcctgctgtagatgtccccacctggaaaagaccactcatggagcccccagccccaggtacagccatagagagagtctctgaggcccctaagaagtagccatgcccagttctgccgggaccctcggccaggctgacaggagtggacgctggagctgggcccacactgggccacataggagctcaccagtgagggcaggagagcacatgccggggagcacccagcctcctgctgaccagaggcccgtcccagagcccaggaggctgcagaggcctctccagggggacactgtgcatgtctggtccctgagcagccccccatgtccccagtcctgggggcccctggcacagctgtctggaccctctctattccctgggaagctcctcctgacagccccgcctccagttccaggtgtggttattgtcagggggtgtcagactgtggtggatacagctatggttaccacagtggtgctgcccatagcagcaaccaggccaagtagacaggcccctgctgtgcagccccaggcctccagctcacctgcttctcctggggctctcaaggctgctgttttctgcactctcccctctgtggggagggttccctcagtgggagatctgttctcaacatcccagggcctcattcctgcaaggaaggccaatggatgggcaacctcacatgccgcggctaagatagggtgggcagcctggcggggacaggacatcctgctggggtatctgtcactgtgcctagtggggcactggctcccaaacaacgcagtcctcgccaaaatccccacggcctcccccgctaggggctggcctgatctcctgcagtcctaggaggctgctgacctccagaatggctccgtccccagttccagggcgagagcagatcccaggccggctgcagactgggaggccaccccctccttcccagggttcactgcaggtgaccagggcaggaaatggcctgaacacagggataaccgggccatcccccaacagagtccaccccctcctgctctgtaccccgcacccccaaggccagcccatgacatccgacaaccccacaccagagtcactgcccggtgctgccctagggaggacccctcagcccccaccctgtctagaggactggggaggacaggacacgccctctccttatggttcccccacctggctctggctgggacccttggggtgtggacagaaaggacgcttgcctgattggcccccaggagcccagaacttctctccagggaccccagcccgagcacccccttacccaggacccagccctgcccctcctcccatctgctctcctctcatcaccccatgggaatccagaatccccaggaagccatcaggaagggctgagggaggaagtggggccactgcaccaccaggcaggaggctccgtctttgtgaacccagggaggtgccagcctcctagagggtatggtccaccctgcctatggctcccacagtggcaggctgcagggaaggaccagggacggtgtgggggagggctcagggccccgcgggtgctccatcttggatgagcccatctctctcacccacggactcacccacctcctctccaccctggccacacgtcgtccacaccatcctaagtcccacctacaccagagccggcacagccagtgcagacagaggctggggtgcaggggggccgccagggcagctttggggagggaaggatggaggaaggggagttcagtgaagaggcccccctcccctgggtccaggatcctcctctgggacccccggatcccatcccctccaggctctgggaggagaagcaggatgggagaatctgtgcgggaccctctcacagtggaatacctccacagcggctcaggcaagacccaaaagcccctcagtgagccctccactgcagtcctgggcctgggtagcagcccctcccacagaggatgaacccagcaccccgaggatgtcctgccagggggagctcagagccatgaaggagcaggatatgggacccccgatacaggcacagacctcagctccattcaggactgccacgtcctgccctgggaggaacccctttctctagtccctgcaggccaggaggcagctgactcctgacttggacgcctattccagacaccagacagaggggcaggccccccagaaccagggatgaggacgccccgtcaaggccagaaaagaccaagttgtgctgagcccagcaagggaaggtccccaaacaaaccaggaagtttctgaaggtgtctgtgtcacagtggagtatagcagctcgtcccacagtgacactcgccaggccagaaaccccatcccaagtcagcggaatgcagagagagcagggaggacatgtttaggatctgaggccgcacctgacacccaggccagcagacgtctcctgtccatggcaccctgccatgtcctgcatttctggaagaacaagggcaggctgaagggggtccaggaccaggagatgggtcccctctacccagagaaggagccaggcaggacacaagccccctccccattgaggctgacctgcccagagggtcctgggcccaccccacacaccggggcggaatgtgtgcaggcctcggtctctgtgggtgttccgctagctggggctcacagtgctcaccccacacctaaaacgagccacagcctcagagcccctgaaggagaccccgcccacaagcccagcccccacccaggaggccccagagcacagggcgccccgtcggattctgaacagccccgagtcacagtgggtataactggaactaccactgtgagaaaagcttcgtccaaaacggtctcctggccacagtcggaggccccgccagagaggggagcagccaccccaaacccatgttctgccggctcccatgaccccgtgcacctggagccccacagtgtccccactggatgggaggacaagggccgggggctccggcgggtcggggcaggggcttgatggcttccttctgccgtggctccagtgcccctggctggagttgacccttctgacaagtgtcctcagagagtcagggatcagtggcacctccctaacatcaaccccacgcagcgcaggcacaaaccccacatccagggccaactccaggaacagagacaccccaataccctgggggaccccaaccctgatgactcccgtcccatctctgtccctcacttggggcctgctgcggggcgagcacctgggagcaaactcaggattaggggacaccactgtgggcctgacctcgagcaggccacagacccttccctcctgccctggtgcagcacagactttggggtctgggcagggaggaacttctggcaggtcaccaagcacagagcccccaggctgaggtggccccagggggaaccccagcaggtggcccactacccttcctcccagctggaccccatgtcttccccaagataggggtgccatccaaggcaggtcctccatggagcccccttcaggctcctctccagaccccactgggcctcagtccccactctaggaatgcagccaccacgggcacaccaggcagcccaggcccagccaccctgcagtgcccaagcccacaccctggaggagagcagggtgcgtctgggaggggctgggctccccacccccacccccacctgcacaccccacccacccttgcccgggccccctgcaggagggtcagagcccccatgggatatggacttagggtctcactcacgcacctcccctcctgggagaaggggtctcatgcccagatccccccagcagcgctggtcacaggtagaggcagtggccccagggccaccctgacctggcccctcaggctcctctagccctggctgccctgctgtccctgggaggcctgggctccaccagaccacaggtctagggcaccgcccacactggggccgcccacacacagctcacaggaagaagataagctccagacccccaggcccgggacctgccttgctgctacgacttcctgccccagacctcgttgccctcccccgtccacttacacacaggccaggaagctgttcccacacagaccaaccccagacggggaccacctggcactcaggtcactgccatttccttctccattcacttccaatgcctctgtgcttcctccctcctccttccttcgggggagcaccctgtgcagctcctccctgcagtccacaccctggggagacccgaccctgcagcccacaccctggggagacctgaccctcctccagccctttctcccccgctgctcttgccacccaccaagacagccctggggtcctgtccctacagcccccacccagttctctacctagacccgtcttcctccctctaaacacctctcccaggccaaccctacacctgcaggccctcccctccactgccaaagaccctcagtttctcctgcctgtgcccacccccgtgctcctcctgcccacagctcgagctcttcctctcctagggcccctgagggatggcattgaccgtgccctcgcacccacacactgcccatgccctcacattcctcctggccactccagccccactcccctctcaggcctggctctggtatttctgggacaaagccttacccaagtctttcccatgcaggcctgggcccttaccctcactgcccggttacagggcagcctcctgtgcacagaagcagggagctcagcccttccacaggcagaaggcactgaaagaaatcggcctccagcgccttgacacacgtctgcctgtgtctctcactgcccgcacctgcagggaggctcggcactccctctaaagacgagggatccaggcagcagcatcacaggagaatgcagggctaccagacatcccagtcctctcacaggcctctcctgggaagagacctgaagacgcccagtcaacggagtctaacaccaaacctccctggaggccgatgggtagtaacggagtcattgccagacctggaggcaggggagcagtgagcccgagcccacaccatagggccagaggacagccactgacatcccaagccactcactggtggtcccacaacaccccatggaaagaggacagacccacagtcccacctggaccagggcagagactgctgagacccagcaccagaaccaaccaagaaacaccaggcaacagcatcagagggggctctggcagaacagaggaggggaggtctccttcaccagcaggcgcttcccttgaccgaagacaggatccatgcaactcccccaggacaaaggaggagccccttgttcagcactgggctcagagtcctctccaagacacccagagtttcagacaaaaaccccctggaatgcacagtctcagcaggagagccagccagagccagcaagatggggctcagtgacacccgcagggacaggaggattttgtgggggctcgtgtcactgtgaggatattgtactaatggtgtatgctatacccacagtgacacagccccattcccaaagccctactgcaaacgcattccacttctggggctgaggggctgggggagcgtctgggaaatagggctcaggggtgtccatcaatgcccaaaacgcaccagactcccctccatacatcacacccaccagccagcgagcagagtaaacagaaaatgagaagcaagctggggaagcttgcacaggccccaaggaaagagctttggcgggtgtgtaagaggggatgcgggcagagcctgagcagggccttttgctgtttctgctttcctgtgcagagagttccataaactggtgttcgagatcaatggctgggagtgagcccaggaggacagcgtgggaagagcacagggaaggaggagcagccgctatcctacactgtcatctttcgaaagtttgccttgtgcccacactgctgcatcatgggatgcttaacagctgatgtagacacagctaaagagagaatcagtgagatggatttgcagcacagatctgaataaattctccagaatgtggagcagcacagaagcaagcacacagaaagtgcctgatgcaaggacaaagttcagtgggcaccttcaggcattgctgctgggcacagacactctgaaaagccctggcaggaactccctgtgacaaagcagaaccctcaggcaatgccagccccagagccctccctgagagcctcatgggcaaagatgtgcacaacaggtgtttctcatagccccaaactgagagcaaagcaaacgtccatctgaaggagaacaggcaaataaacgatggcaggttcatgaaatgcaaacccagacagccacaagcacaaaagtacagggttataagcgactctggttgagttcatgacaatgctgagtaattggagtaacaaagtaaactccaaaaaatactttcaatgtgatttcttctaaataaaatttacaccctgcaaaatgaactgtcttcttaagggatacatttcccagttagaaaaccataaagaaaaccaagaaaaggatgatcacataaacacagtggtggttacttctgctggggaaggaagagggtatgaactgagatacacagggtgggcaagtctcctaacaagaacagaacgaatacattacagtaccttgaaaacagcagttaaacttctaaattgcaagaagaggaaaatggacacagttgtgtttagaaaattctcagtccagcactgttcataatagcaaagacattaacccaggtcggataaataagcgatgacacaggcaattgcacaatgatacagacatatatttagtatatgagacatcgatgatgtatccccaaataaacgactttaaagagataaagggctgatgtgtggtggcattcacctccctgggatccccggacaggttgcaggctcactgtgcagcagggcaggcgggtacctgctggcagttcctggggcctgatgtggagcaagcgcagggccatatatcccggaggacggcacagtcagtgaattccagagagaagcaactcagccacactccccaggcagagcccgagagggacgcccacgcacagggaggcagagcccagcacctccgcagccagcaccacctgtgcacgggccaccaccttgcaggcacagagtgggtgctgagaggaggggcagggacaccaggcagggtgagcacccagagaaaactgcagacgcctcacacatccacctcagcctcccctgacctggacctcactggcctgggcctcacttaacctgggcttcacctgaccttggcctcacctgacttggacctcgcctgtcccaagctttacctgacctgggcctcaactcacctgaacgtctcctgacctgggtttaacctgtcctggaactcacctggccttggcttcccctgacctggacctcatctggcctgggcttcacctggcctgggcctcacctgacctggacctcatctggcctggacctcacctggcctggacttcacctggcctgggcttcacctgacctggacctcacctggcctcgggcctcacctgcacctgctccaggtcttgctggagcctgagtagcactgagggtgcagaagctcatccagggttggggaatgactctagaagtctcccacatctgacctttctgggtggaggcagctggtggccctgggaatataaaaatctccagaatgatgactctgtgatttgtgggcaacttatgaacccgaaaggacatggccatggggtgggtagggacatagggacagatgccagcctgaggtggagcctcaggacacaggtgggcacggacactatccacataagcgagggatagacccgagtgtccccacagcagacctgagagcgctgggcccacagcctcccctcagagccctgctgcctcctccggtcagccctggacatcccaggtttccccaggcctgccggtaggtttagaatgaggtctgtgtcactgtggtattacgatattttgactggttattataaccacagtgtcacagagtccatcaaaaacccatgcctggaagcttcccgccacagccctccccatggggccctgctgcctcctcaggtcagccccggacatcccgggtttccccaggctgggcggtaggtttggggtgaggtctgtgtcactgtggtattactatggttcggggagttattataaccacagtgtcacagagtccatcaaaaacccatccctgggagcctcccgccacagccctccctgcaggggaccggtacgtgccatgttaggattttgatcgaggagacagcaccatgggtatggtggctaccacagcagtgcagcctgtgacccaaacccgcagggcagcaggcacgatggacaggcccgtgactgaccacgctgggctccagcctgccagccctggagatcatgaaacagatggccaaggtcaccctacaggtcatccagatctggctccgaggggtctgcatcgctgctgccctcccaacgccagtccaaatgggacagggacggcctcacagcaccatctgctgccatcaggccagcgatcccagaagcccctccctcaaggctgggccacatgtgtggacactgagagccctcatgtctgagtaggggcaccaggagggaggggctggccctgtgcactgtccctgcccctgtggtccctggcctgcctggccctgacacctgagcctctcctgggtcatttccaagacagaagacattcctggggacagccggagctgggcgtcgctcatcctgcccggccgtcctgagtcctgctcatttccagacctcaccggggaagccaacagaggactcgcctcccacattcagagacaaagaaccttccagaaatccctgcctctctccccagtggacaccctcttccaggacagtcctcagtggcatcacagcggcctgagatccccaggacgcagcaccgctgtcaataggggccccaaatgcctggaccagggcctgcgtgggaaaggtctctggccacactcgggctttttgtgaagggccctcctgctgtgtgactacagtaactaccatagtgatgaacccagtggcaaaaactggctggaaacccaggggctgtgtgcacgcctcagcttggagctctccaggagcacaagagccgggcccaaggatttgtgcccagaccctcagcctctagggacacctgggccatctcagcctgggctggtgccctgcacaccatcttcctccaaataggggcttcagagggctctgaggtgacctcactcatgaccacaggtgacctggcccttccctgccagctataccagaccctgtcttgacagatgccccgattccaacagccaattcctgggaccctgaatagctgtagacaccagcctcattccagtacctcctgccaattgcctggattcccatcctggctggaatcaagaaggcagcatccgccaggctcccaacaggcaggactcccgcacaccctcctctgagaggccgctgtgttccgcagggccaggccctggacagttcccctcacctgccactagagaaacacctgccattgtcgtccccacctggaaaagaccactcgtggagcccccagccccaggtacagctgtagagagagtcctcgaggcccctaagaaggagccatgcccagttctgccgggaccctcggccaggccgacaggagtggacgctggagctgggcccacactgggccacataggagctcaccagtgagggcaggagagcacatgccggggagcacccagcctcctgctgaccagaggcctgccccagagcccaggaggctgcagaggcctctccagggagacactgtgcatgtctggtacctaagcagccccccacgtccccagtcctgggggcccctggctcagctgtctggaccctccctgttccctgggaagctcctcctgacagccccgcctccagttccaggtgtggttattgtcaggcgatgtcagactgtggtggatatagtggctacgattaccacagtggtgccgcccatagcagcaaccaggccaagtagacaggcccctgctgcgcagccccaggcatccacttcacctgcttctcctggggctctcaaggctgctgtctgtcctctggccctctgtggggagggttccctcagtgggaggtctgtgctccagggcagggatgattgagatagaaatcaaaggctggcagggaaaggcagcttcccgccctgagaggtgcaggcagcaccacggagccacggagtcacagagccacggagcccccattgtgggcatttgagagtgctgtgcccccggcaggcccagccctgatggggaagcctgtcccatcccacagcccgggtcccacgggcagcgggcacagaagctgccaggttgtcctctatgatcctcatccctccagcagcatcccctccacagtggggaaactgaggcttggagcaccacccggccccctggaaatgaggctgtgagcccagacagtgggcccagagcactgtgagtaccccggcagtacctggctgcagggatcagccagagatgccaaaccctgagtgaccagcctacaggaggatccggccccacccaggccactcgattaatgctcaaccccctgccctggagacctcttccagtaccaccagcagctcagcttctcagggcctcatccctgcaaggaaggtcaagggctgggcctgccagaaacacagcaccctccctagccctggctaagacagggtgggcagacggctgtggacgggacatattgctggggcatttctcactgtcacttctgggtggtagctctgacaaaaacgcagaccctgccaaaatccccactgcctcccgctaggggctggcctggaatcctgctgtcctaggaggctgctgacctccaggatggctccgtccccagttccagggcgagagcagatcccaggcaggctgtaggctgggaggccacccctgcccttgccggggttgaatgcaggtgcccaaggcaggaaatggcatgagcacagggatgaccgggacatgccccaccagagtgcgccccttcctgctctgcaccctgcaccccccaggccagcccacgacgtccaacaactgggcctgggtggcagccccacccagacaggacagacccagcaccctgaggaggtcctgccagggggagctaagagccatgaaggagcaagatatggggcccccgatacaggcacagatgtcagctccatccaggaccacccagcccacaccctgagaggaacgtctgtctccagcctctgcaggtcgggaggcagctgacccctgacttggacccctattccagacaccagacagaggcgcaggccccccagaaccagggttgagggacgccccgtcaaagccagacaaaaccaaggggtgttgagcccagcaagggaaggcccccaaacagaccaggaggtttctgaaggtgtctgtgtcacagtggggtatagcagcagctggtaccacagtgacactcacccagccagaaaccccattccaagtcagcggaagcagagagagcagggaggacacgtttaggatctgagactgcacctgacacccaggccagcagacgtctcccctccagggcaccccaccctgtcctgcatttctgcaagatcaggggcggcctgagggggggtctagggtgaggagatgggtcccctgtacaccaaggaggagttaggcaggtcccgagcactctccccattgaggctgacctgcccagagagtcctgggcccaccccacacaccggggcggaatgtgtgcaggcctcggtctctgtgggtgttccgctagctggggctcacagtgctcaccccacacctaaaatgagccacagcctccggagcccccgcaggagaccccgcccacaagcccagcccccacccaggaggccccagagctcagggcgccccgtcggattccgaacagccccgagtcacagcgggtataaccggaaccaccactgtcagaatagctacgtcaaaaactgtccagtggccactgccggaggccccgccagagagggcagcagccactctgatcccatgtcctgccggctcccatgacccccagcacgcggagccccacagtgtccccactggatgggaggacaagagctggggattccggcgggtcggggcaggggcttgatcgcatccttctgccgtggctccagtgcccctggctggagttgacccttctgacaagtgtcctcagagagacaggcatcaccggcgcctcccaacatcaaccccaggcagcacaggcacaaaccccacatccagagccaactccaggagcagagacaccccaataccctgggggaccccgaccctgatgacttcccactggaattcgccgtagagtccaccaggaccaaagaccctgcctctgcctctgtccctcactcaggacctgctgccgggcgaggccttgggagcagacttgggcttaggggacaccagtgtgaccccgaccttgaccaggacgcagacctttccttcctttcctggggcagcacagactttggggtctgggccaggaggaacttctggcaggtcgccaagcacagaggccacaggctgaggtggccctggaaagacctccaggaggtggccactccccttcctcccagctggaccccatgtcctccccaagataagggtgccatccaaggcaggtgctccttggagccccattcagactcctccctggaccccactgggcctcagtcccagctctggggatgaagccaccacaagcacaccaggcagcccaggcccagccaccctgcagtgcccaagcacacactctggagcagagcagggtgcctctgggaggggctgagctccccaccccacccccacctgcacaccccacccacccctgcccagcggctctgcaggagggtcagagccccacatggggtatggacttagggtctcactcacgtggctcccatcatgagtgaaggggcctcaagcccaggttcccacagcagcgcctgtcgcaagtggaggcagaggcccgagggccaccctgacctggtccctgaggttcctgcagcccaggctgccctgctgtccctgggaggcctgggctccaccagaccacaggtccagggcaccgggtgcaggagccacccacacacagctcacaggaagaagataagctccagacccccagggccagaacctgccttcctgctactgcttcctgccccagacctgggcgccctcccccgtccacttacacacaggccaggaagctgttcccacacagaacaaccccaaaccaggaccgcctggcactcaggtggctgccatttccttctccatttgctcccagcgcctctgtcctccctggttcctccttcgggggaacagcctgtgcagccagtccctgcagcccacaccctggggagacccaaccctgcctggggcccttccaaccctgctgctcttactgcccacccagaaaactctggggtcctgtccctgcagtccctaccctggtctccacccagacccctgtgtatcactccagacacccctcccaggccaaccctgcacctgcaggccctgtcctcttctgtcgctagagcctcagtttctcccccctgtgcccacaccctacctcctcctgcccacaactctaactcttcttctcctggagcccctgagccatggcattgaccctgccctcccaccacccacagcccatgccctcaccttcctcctggccactccgaccccgccccctctcaggccaagccctggtatttccaggacaaaggctcacccaagtctttcccaggcaggcctgggctcttgccctcacttcccggttacacgggagcctcctgtgcacagaagcagggagctcagcccttccacaggcagaaggcactgaaagaaatcggcctccagcaccttgacacacgtccgcccgtgtctctcactgcccgcacctgcagggaggctccgcactccctctaaagacaagggatccaggcagcagcatcacgggagaatgcagggctcccagacatcccagtcctctcacaggcctctcctgggaagagacctgcagccaccaccaaacagccacagaggctgctggatagtaactgagtcaatgaccgacctggagggcaggggagcagtgagccggagcccataccatagggacagagaccagccgctgacatcccgagctcctcaatggtggccccataacacacctaggaaacataacacacccacagccccacctggaacagggcagagactgctgagcccccagcaccagccccaagaaacaccaggcaacagtatcagagggggctcccgagaaagagaggaggggagatctccttcaccatcaaatgcttcccttgaccaaaaacagggtccacgcaactcccccaggacaaaggaggagccccctatacagcactgggctcagagtcctctctgagacaccctgagtttcagacaacaacccgctggaatgcacagtctcagcaggagaacagaccaaagccagcaaaagggacctcggtgacaccagtagggacaggaggattttgtgggggctcgtgtcactgtgaggatattgtagtggtggtagctgctactcccacagtgacacagacccattcccaaagccctactgcaaacacacccactcctggggctgaggggctgggggagcgtctgggaagtagggtccaggggtgtctatcaatgtccaaaatgcaccagactccccgccaaacaccaccccaccagccagcgagcagggtaaacagaaaatgagaggctctgggaagcttgcacaggccccaaggaaagagctttggcaggtgtgcaagaggggatgcaggcagagcctgagcagggccttttgctgtttctgctttcctgtgcagagagttccataaactggtgttcaagatcagtggctgggaatgagcccaggagggcagtctgtgggaagagcacagggaaggaggagcagccgctatcctacactgtcatctttcaaaagtttgccttgtgaccacactattgcatcatgggatgcttaagagctgatgtagacacagctaaagagagaatcagtgagatgaatttgcagcatagatctgaataaactctccagaatgtggagcagtacagaagcaaacacacagaaagtgcctgatgcaaggacaaagttcagtgggcaccttcaggcattgctgctgggcacagacactctgaaaagccctggcaggatctccctgcgacaaagcagaaccctcaggcaatgccagccccagagccctccctgagagcgtcatggggaaagatgtgcagaacagctgattatcatagactcaaactgagaacagagcaaacgtccatctgaagaacagtcaaataagcaatggtaggttcatgcaatgcaaacccagacagccaggggacaacagtagagggctacaggcggctttgcggttgagttcatgacaatgctgagtaattggagtaacagaggaaagcccaaaaaatacttttaatgtgatttcttctaaataaaatttacaccaggcaaaatgaactgtcttcttaagggataaactttcccctggaaaaactacaaggaaaattaagaaaacgatgatcacataaacacagttgtggttacttctactggggaaggaagagggtatgagctgagacacacagagtcggcaagtctccaagcaagcacagaacgaatacattacagtaccttgaatacagcagttaaacttctaaatcgcaagaagaggaaaatgcacacagctgtgtttagaaaattctcagtccagcactattcataatagcaaagacattaacccaggttggataaataaatgatgacacaggcaattgcacaatgatacagacatacatttagtacatgagacatcgatgatgtatccccaaagaaatgactttaaagagaaaaggcctgatgtgtggtggcactcacctccctgggatccccggacaggttgcaggcacactgtgtggcagggcaggctggtacatgctggcagctcctggggcctgatgtggagcaagcgcagggctgtatacccccaaggatggcacagtcagtgaattccagagagaagcagctcagccacactgcccaggcagagcccgagagggacgcccacgcacagggaggcagagcccagctcctccacagccaccaccacctgtgcacgggccaccaccttgcaggcacagagtgggtgctgagaggaggggcagggacaccaggcagggtgagcacccagagaaaactgcagaagcctcacacatccacctcagcctcccctgacctggacctcacctggtctggacctcacctggcctgggcctcacctgacctggacctcacctggcctgggcttcacctgacctggacctcacctggcctccggcctcacctgcacctgctccaggtcttgctggaacctgagtagcactgaggctgcagaagctcatccagggttggggaatgactctggaactctcccacatctgacctttctgggtggaggcatctggtggccctgggaatataaaaagccccagaatggtgcctgcgtgatttgggggcaatttatgaacccgaaaggacatggccatggggtgggtagggacatagggacagatgccagcctgaggtggagcctcaggacacagttggacgcggacactatccacataagcgagggacagacccgagtgttcctgcagtagacctgagagcgctgggcccacagcctcccctcggtgccctgctgcctcctcaggtcagccctggacatcccgggtttccccaggcctggcggtaggtttgaagtgaggtctgtgtcactgtggtattatgattacgtttgggggagttatcgttatacccacagcatcacacggtccatcagaaacccatgccacagccctccccgcaggggaccgccgcgtgccatgttacaattttgatcgaggacacagcgccatgggtatggtggctaccacagcagtgcagcccatgacccaaacacacagggcagcaggcacaatggacaggcctgtgagtgaccatgctgggctccagcccgccagccccggagaccatgaaacagatggccaaggtcaccccacagttcagccagacatggctccgtggggtctgcatcgctgctgccctctaacaccagcccagatggggacaaggccaaccccacattaccatctcctgctgtccacccagtggtcccagaagcccctccctcatggctgagccacatgtgtgaaccctgagagcaccccatgtcagagtaggggcagcagaagggcggggctggccctgtgcactgtccctgcacccatggtccctcgcctgcctggccctgacacctgagcctcttctgagtcatttctaagatagaagacattcccggggacagccggagctgggcgtcgctcatcctgcccggccgtcctgagtcctgcttgtttccagacctcaccagggaagccaacagaggactcacctcacacagtcagagacaaagaaccttccagaaatccctgtctcactccccagtgggcaccttcttccaggacattcctcggtcgcatcacagcaggcacccacatctggatcaggacggcccccagaacacaagatggcccatggggacagccccacaacccaggccttcccagacccctaaaaggcgtcccaccccctgcacctgccccagggctaaaaatccaggaggcttgactcccgcataccctccagccagacatcacctcagccccctcctggaggggacaggagcccgggagggtgagtcagacccacctgccctcgatggcaggcggggaagattcagaaaggcctgagatccccaggacgcagcaccactgtcaatgggggccccagacgcctggaccagggcctgcgtgggaaaggccgctgggcacactcaggggctttttgtgaaggcccctcctactgtgtgactacggtgactaccacagtgatgaaactagcagcaaaaactggccggacacccagggaccatgcacacttctcagcttggagctctccaggaccagaagagtcaggtctgagggtttgtagccagaccctcggcctctagggacaccctggccatcacagcggatgggctggtgccccacatgccatctgctccaaacaggggcttcagagggctctgaggtgacttcactcatgaccacaggtgccctggccccttccccgccagctacaccgaaccctgtcccaacagctgccccagttccaacagccaattcctggggcccagaattgctgtagacaccagcctcgttccagcacctcctgccaattgcctggattcacatcctggctggaatcaagagggcagcatccgccaggctcccaacaggcaggactcccgcacaccctcctctgagaggccgctgtgttccgcagggccaggccctggacagttcccctcacctgccactagagaaacacctgccattgtcgtccccacctggaaaagaccactcgtggagcccccagccccaggtacagctgtagagagactccccgagggatctaagaaggagccatgcgcagttctgccgggaccctcggccaggccgacaggagtggacactggagctgggcccacactgggccacataggagctcaccagtgagggcaggagagcacatgccggggagcacccagcctcctgctgaccagaggcctgccccagagcccaggaggctgcagaggcctctccagggggacactgtgcatgtctggtccctgagcagccccccatgtccccagtcctgggggcccctggcacagctgtctggaccctccctgttccctgggaagctcctcctgacagccccgcctccagttccaggtgtggttattgtcagggggtgtcagactgtggtggatacagctatggttaccacagtggtgctgcccatagcagcaaccaggccaagtagacaggcccctgctgtgcagccccaggcctccagctcacctgcttctcctggggctctcaaggtcactgttgtctgtactctgccctctgtggggagggttctctcagtgggaggtctgttctcaacatcccagggcctcatgtctgcacggaaggccaatggatgggcaacctcacatgccgcggctaagatagggtgggcagcctggcgggggacagtacatactgctggggtgtctgtcactgtgcctagtggggcactggctcccaaacaacgcagtcctcaccaaaatccccacagcctcccctgctaggggctggcctgatctcctgcagtcctaggaggctgctgacctccagaatgtctccgtccccagttccagggcgagagcagatcccaggccggctgcagactgggaggccaccccctccttcccagggttcactggaggtgaccaaggtaggaaatggccttaacacagggatgactgcgccatcccccaacagagtcagccccctcctgctctgtaccccgcaccccccaggccagtccacgaaaaccagggccccacatcagagtcactgcctggcccggccctggggcggacccctcagcccccaccctgtctagaggacttggggggacaggacacaggccctctccttatggttcccccacctgcctccggccgggacccttggggtgtggacagaaaggacacctgcctaattggcccccaggaacacagaacttctctccagggaccccagcccgagcacccccttacccaggacccagccctgcccctcctcccctctgctctcctctcatcaccccatgggaatccggtatccccaggaagccatcaggaagggctgaaggaggaagcggggccgtgcaccaccgggcagcaggctccgtcttcgtgaacccagggaagtgccagcctcctagagggtatggtccaccctgcctggggctcccaccgtggcaggctgcggggaaggaccagggacggtgtgggggagggctcagggccctgcgggtgctcctccatcttcggtgagcctcccccttcacccaccgtcccgcccacctcctctccaccctggctgcacgtcttccacaccatcctgagtcctacctacaccagagccagcaaagccagtgcagacaaaggctggggtgcaggggggctgccagggcagcttcggggagggaaggatggagggaggggaggtcagtgaagaggcccccttcccctgggtccaggatcctcctctgggacccccggctcccatcccctcctggctctgggaggagaagcaggatgggagaatctgtgcgggaccctctcacagtggaatatccccacagcggctcaggccagacccaaaagcccctcagtgagccctccactgcagtcctgggcctgggtagcagcccctcccacagaggacagacccagcaccccgaagaagtcctgccagggggagctcagagccatgaaagagcaggatatggggtccccgatacaggcacagacctcagctccatccaggcccaccgggacccaccatgggaggaacacctgtctccgggttgtgaggtggctggcctctgtctcggaccccactccagacaccagacagaggggcaggccccccaaaaccagggttgagggatgatccgtcaaggcagacaagaccaaggggcactgaccccagcaagggaaggctcccaaacagacgaggaggtttctgaagctgtctgtatcacagtggggtatagcagtggctggtaccacagtgacactcgccaggccagaaaccccgtcccaagtcagcggaagcagagagagcagggaggacacgtttaggatctgaggccgcacctgacacccagggcagcagacgtctcccctccagggcaccctccaccgtcctgcgtttcttcaagaataggggcggcctgagggggtccagggccaggcgataggtcccctctaccccaaggaggagccaggcaggacccgagcaccgtccccattgaggctgacctgcccagacgggcctgggcccaccccacacaccggggcggaatgtgtgcaggccccagtctctgtgggtgttccgctagctggggcccccagtgctcaccccacacctaaagcgagccccagcctccagagccccctaagcattccccgcccagcagcccagcccctgcccccacccaggaggccccagagctcagggcgcctggtcggattctgaacagccccgagtcacagtgggtataactggaacgaccaccgtgagaaaaactgtgtccaaaactgactcctggcagcagtcggaggccccgccagagaggggagcagccgccctgaacccatgtcctgccggttcccatgacccccagcacccagagccccacggtgtccccgttggataatgaggacaagggctgggggctccggtggtttgcggcagggacttgatcacatccttctgctgtggccccattgcctctggctggagttgacccttctgacaagtgtcctcagaaagacagggatcaccggcacctcccaatatcaaccccaggcagcacagacacaaaccccacatccagagccaactccaggagcagagacaccccaacactctgggggaccccaaccgtgataactccccactggaatccgccccagagtctaccaggaccaaaggccctgccctgtctctgtccctcactcagggcctcctgcagggcgagcgcttgggagcagactcggtcttaggggacaccactgtgggccccaactttgatgaggccactgacccttccttcctttcctggggcagcacagactttggggtctgggcagggaagaactactggctggtggccaatcacagagcccccaggccgaggtggccccaagaaggccctcaggaggtggccactccacttcctcccagctggaccccaggtcctccccaagataggggtgccatccaaggcaggtcctccatggagcccccttcagactcctcccgggaccccactggacctcagtccctgctctgggaatgcagccaccacaagcacaccaggaagcccaggcccagccaccctgcagtgggcaagcccacactctggagcagagcagggtgcgtctgggaggggctaacctccccaccccccaccccccatctgcacacagccacctaccactgcccagaccctctgcaggagggccaagccaccatggggtatggacttagggtctcactcacgtgcctcccctcctgggagaaggggcctcatgccgagatccctgcagcactagacacagctggaggcagtggccccagggccaccctgacctggcatctaaggctgctccagcccagacagcactgccgttcctgggaagcctgggctccaccagaccacaggtccagggcacagcccacaggagccacccacacacagctcacaggaagaagataagctccagaccccagggcgggacctgccttcctgccaccacttacacacaggccagggagctgttcccacacagatcaaccccaaaccgggactgcctggcactagggtcactgccatttccctctccattccctcccagtgcctctgtgctccctccttctggggaacaccctgtgcagcccctccctgcagcccacacgctggggagaccccaccctgcctcgggccttttctacctgctgcacttgccgcccacccaaacaaccctgggtacgtgaccctgcagtcctcaccctgatctgcaaccagacccctgtccctccctctaaacacccctcccaggccaactctgcacctgcaggccctccgctcttctgccacaagagcctcaggttttcctacctgtgcccaccccctaacccctcctgcccacaacttgagttcttcctctcctggagcccttgagccatggcactgaccctacactcccacccacacactgcccatgccatcaccttcctcctggacactctgaccacgctcccctccctctcagacccggccctggtatttccaggacaaaggctcacccaagtcttccccatgcaggcccttgccctcactgcctggttacacgggagcctcctgtgcgcagaagcagggagctcagctcttccacaggcagaaggcactgaaagaaatcggcctccagtgccttgacacacgtccgcctgtgtctctcactgcctgcacctgcagggaggctccgcactccctctaaagatgagggatccaggcagcaacatcacgggagaatgcagggctcccagacagcccagccctctcgcaggcctctcctgggaagagacctgcagccaccactgaacagccacggaggtcgctggatagtaaccgagtcagtgaccgacctggagggcaggggagcagtgaaccggagcccagaccatagggacagagaccagccgctaacatcccgagcccctcactggcggccccagaacaccccgtggaaacagaacagacccacagtcccacctggaacagggcagacactgctgagcccccagcaccagccccaagaaacactaggcaacagcatcagagggggctcctgagaaagagaggaggggaggtctccttcaccatcaaatgcttcccttgaccaaaaacagggtccacgcaactcccccaggacaaaggaggagccccctgtacagcactgggctcagagtcctctctgagacaggctcagtttcagacaacaacccgctggaatgcacagtctcagcaggagagccaggccagagccagcaagaggagactcggtgacaccagtctcctgtagggacaggaggattttgtgggggttcgtgtcactgtgagcatattgtggtggtgactgctattcccacagtgacacaaccccattcctaaagccctactgcaaacgcacccactcctggggctgaggggctgggggagcatctgggaagtatggcctaggggtgtccatcaatgcccaaaatgcaccagactctccccaagacatcaccccaccagccagtgagcagagtaaacagaaaatgagaagcagctgggaagcttgcacaggccccaaggaaagagctttggcaggtgtgcaagaggggatgtgggcagagcctgagcagggccttttgctgtttctgctttcctgtgcagagagttccataaactggtattcaggatcaatggctgggagtgagcccaggaggacagtgtgggaagagcacagggaaggaggagcagccgctatcctacactgtcatcttttgaaagtttgccctgtgcccacaatgctgcatcatgggatgcttaacagctgatgtagacacagctaaagagagaatcagtgaaatgcatttgcagcacagatctgaataaatcctccagaatgtggagcagcacagaagcaagcacacagaaagtgcctgatgccaaggcaaagttcagtgggcaccttcaggcattgctgctgggcacagacactctgaaaagcactggcaggaactgcctgtgacaaagcagaaccctcaggcaatgccagccctagagcccttcctgagaacctcatgggcaaagatgtgcagaacagctgtttgtcatagccccaaactatggggctggacaaagcaaacgtccatctgaaggacaacagacaaataaacgatggcaggttcatgaaatgcaaactaggacagccagaggacaacagtagagagctacaggcggctttgcggttgagttcatgacaatgctgagtaattggagtaacagaggaaagcccaaaaaatacttttaatgtgatttcttctaaataaaatttacacccggcaaaatgaactatcttcttaagggataaactttcccctggaaaaactataaggaaaatcaagaaaacgatgatcacataaacacagtggtggttacttctactggggaaggaagagggtatgagctgagacacacagagtcggcaagtctcctaacaagaacagaacaaatacattacagtaccttgaaaacagcagttaaacttctaaatcgcaagaagaggaaaatgcacacacctgtgtttagaaaattctcagtccagcactgttcataatagcaaagacattaacccaggttggataaataagcgatgacacaggcaattgcacaatgatacagacatacattcagtatatgagacatcgatgatgtatccccaaagaaatgactttaaagagaaaaggcctgatgtgtggtggcaatcacctccctgggcatccccggacaggctgcaggctcactgtgtggcagggcaggcaggcacctgctggcagctcctggggcctgatgtggagcaggcacagagctgtatatccccaaggaaggtacagtcagtgcattccagagagaagcaactcagccacactccctggccagaacccaagatgcacacccatgcacagggaggcagagcccagcacctccgcagccaccaccacctgcgcacgggccaccaccttgcaggcacagagtgggtgctgagaggaggggcagggacaccaggcagggtgagcacccagagaaaactgcagaagcctcacacatccacctcagcctcccctgacctggacctcacctggcctgggcctcacctgacctggacctcacctggcctgggcttcacctggcctgggcttcacctgacctggacctcacctggcctcgggcctcacctggcctgggcttcacctggcctgggcttcacctgacctggacctcacctggcctgggcctcacctgacctggacctcacctggcctgggcttcacctggcctgggcttcacctggcctgggcttcacctgacctggacctcacctggcctgggcttcacctgacctggacctcacctggcctcgggcctcacctgcacctgctccaggtcttgctggagcctgagtagcactgaggctgtagggactcatccagggttggggaatgactctgcaactctcccacatctgacctttctgggtggaggcacctggtggcccagggaatataaaaagccccagaatgatgcctgtgtgatttgggggcaatttatgaacccgaaaggacatggccatggggtgggtagggacagtagggacagatgtcagcctgaggtgaagcctcaggacacaggtgggcatggacagtgtccacctaagcgagggacagacccgagtgtccctgcagtagacctgagagcgctgggcccacagcctcccctcggggccctgctgcctcctcaggtcagccctggacatcccgggtttccccaggcctggcggtaggtttgaagtgaggtctgtgtcactgtggtattactatgatagtagtggttattactaccacagtgtcacagagtccatcaaaaactcatgcctgggagcctcccaccacagccctccctgcgggggaccgctgcatgccgtgttaggattttgatcgaggacacggcgccatgggtatggtggctaccacagcagtgcagcccatgacccaaacacacggggcagcagaaacaatggacaggcccacaagtgaccatgatgggctccagcccaccagccccagagaccatgaaacagatggccaaggtcaccctacaggtcatccagatctggctccaaggggtctgcatcgctgctgccctcccaacgccaaaccagatggagacagggccggccccatagcaccatctgctgccgtccacccagcagtcccggaagcccctccctgaacgctgggccacgtgtgtgaaccctgcgagccccccatgtcagagtaggggcagcaggagggcggggctggccctgtgcactgtcactgcccctgtggtccctggcctgcctggccctgacacctgagcctctcctgggtcatttccaagacattcccagggacagccggagctgggagtcgctcatcctgcctggctgtcctgagtcctgctcatttccagacctcaccagggaagccaacagaggactcacctcacacagtcagagacaacgaaccttccagaaatccctgtttctctccccagtgagagaaaccctcttccagggtttctcttctctcccaccctcttccaggacagtcctcagcagcatcacagcgggaacgcacatctggatcaggacggcccccagaacacgcgatggcccatggggacagcccagcccttcccagacccctaaaaggtatccccaccttgcacctgccccagggctcaaactccaggaggcctgactcctgcacaccctcctgccagatatcacctcagccccctcctggaggggacaggagcccgggagggtgagtcagacccacctgccctcaatggcaggcggggaagattcagaaaggcctgagatccccaggacgcagcaccactgtcaatgggggccccagacgcctggaccagggcctgtgtgggaaaggcctctggccacactcaggggctttttgtgaagggccctcctgctgtgtgactacggtggtaactcccacagtgatgaaaccagcagcaaaaactgactggactcgcagggtttatgcacacttctcggctcggagctctccaggagcacaagagccaggcccgagggtttctgcccagaccctcggcctctagggacacccgggccatcttagccgatgggctggtgccctgcacaccgtgtgctgccaaacaggggcttcagagggctctgaggtgacttcactcatgaccacaggtgccctggtcccttcactgccagctgcaccagaccctgttccgagagatgccccagttccaaaagccaattcctggggccgggaattactgtagacaccagcctcattccagtacctcctgccaattgcctggattcccatcctggctggaatcaagagggcagcatccgccaggctcccaacaggcaggactcccacacaccctcctctgagaggccgctgtgttccgcagggccaggccgcagacagttcccctcacctgcccatgtagaaacacctgccattgtcgtccccacctggcaaagaccacttgtggagcccccagccccaggtacagctgtagagagagtcctcgaggcccctaagaaggagccatgcccagttctgccgggaccctcggccaggccgacaggagtggacgctggagctgggcccacactgggccacataggagctcaccagtgagggcaggagagcacatgccggggagcacccagcctcctgctgaccagagacccgtcccagagcccaggaggctgcagaggcctctccagggggacacagtgcatgtctggtccctgagcagcccccaggctctctagcactgggggcccctggcacagctgtctggaccctccctgttccctgggaagctcctcctgacagccccgcctccagttccaggtgtggttattgtcagggggtgccaggccgtggtagagatggctacaattaccacagtggtgccgcccatagcagcaaccaggccaagtagacagacccctgccacgcagccccaggcctccagctcacctgcttctcctggggctctcaaggctgctgtctgccctctggccctctgtggggagggttccctcagtgggaggtctgtgctccagggcagggatgactgagatagaaatcaaaggctggcagggaaaggcagcttcccgccctgagaggtgcaggcagcaccacagagccatggagtcacagagccacggagcccccagtgtgggcgtgtgagggtgctgggctcccggcaggcccagccctgatggggaagcctgccccgtcccacagcccaggtccccaggggcagcaggcacagaagctgccaagctgtgctctacgatcctcatccctccagcagcatccactccacagtggggaaactgagccttggagaaccacccagccccctggaaacaaggcggggagcccagacagtgggcccagagcactgtgtgtatcctggcactaggtgcagggaccacccggagatccccatcactgagtggccagcctgcagaaggacccaaccccaaccaggccgcttgattaagctccatccccctgtcctgggaacctcttcccagcgccaccaacagctcggcttcccaggccctcatccctccaaggaaggccaaaggctgggcctgccaggggcacagtaccctctcttgccctggctaagacagggtgggcagacggctgcagataggacatattgctggggcatcttgctctgtgactactgggtactggctctcaacgcagaccctaccaaaatccccactgcctcccctgctaggggctggcctggtctcctcctgctgtcctaggaggctgctgacctccaggatggcttctgtccccagttctagggccagagcagatcccaggcaggctgtaggctgggaggccacccctgtccttgccgaggttcagtgcaggcacccaggacaggaaatggcctgaacacagggatgactgtgccatgccctacctaagtccgcccctttctactctgcaacccccactccccaggtcagcccatgacgaccaacaacccaacaccagagtcactgcctggccctgccctggggaggacccctcagcccccaccctgtctagaggagttggggggacaggacacaggccctctccttatggttcccccacctggctcctgccgggacccttggggtgtggacagaaaggacgcctgcctaattgtcccccaggaacccagaacttctctccagggaccccagcccgagcacccccttacccaggacccagccctgcccctcctcccctctgctctcctctcatcactccatgggaatccagaatccccaggaagccatcaggaagggctgaaggaggaagcggggccactgcaccaccgggcaggaggctccgtcttcgtgaacccagggaagtgccagcctcctagagggtatggtccaccctgcctggggctcccaccgtggcaggctgcggggaaggaccagggacggtgtgggggagggctcagggccctgcaggtgctccatcttggatgagcccatccctctcatccaccgacccgcccacctcctctccaccctggccacacgtcgtccacaccatcctgagtcccacctacaccagagccggcagagccagtgcagacagaggctggggtgcaggggggccgccagggcagctttggggagggaggaatggaggaaggggaggtcagtgaagaggcccccctcccctgggtctaggatccacctttgggacccccggatcccatcccctccaggctctgggaggagaagcaggatgggagaatctgtgcgggaccctctcacagtggaatacctccacagcggctcaggccagatacaaaagcccctcagtgagccctccactgcagtgctgggcctgggggcagcccctcccacagaggacagacccagcaccccgaagaagtcctgccagggggagctcagagccatgaaggagcaagatatggggaccccaatactggcacagacctcagctccatccaggcccaccaggacccaccatgggtggaacacctgtctccggcccctgctggctgtgaggcagctggcctctgtctcggacccccattccagacaccagacagagggacaggccccccagaaccagtgttgagggacacccctgtccagggcagccaagtccaagaggcgcgctgagcccagcaatggaaggcccccaaacaaaccaggaggtttctgaagctgtctgtgtcacagtcgggtatagcagcggctaccacaatgacactgggcaggacagaaaccccatcccaagtcagccgaaggcagagagagcaggcaggacacatttaggatctgaggccacacctgacactcaagccaacagatgtctcccctccagggcgccctgccctgttcagtgttcctgagaaaacaggggcagcctgaggggatccagggccaggagatgggtcccctctaccccgaggaggagccaggcgggaatcccagccccctccccattgaggccatcctgcccagaggggcccggacccaccccacacacccaggcagaatgtgtgcaggcttcaggctctgtgggtgccgctagctggggctgccagtcctcaccccacacctaaggtgagccacagccgccagagcctccacaggagaccccacccagcagcccagcccctacccaggaggccccagagctcagggcgcctgggtggattctgaacagccccgagtcacggtgggtatagtgggagctactaccactgtgagaaaagctatgtccaaaactgtctcccggccactgctggaggcccagccagagaagggaccagccgcccgaacatacgaccttcccagccctcatgacccccagcacttggagctccacagtgtccccattggatggtgaggatgggggccggggccatctgcacctcccaacatcacccccaggcagcacaggcacaaaccccaaatccagagccgacaccaggaacacagacaccccaataccctgggggaccctggccctggtgacttcccactgggatccacccccgtgtccacctggatcaaagaccccaccgctgtctctgtccctcactcagggcctgctgaggggcgggtgctttggagcagactcaggtttaggggccaccattgtggggcccaacctcgaccaggacacagatttttctttcctgccctggggcaacacagactttggggtctgtgcagggaggaccttctggaaagtcaccaagcacagagccctgactgaggtggtctcaggaagacccccaggagggggcttgtgccccttcctctcatgtggaccccatgccccccaagataggggcatcatgcagggcaggtcctccatgcagccaccactaggcaactccctggcgccggtccccactgcgcctccatcccggctctggggatgcagccaccatggccacaccaggcagcccgggtccagcaaccctgcagtgcccaagcccttggcaggattcccagaggctggagcccacccctcctcatccccccacacctgcacacacacacctaccccctgcccagtccccctccaggagggttggagccgcccatagggtgggggctccaggtctcactcactcgcttcccttcctgggcaaaggagcctcgtgccccggtcccccctgacggcgctgggcacaggtgtgggtactgggccccagggctcctccagccccagctgccctgctctccctgggaggcctgggcaccaccagaccaccagtccagggcacagccccagggagccgcccactgccagctcacaggaagaagataagcttcagaccctcagggccgggagctgccttcctgccaccccttcctgccccagacctccatgccctcccccaaccacttacacacaagccagggagctgtttccacacagttcaaccccaaaccaggacggcctggcactcgggtcactgccatttctgtctgcattcgctcccagcgcccctgtgttccctccctcctccctccttcctttcttcctgcattgggttcatgccgcagagtgccaggtgcaggtcagccctgagcttggggtcacctcctcactgaaggcagcctcagggtgcccaggggcaggcagggtgggggtgaggcttccagctccaaccgctccactagccgagactaaggaagtgagaggcagccagaaatccagaccattccatagcaaatggatttcattaaagttaccagacttcagtgtaagtaacatgagccccatgcacaacaatcccttatgaaggggaagtcagtgtcgcctcggatttcttgaaaaacacaaaaacttatcaatgcctgtaaaagtctgttggaaagaaaatatgattcaagaatgttatgcccaacaaagctggcatattttctacccggacacactcagggaatgtggtcgcttgagtgcttctctcactgcgtaaatcctacgtggtgtttaagcatattcataaatgtgtatgtctatttttatgtgtaagatggttcatttttattttatttattcaatatgtacaataaagaatattgacaaataggctggacatggtggctcccacctgtaatcccagccctttgggaggccgaggcgggcagatcacctgaggtctggagttcgagaccagcctggccaacatgatgaaaacccatctctactaaaaatacaaagattagccaggcatggtggtgcatgcctgtaatcccagccactcaggaggctgagacaggagaaatgcgtgaacccggaaggcggaggttgcagtgagccgagatcacaccactgcactccagcctggcgacagagcaagattccatctcaaaaaaaaaagacaaagaaatttgtttttttgaataaagacaaatttcatcacacgaagataaagatgcaaagctccagacaggaaggcacggacagcacagtgaagcctggagcgggcgctggggggccaggggcatggcgggggtgccagcgtctctcagtgcctaccatggccactccagcctgtgttctcacgaggatggctgtgcaatgctaggagcgtgttcgaagctctagggcaaccactggaagtgaggctgaggagcagagcccagaggcccgtggagctgatgaaaagaaagctggagaaagtgtttgctgcctcccaacatggtaagaaaagatagaaagagagagcacacggcaaagggagcttgctgagggactctttacaatggcttgcacagagctcagggggtctgggaggctagggccctgcgcagggcagtcaccccagcctgctgaccaaggtttgctgcaggcagctctgggggtggttgaggcgcggtccctggagccacccctcaagggaacgaggcagcagagtgggccaaggcccaggtcggctgcaaggctgcccaggacttggggtccttacatcagcagccactgatgcagctggcccagagagaggcgccgagcaggttgcctccaggggacaaaccaggtcggagagggtgaggcagtggatggagccacaacaaccccgggcacgggtgacacgcacgttcatgcacatctgacccttcctccctcaccaaacaggtccccctgccttccccatggttgcgaaaaagcaaaatgtagacgttttttcttttttaattcatgttttaattgacaaatgaagccgtatatatttattgtgtacaacatgatgctttaaaatatgtatacatcgtggaacagcaacgtcgagctaatttaacacgcattacttcacatacttgtcatcttttgtggcgagaatgcttaaaatccactctcttagtattttttaagaatgcaatacattgttgtcaactgtggtcaccgtcatgcatagccaagctcccgacctcaccctcctgccagctcaggctgtgcatcctttcaccagcatcccccaccccggcccctggccctggtaactaccactctatactctacgtatgagttcagctttttaagattccacagatgaatgagatcatacagtatttgctttctatgcctggcttattttagttaacacactgtcctccagatccatccgttgttgcaaatgacagggtttcattctttttaaagtctaaagagtattccattgtgtcaatggacctcatttgctttatccatgcatcaactatggacatttaggttgattccatttcttagctgttgtggatggtgctgcagtaaacatggggctgcagatgtctcttcaacatactgacatcatgtcctttggataaatacccagtagtgggatcgctggatcacaatgtacagttttttttttaatggaaactttcattttttggtgaaattaggaaaacagataaaacccacagaatccaaaatatatgtgaagatgccaaaaacagttgacattgggcagaggtcacatggaaggaagtgaatacatgacggggtgtgagggcccagaggcagctgaaatacgctttctaaacacaaggacctcttctgagagggcagaagttttatcctgcacatgcaatgaccagcacagctaaaatacactttctaaacatgaggacctcttctgagagggcagctttatcctgcaaatgcaatgaccagcacaggacccagaataaagagagttgccagcggacgcctggtgtccatgtgtccaggtgagttcgagatgcggacggcgctggccagccagtcacaccctaagtcaatctgctgcatgcatttgtccttgccacagcagaaaacgagaaagcctttgggctgcaaagcttcacaggctcctcttctcccgactccatggaaacagctacaaagagcaggcccagtagagcttaattcatgaaaatgagtaataaacttgaactggaacagtatcgactttttagaaacggcagcaaagtgtataaaaaatattcaccagaacaatatttccaaacgatgagatgagaatttcagccaagtaatcctccatggatagaaaataatgaagggattggatttatgaaggaaaatcatggagctcaaatacaagagaagagaatcaaaaatgaacaggaggagataaaatatggtttggccaaagttacaaaataaattttttaaaaacccttcatcatggcaagtagaaagagcgagaggaaaaacagatcccgtggaagacacaaataggacatggggagaaaaatgaatgagatgaaacagagcagaaataaaattttacggaactaaagacaagtgatctgaacctgcctggggcctgggggacctcgccaccctgaagggaaagaacatgcctggctggctttgccacctgctcattgcagagccccacagcttgcaacaaacataggcggtagccagggagtggttacagcaggccttgagcaagacccagtgttgtgctgacttcaggtctgacccagcactgtcatagtggtggtgtccatagtggtagtgggggtgcttgtgtcactccacccccatctccaggaggctcagaacagacagagagagactccatttgtttgggagaaagtaagggatgagaacaagagtctctgcctggtaatccagagaattattctagatcttggccaagattatcaaagcagtacctctatgagtcttttgggcttggagtccccctaaagcagatatagctaagatcacaacacccaagtccttttgaatatgtgggaagacttcccaaggacaggagcaaacaaacaagcccagactgcaaaaaaacaagcccagactgcaataaacacctcactcttcaatgcccaggcactgaagaacatctcctagcagcaacaccatccaggaaaacatggcctcaaccagtgaactaaataaggcaccagggaccagtctcggagaaatagaggtatgttatctttcagagaattcaaagtagctttgttgaggaaactcaaagaaattcaagataacacagtgaaggaattcagaatcctatccgataaatttaacagagattgaagcaattaaaaagaattaagcagaaattatggagctgaaaaatgcaattggcatactgaaaaatgcatcagagtattttcatagcctcatatatcaagtagaagaaagaattagtgagcttgaaaacaggctatttggaaaagcacgataaaaggagacaaaagagaaaagaataaataacaatgaagcatatctacaggatctagaaaatagcctcaaaaggccaaatctaagaattattagccttaaagaggaggtagagaaagagggatggagagtttattcaaagggataataacagaaaacttcccaaacctagagaaagatatcaatatccaaatgcaagaaggatgtagtacaccaaggagatttaatgcaaagaagactacctcaaggcattcaatactcaaactcccatatgacaaggactttaaaaagatcctaaaagcagcaaaagaaaagaaatgaataaaatactatggagctccaatatgtctggcagcagacttttcagtgaagactttatatgccaggagagagtgtcataatggatttaaagtgctgaaggaaaaaacttttaccctcgaacagtatagctggtgaaattatccttcaaacatgaaggagaaataatttgtttccagacaaatgttgagggatttcatgaacaccagacctgtcttttaagaaatgctaaagggagtacttcaatcagaaagaaacacgttagtgaacaataagaaatcatctgaaggcacaaaactcaccggtaatagtaagtacacagaaaaacacagaatattataacactgtaactgtggtgtgtaaactccttttgtttgtttgtttgtttgtttgtttgtttgtttttgtttttagacggagttttgctccagcccaggctggagtgcaatggcacaatctcagctcactgcaacttccacctcctgggttcaagcaattctcctgcctcagcctcccaagtagctgggattacaggcatgtgctaccatgtccagctaattttgtattttagtagagacggtgtttcaccatgttggtcaggctagccttatcttgagtagaaaaactaaatgatgaagcaatgaaaaataataactacaacttttcaagacatagtacaataagatataaatcataacaaaaagttaaaaggtggagggatgaagttaaggcatagagtctttattagttttctttttacttgtctgtttatgcaaacagtgttaagttgtcatcagtttaaaataatgggtcataagatactatttgcaagcctcatggtaacgtcaaaccaaaagcaatacaacagatacacaaaaaacaaaaagcaagaagctaaattacgtcatcagagaaaatcaccttcactaaaaggaagacggagaaaagaatgaagagagagaagaccaaaagcaaatagcaatatggcaggagtaagtccttacttatcaataataccattgaatgtaaatggactaaactctccaatcaaaagacatagagtggctgaatcaattaaagaaaaaacaagacccattgatctgttgtccacaagaaacacactttatctataaagacacacatagactgaaaacaaagggatggaaaaagatactccacgccaatggaaaccaaagaaagagcaggagtagctacacttatatcaggcaaaatagatttcaagacaaaaactataagaagagacaaggtcactaatgataaacaggtcaattcagcaagaggatataacaattgtaaatatatatgcacccaatgctggagcacccagatatataaagcaagtatttactagagctaaagagagaaatagactccaatgcaataatagctggagatttcaacatcccactttcaacattgaacagatcctccagatagaaaatcaacaaagaaatattggacttaatctgcactatcgaccaaatggatctaacagatatttacagaacatttcatccaacagctgcagaacacacattcttttcctcagcacatagatcattctcaaggatagaccatatgttgggtcacaaaacaagttttaaaatattcaaatacattgaaataatatcaagcatcttctgtgaccacaatggactaaaactagaaatcaataacaagaggaattttggaaactatataaatatatggaaattaatgaatgctgagtgggtcaatgaagcaattaagaaggaaactgaaatttttcttggaacgaatgatcatggaaacagaaaataccaaaacctatgggatacagcaaaagcagtactaagagggaagtttacagctacaaatgcttacattaaaaaagaagaaaaacttcaataaaaaaacctaacaatgcatcttaaagaactagaaaagcaagaggaaatcaaatccaaaattagtagaagaaaacagtaaaggtcagagcagaaataagtaaaattgaaatgaagaaaacaatacaaaagatcaataaaacaacaggttgttttcttgaaaagttaaacaaaattgacaaacctttagccagactaagaaaaaaagacagaagatccaaataaataaaatcagagatgaaaaaggtgacattacaacttacaccacagaaattcaaaggatcattagtggctactataagcaactatatgccaataaattggaaaatctagaagaaatgcagaaattcctagacacatacaacctcccaagattaaaccaagaagaaattcaaaacctgaacagactgataacaagtaatgagatcaaagccgtaataaaaagcctcccagtaaagagaagcccaggacccgacggcttcactgctgaattctaccaaacatttaaagtagaactaataccaatcctactcaaactattccaaaaaatagaggtggaaggaatacttcaaaactcattatacgaggccagtattaacctgacaccaaaactagacaaagacacatgaaaaaaagaaaactacaggccaatatgtctgatgaatattgacacaaaaatcctcaacaaaatactagcaaaccaaattcaactacacattagaaagttcactcatcatgaccaagtggaatttatctaacttgggatgcaaagatggttcaacatatgcaaatcaatcaatgtgatacatcatatcaacagaatgaacaacaaaaaccatttgatcatttaattgatactgaaaaagcatttgataaaattcaacattccttcataataaaaattctcttctatactaggtacaaaagaaacttacctcaacataataaagccatatatgacagtcccacagtatgatactaaatgaggaaaaactgagagcctttcctctacgatctggaacatgacaaagatgcccactttcatcactgttattcaacatagtactggaagtcctagctggagcgatcagacaagagaaagatataaaaggcatccaaattggaaaggaataagtcaaattatcctcatttgcatatggtatgatcttctatttagagctaactaaagactccaccaaaaaaagttattagaactgacgaacaaattcagtaaagctgcaggatacaaaatcaacatacaaaaatcagtagcatttctatatgccaacaatgaccaatgtgaaaaagaaattaaaaagtaaccctatttacaataaccacaaataaacacctaggaattaaccaaagaggtaaaagatttctgtaatgaaaactataaaacactgatgaaagaaattgaagagtacaccaaaaaatggaaagcaattgcatgttcatggattagaagaatcagtgttgttataatgtccatactatccaaagcaatctacagattcaatgcaatccttatcaaaataccaatgacatcattcacagaaatagaaaaaaaaaatcctaaaatttacgtggaaccacaaagacccagaatagccaaagctctcctaagcaaaaagaacgaaactgtaggaatgacattgcctgtcttcaaattctactacagagctatagatagtaaccaaaacagcgtggtactagcataaaaacagacacagagacaaacagaacaaaatttaaaaacccagaaataaatccacacacctacagcaaattcatttttgacaaagttgccaagaacatactctggggaatagataatgatatctcttcaataaataatgtggggaaaactggatatccatatacataacagtgaaactagacccctctctctctcactatatacaaaaatcaaatcaaaattgtttaaggacttaaatctaagacctcatactatgaaaccactgcaagacaaccttggcggaaactctccaagacatcagtccaggcaaagatttcttgagtaatatcccacaagcacagacaaccaaagcaaaaatggacaaatgggatcacatcaagttaaaaagcttctgcacagtaagggaaacaaccaacaaaatgaagagacaacccacagaatgggagaaaatatttgaaaaatacccatctggcaagggattaaaaaccagaatatatgcagaatatataaggagctcaaacagtgctatagaaaaaaaaatctaataatctgatttaaaaatgggaaaaatgttagaatagacatttcttaaaataagacatacagatggcaaaccgacatggaacggtgctcaacatcatggattatcacagaaacacaatcaatcaaaactaaaactaaaatgtgctatcatctcaccccagttaaaatggctgatatccagaagacaggcaataacaaatgctggcaaggatgtggggaaaagggagcccccatacactgttgctgggattgtaaattagtacaaccactgtggagagcagcatgaaagttcctcaaaaaactgaaagaaagctaccataggatccagcaatcccactgctgtgtatatactacaaaagaaaggaagtcagtatatgaagaggtatctgcactcccatgtttgttgcagccctgttcacaacagccaagatttggaagcaacctaagtgtccatcagcagttgaatgtataaagaaaatgtggtgcatatacacaatggagtattattcaataataaaaaggaatgagattgagtcatttgcaacaacatggatggaactggagatcattatgtgaagtgaaataagccaggcacagaaagacaaacattacaatgttcttacttattaatgagatctaaaaatcaaaacaattgcacccatgttcataaagagtaaaaggatggttaccagatgctgagaacggtggtggggggatagggaaaggtggcagtggttaacgggtacaaaaaaatagaaagaatgaataagacttactacttgatagcacagcaaggtggctatagtcagtaatttagttgtatatttttaataatgaaaggtgtataattggattgtttctaacacaaaggataatgcttaagaggatggataccccattttccatgatgtgattatttcacattgcacgcctagatcaaaacatccaatgtaccccataaatatatacatcttctatgtacccataaaaattctgtaaaataaaatatataaaaagaggtgacagatatggaagacaggcaaagaagagacgacatccacataatccgagtacctaagaaagaatggagtccagtgcatctcaggagccaccattctaagccaattttctctggttctctcagtcaccctaccaatacgtgggcaatcttgttttatttcaggatagagtttttgaaattatagatttaagtatgctttctgttctattacttttggtaattaattttagaaagaactaatttgggcacaaatttgaaaaaattctaaatccaaaaaaaaaaagaaaaaaacacacacacaatcatctataagggggatgatgaccagtcctagatttctcaccagccacattcaagatcagtaaatggtaggacaaaacctgtagggtccttaagggggaaagaagtagtggatagtccagagtctatatacagccaactgttcttgaagaaaaaaggctgctgaaaaggagttccaaacattctataatccataatctcatgatgaaactactagaggaagaccaccagccatcaaaaggtgcttggagaacccagggccaagaaccaaaagtaaatattaagtgtccttaactgcgagactaagatagaaatgactgtgggggaccatgtggcctcaacagaggtgaaatggtgtctgcctgacaaagtggacattttacaatgatcaaaacacagaatatgagatagagagcacttctgaattactgcctcactccaaataactctcagccaaaggacttcagtaaaaccaaattgggcatattagacagtacaaacaaattctaagaaaataatattactgattacaatcacatgatgctagagatggaggggaaaaggaagaggaaaccaggtaatttcatactcgtatatagtaaagaactaaagtacattgtccaaagaagaacaaagaatattttggaaagttataaaggtagccactacacatagaagatagcaaagaacaagaaaacttaagatggaaaactttttggaagcataaaaatagaaaatataaactactaagataagattgaagccaaacagatctatgaaaacaacaaacatcaatggccttaacttgcctattaaaaggaagagactttcaaattggaccacaagataaaacccaactctatatagcatatgagtattacacacaaaatgggaaaagctgaaaaaacttgggcaaaattcaccccaagcaaattccactgtttcctttgggacaaaatgccaagctccatgccagggaagatgattctcctcagaccttctcctcactctcccagtcctcttagggaaggaattgggtgttagaggagggagactctgtcgattatcagctgaagcagtggtgtgctcctgcgttgcttctgacctgggaaatgaagcagcaagactctttctgctgtgtctttgcccagaagggccatccccccagagcagagtacccaggccggcaggagcagtggtggaagcgtggaaaccacgtctcctacagcagagaccatcagaagcggagcctcgggtataagggaaacaacgcgttctccctaacctgggagtgacagacagcgtcattcctcacagtgataccctgtgttctagccatctggcccatgacagagccagcccagagccagcccagagccagcccctcaccaacctggagcctggccagctcgccaagctgcaccataggcctggaaggcgtggagacctgcggcagtgccctgtcctcccgtgaggcctgccatccctgccaggggtcgcctctggcttctccttctccaggaccgcacggtccagaggctcagtgcctggagtaggtgttgcccccctgcttctaggcccagaccctcccttgttcctgaccccgggcctttccctctggcttggacatccagggccctgtctcagctggggagctgctcctgctcaaggactgtcttccgcgggatcgaaaggccgcgtcctgaacaatgcgtgggccacgtgagcggagcaggctctaaaggccgcgtcctaaacagtgcgtgggccacgtgagcggagcaggctctaaaggccgcgtcctaaacagtgcgtgggccacgtgagcggagcaggctctaaaggccgcgtcctaaacagtgcgtgggccacgtgagcggagcaggctctaaaggccgcgtcctaaacagtgcgtgggccacgtgagcggagcaggctctaaaggccgcgtcctaaacagcgcgtgggccacgtgagcggagcaggctctaaaggccgcgtcctaaacagtgcgtgggccacgggagcggagcagactctaaaggccgcgtcctaaacagtgtgtgggccacgtgagcggagcgccctctccactgccctcggggccgcagctcccagctcagctcccagccctgctcagggcagccaggccaggaggtaccatccaggctaagtgaccctcaggggggacaggtgccccaggagatgccagctgttgggagaggctgggggaccaactcgacctggcctgtgggccctgccctggccacccattgtaggatccagccgccacgcctgtgacactcgtgtgctttccctggtgtgtgcttgtggcaggtgggggcagagggtcctcaggccagagagccactcccccagcgccagaccaccctcttcctcactcccccacctcaccccctcacaggtgcctcccaggccatcagggcccaaccacccctaaacaaatgggttctcggcccctcgtggctggaggtgggttctctcaccattcccagcctaagactccatccccatgctggcagctgttcaaccatgtctagagagatccactgtcccagacagcacctcagggtcccccgtcctgcctggaaccctgtaggaaactccacaaaccgccgccattctgtccacacccctacaggagccccaaccctctccccacatccaggcttccctcccagacccctcatccctgcccgcacggtgcctgagggggccttcttgggcagcgcctaagcaagcccccagcacccttcggccccttcaaggcacacaggccccctttccacccagcctcaggaaaccacctgtgtcctccaacgacaggtcccagcctcccagcctttgccttgcctgttcctctccctggaactctgccccgacacagaccctccccagcaagcccgcagggcacctcccctgcccccagacaccctgtgcccatcagttcatccccagcagaggccctcaccaggcacacccccatgctcacacctggccgcaggcctcagcctccctgagggccccacccagcccgcgtctggccagtggtgcgtgcaaagcccctcacccagactcggcggaaggcagccagtgcaggcctggggaggggctctccttagaccaccttgcaccttccctggcacccaccatgggaagagctgagactcactgaggaccagctgaggctcagagaagggacccagcactggtggacacgcagggagcccacgccagggcgccgtggtgagtgaggcccagtgccacccactgaggcctcccgttcagtgggacgacggtgaacaggtggaaccaaccaggcaacccccgccgggccccacagacgggatcagagcaggaaaggcttcctgcccctgcaggccagcgaggagccctggcgggggccgtggccctccaggcgaggaggctcccctggccaccgccacccgggcctctctgctgctgggaaaacaagtcagaaagcaagtggatgagaggtggcgtgacagacccagcttcagatctgctctaatttacaaaagaaaaggaaaaacacacttggcagccttcagcactctaatgattcttaacagcagcaaattattggcacaagactccagagtgactggcagggttgagggctggggtctcccacgtgttttggggctaacagcggaagggagagcactggcaaaggtgctgggggcccctggacccgacccgccctggagaccgcagccacatcagcccccagccccacaggccccctaccagccgcagggttttggctgagctgagaaccactgtgctaactggggacacagtgattggcagctctacaaaaaccatgctcccccgggaccccgggctgtgggtttctgtagcccctggctcagggctgactcaccgtggctgaatacttccagcactggggccagggcaccctggtcaccgtctcctcaggtgagtctgctgtctggggatagcggggagccaggtgtactgggccaggcaagggctttggcttcagacttggggacaggtgctcagcaaaggaggtcggcaggagggcggagggtgtgtttttgtatgggagaagcaggagggcagaggctgtgctactggtacttcgatctctggggccgtggcaccctggtcactgtctcctcaggtgagtcccactgcagccccctcccagtcttctctgtccaggcaccaggccaggtatctggggtctgcagccggcctgggtctggcctgaggccacaccagctgccatccctggggtctccgccatgggctgcatgccagagccctgctgtcacttagccctggggccagctggagcccccaaggacaggcagggaccccgctgggcttcagccccgtcagggaccctccacaggtagcaagcaggccgagggcagggacgggaaggagaagttgtgggcagagcctgggctggggctgggcgctggctgttcatgtgccggggaccaggcctgcgctttagtgtggctacaagtgcttggagcactggggccagggcagcccggccaccgtctccctgggaacgtcacccctccctgcctgggtctcagcccgggggtctgtgtggctggggacagggacgccggctgcctctgctctgtgcttgggccatgtgacccattcgagtgtcctgcacgggcacaggtttgtgtctgggcaggaacagggactgtgtccctgtgtgatgcttttgatatctggggccaagggacaatggtcaccgtctcttcaggtaagatggctttccttctgcctcctttctctgggcccagcgtcctctgtcctggagctgggagataatgtccgggggctccttggtctgcgctgggccatgtggggccctccggggctccttctccggctgtttgggaccacgttcagcagaaggcctttctttgggaactgggactctgctgctggggcaaagggtgggcagagtcatgcttgtgctggggacaaaatgaccttgggacacggggctggctgccacggccggcccgggacagtcggagagtcaggtttttgtgcaccccttaatggggcctcccacaatgtgactactttgactactggggccagggaaccctggtcaccgtctcctcaggtgagtcctcacaacctctctcctgctttaactctgaagggttttgctgcatttctggggggaaataagggtgctgggtctcctgccaagagagccccggagcatcctggggggctcaggaggatgccctgaggcaacagcggccacacagacgaggggcaagggctccagatgctccttcctcctgagcccagcagcacgggtctctctgtggccagggccaccctaggcctctggggtccaatgcccaacaacccccgggccctccccgggctcagtctgagagggtcccagggacgtagcggggcgccagttcttgcctggggtcctggcattgttgtcacaatgtgacaactggttcgacccctggggccagggaaccctggtcaccgtctcctcaggtgagtcctcaccaccccctctctgagtccacttagggagactcagcttgccagggtctcagggtcagagtcttggaggcattttggaggtcaggaaagaaagccggggagagggacccttcgaatgggaacccagcctgtcctccccaagtccggccacagatgtcggcagctggggggctccttcggctggtctggggtgacctctctccgcttcacctggagcattctcaggggctgtcgtgatgattgcgtggtgggactctgtcccgctccaaggcacccgctctctgggacgggtgccccccggggtttttggactcctgggggtgacttagcagccgtctgcttgcagttggacttcccaggccgacagtggtctggcttctgaggggtcaggccagaatgtggggtacgtgggaggccagcagagggttccatgagaagggcaggacagggccacggacagtcagcttccatgtgacgcccggagacagaaggtctctgggtggctgggtttttgtggggtgaggatggacattctgccattgtgattactactactactactacatggacgtctggggcaaagggaccacggtcaccgtctcctcaggtaagaatggccactctagggcctttgttttctgctactgcctgtggggtttcctgagcattgcaggttggtcctcggggcatgttccgaggggacctgggcggactggccaggaggggacgggcactggggtgccttgaggatctgggagcctctgtggattttccgatgcctttggaaaatgggactcaggttgggtgcgtctgatggagtaactgagcctgggggcttggggagccacatttggacgagatgcctgaacaaaccaggggtcttagtgatggctgaggaatgtgtctcaggagcggtgtctgtaggactgcaagatcgctgcacagcagcgaatcgtgaaatattttctttagaattatgaggtgcgctgtgtgtcaacctgcatcttaaattctttattggctggaaagagaactgtcggagtgggtgaatccagccaggagggacgcgtagccccggtcttgatgagagcagggttgggggcaggggtagcccagaaacggtggctgccgtcctgacaggggcttagggaggctccaggacctcagtgccttgaagctggtttccaagagaaaaggattgtttatcttaggaggcatgcttactgttaaaagacaggatatgtttgaagtggcttctgagaaaaatggttaagaaaattatgacttaaaaatgtgagagattttcaagtatattaatttttttaactgtccaagtatttgaaattcttatcatttgattaacacccatgagtgatatgtgtctggaattgaggccaaagcaagctcagctaagaaatactagcacagtgctgtcggccccgatgcgggactgcgttttgaccatcataaatcaagtttatttttttaattaattgagcgaagctggaagcagatgatgaattagagtcaagatggctgcatgggggtctccggcacccacagcaggtggcaggaagcaggtcaccgcgagagtctattttaggaagcaaaaaaacacaattggtaaatttatcacttctggttgtgaagaggtggttttgcccaggcccagatctgaaagtgctctactgagcaaaacaacacctggacaatttgcgtttctaaaataaggcgaggctgaccgaaactgaaaaggctttttttaactatctgaatttcatttccaatcttagcttatcaactgctagtttgtgcaaacagcatatcaacttctaaactgcattcatttttaaagtaagatgtttaagaaattaaacagtcttagggagagtttatgactgtattcaaaaagttttttaaattagcttgttatcccttcatgtgataactaatctcaaatactttttcgatacctcagagcattattttcataatgactgtgttcacaatctttttaggttaactcgttttctctttgtgattaaggagaaacactttgatattctgatagagtggccttcattttagtatttttcaagaccacttttcaactactcactttaggataagttttaggtaaaatgtgcatcattatcctgaattatttcagttaagcatgttagttggtggcataagagaaaactcaatcagatagtgctgaagacaggactgtggagacaccttagaaggacagattctgttccgaatcaccgatgcggcgtcagcaggactggcctagcggaggctctgggagggtggctgccaggcccggcctgggctttgggtctccccggactacccagagctgggatgcgtggcttctgctgccgggccgactggctgctcaggccccagcccttgttaatggacttggaggaatgattccatgccaaagctttgcaaggctcgcagtgaccaggcgcccgacatggtaagagacaggcagccgccgctgctgcatttgcttctcttaaaactttgtatttgacgtcttatttccactagaaggggaactggtcttaattgcttgatgaagagcaggagactcatttatgtgagtcttttgagtgaccattgtctgggtcactcccatttaactttccctaaagcccatttgaaggagaggtcgcacgagctgctccacaacctctgaatggggatggcatgggtaatgatgcttgagaacataccaagccccactggcatcgcccttgtctaagtcattgactgtaggtcatcatcgcacccttgaaagtagcccatgccttccaaagcgatttatggtaaatggcagaattttaagtggcaaattcagataaaatgcatttcttggttgtttccaatgatgactgttatctagagggaatttaaaggcaggggtttactgcagactcagaagggaggggatgctccgggaaggtggaggctctgagcatctcaataccctcctcttggtgcagaagatatgctgccacttctagagcaaggggacctgctcatttttatcacagcacaggctcctaaattcttggtctcattctcaagatgttttaatgactttaaagcagcaaagaaatattccacccaggtagtggagggtggtaatgattggtaatgctttggaaccaaaacccaggtggcgctggggcaggactgcagggaactggggtatcaagtagagggagacaaaagatggaagccagcctggctgtgcaggaacctggcaatgagatggctttagctgagacaagcaggtctggtgggctgaccatttctggccatgacaactccatccagctttcagaaatggactcagatgggcaaaactgacctaagctgacctagactaaacaaggctgaactgggctgagctgagctgaactgggctgagttgaactgggttgagctgagctgagctgagctgggctaagttgcaccaggtgagctgagctgagctgggcttggctgcactaagctgggctgagctgggcagggctgggctgagctgagctgggctgggctgagctgggctgggctgggctgggctgagcgggtctgagcggggctgagctgagctaggctgggctgggctgagctgggctgagctgggctgagctgggctgagcaaggctaggctgagctgggctgagctgagctgggccgagcaaggctaggctgagctgagctgagctgggctgcgctgagctgggctgggctgcgctgagctgggctgggctgagctgggctaggctgggctgagctgggctgagctaggctgggctgggctgggctgagcggggctgagcggggctgagctgagctaggctgggctgagcggggctgagctgagctaggctgggctgggctgggctgagccaagctgaaccgggttgagcgtgctgtgctgggctgagccaagctaggctgagctgagccaagttgagcttagctgggctgagctaacctgggcaaggctgagctgggctgagctaacctggactggggctgagctaacctgggcagagctgagctgggctgagctaacctggactggggctgagctaacctgggcagagctgagctgggctgagctaacctgggctggggctgagctaacctgggctgggctcagctgagctgagctacgctgggctgggctgggctgagccgagctgaactgggctgagcaggctgtgtcgggctgagccaagctgggccgagctcagcagagctgagccgagctgagcttagctgggctgagctaaccagggctgggctgagctgggctgagctgagctgagctgaactgggctgaacgggctgaggcgagcagggccgagctgagcagagctaagccgaggctgggctgggctaacctgggctgggccgagctgagcagagctaagccgaggctgggctgggctaacctgggctgggctgagctgagctgggttgggcagggctgggctgggctgagctaagctgaactagggtgagctgggccgagccaggctggtttgggctgagttgagctgacctggactggggctgagctaacctgggctgggctcagctgagctgagctacgctgggctgggctgggctgagccgagctgaactgggctgagcaggttgtatcaggctaagccaagctgggccaagctcagcagagccaagccgagctgagcttagctgggctgagctaaccagggctgggctgagctgggctgagctgagctgagctgaactgggctgaacgggctgaggcgagcagggccgagctgagcagagctaagccgaggctgggctgggctaacctgggctgggctgagctgagctgggttgggcaaggctgggctgggttgagttgggctgagctaagctgagctagggtgagctgggctgagccaggctggattgggctgagttgagctgacctcaactgagctgacctaggctgagctgagctgagctgaagtaggctgtgctgggctgagctgggatgacctgggctgggctgagctgatttgggctgggttgagcagacctgggctgagccgggttgagctgagctgaaccaggatgagctgggctgagctgagctgggctgggtggtccaggctgggctgacctggaccaggctgggccaggttgagctgggctaagccgagctgagctgagctgagctgggatgatctgggctgggctgggctgggctgagctgacctgggctgggctgggctgagctgagctgagctgagttaagctgagctgagctgaactgggctgtgctgagctaggctgggctgggctgagctgggctgggctgggctgagccagattgtgcctggctgaactgagctgggctaagctgagctgggctgagctgggctgagctgagctgggctgagtggggcggggctgagctgagccggactgggctgggctgggctcagctgagctgagctgaactgggctgggctgaactgggctgggctgagctgagctgaactgggctgggctgaactgggctgggctgagctgagcttggatgagctgggctgaactgggctgggttgagctgggctgggctgagttgagccaggctgatctgggctgagccgagctgggttaagccgagctgggttgggctgggctgggttgggctgggctgagccggactgggttgggctgagctgagctggactgggctgagctgagctggtctgggctggctgagctgagctgtgttgagccaagctaggctgggctgggctgagctgggctgaactgggctgagcggagctgagctgagctgggctgggttgagcagagctgggggctgagctgggctgggctgggctgagttaagctgggctgacctgggctgagttaagctgggctgacctgggctgagctaagctgggttgagccgatccgggctgggctgggctgggctgagccaggctaggttgagctgggctgggctgggctctgctgtgctgtgctgaacagggctgagctgaactgagctgagctgggctgagctgggctctgctgtgctgtgctgagcagggctgagctgaactgagctgagctgggttgagctaagctaggctgggctgggctgagctgggatgagctgggctgggctgggctgggctctgctgtgctgtgctgaacagggctgagctgaactgagctgagctgggctgagctgggctctgctgtgctgtgctgagcagggctgagctgaactgggctgagctgggctgagctgggctgagttgagcagagctgggttgagcagagctgggctgggctgggctgagttgagccaggctgacctgggctgagccaagctgggttgagccaaactgggctgggctgggctgagccaggctggattgagctgggctgggctgggctaagctgagccgagcaaggttgagcgagctgggctgggttgggctgagctgagctgggctgggctgagctgggctgtgctgcactgagctgggctgagctgggttgaactgtgctgagctgagctgggctgtgctgaactatgcttagctgggctgggctatactgggcttagctgggctgggctaaactgggcttagctgggctgggctatactgggcttagctgggctgggctaaactgggcttagctgggctgggctatactgggcttagctgggctgggctgagctgagatggtcttaggtggtctgagctcagctaggctgggctgagctggtctgagctcatctgagttgggctgagctgagcttggctttgctgagctggggtggggtgggctgggctggattgagctggcctgggctgggatgaactggattgagctggcctgggctgggatgaactggaggacatggcactgggccaatcttcatgatcttgttggacatagatggatagcctcagctgagtctacactgcgttccccatcacacccaccctccctatactcactcccaggcctgggttgtctgcctggggagacttcagggtagctggagtgtgactgagctgggggcagcagaagctgggctggagggactctattggctgcctgcggggtgtgtggctccaggcttcacattcaggtatgcaacctgggccctccagctgcatgtgctgggagctgagtgtgtgcagcacctacgtgctgatgcctcgggggaaagcaggcctggtccacccaaacctgagccctcagccattctgagcagggagccaggggcagtcaggcctcagagtgcagcagggcagccagctgaatggtggcagggatggctcagcctgctccaggagaccccaggtctgtccaggtgttcagtgctgggccctgcagcaggatgggccgaggcctgcagccccagcagccttggacaaagacctgaggcctcaccacggccccgccacccctgatagccatgacagtctgggctttggaggcctgcaggtgggctcggccttggtggggcagccacagcgggacgcaagtagtgagggcactcagaacgccactcagccccgacaggcagggcacgaggaggcagctcctcaccctccctttctcttttgtcctgcgggtcctcagggagtgcatccgccccaacccttttccccctcgtctcctgtgagaattccccgtcggatacgagcagcgtggccgttggctgcctcgcacaggacttccttcccgactccatcactttctcctggaaatacaagaacaactctgacatcagcagcacccggggcttcccatcagtcctgagagggggcaagtacgcagccacctcacaggtgctgctgccttccaaggacgtcatgcagggcacagacgaacacgtggtgtgcaaagtccagcaccccaacggcaacaaagaaaagaacgtgcctcttccaggtgagggccgggcccagccaccgggacagagagggagccgaagggggcgggagtggcgggcaccgggctgacacgtgtccctcactgcagtgattgccgagctgcctcccaaagtgagcgtcttcgtcccaccccgcgacggcttcttcggcaacccccgcaagtccaagctcatctgccaggccacgggtttcagtccccggcagattcaggtgtcctggctgcgcgaggggaagcaggtggggtctggcgtcaccacggaccaggtgcaggctgaggccaaagagtctgggcccacgacctacaaggtgaccagcacactgaccatcaaagagagcgactggctcagccagagcatgttcacctgccgcgtggatcacaggggcctgaccttccagcagaatgcgtcctccatgtgtggccccggtgagtgacctgtccccaggggcagcacccaccgacacacaggggtccactcgggtctggcattcgccaccccggatgcagccatctactccctgagccttggcttcccagagcggccaagggcaggggctcgggcggcaggacccctgggctcggcagaggcagttgctactctttgggtgggaaccatgcctccgcccacatccacacctgccccacctctgactcccttctcttgactccagatcaagacacagccatccgggtcttcgccatccccccatcctttgccagcatcttcctcaccaagtccaccaagttgacctgcctggtcacagacctgaccacctatgacagcgtgaccatctcctggacccgccagaatggcgaagctgtgaaaacccacaccaacatctccgagagccaccccaatgccactttcagcgccgtgggtgaggccagcatctgcgaggatgactggaattccggggagaggttcacgtgcaccgtgacccacacagacctgccctcgccactgaagcagaccatctcccggcccaagggtaggccccactcttgcccctcttcctgcactccctgggacctcccttggcctctggggcatggtggaaagcacccctcactcccccgttgtctgggcaactggggaaaaggggactcaaccccagcccacaggctggtccccccactgccccgccctcaccaccatctctgttcacaggggtggccctgcacaggcccgatgtctacttgctgccaccagcccgggagcagctgaacctgcgggagtcggccaccatcacgtgcctggtgacgggcttctctcccgcggacgtcttcgtgcagtggatgcagagggggcagcccttgtccccggagaagtatgtgaccagcgccccaatgcctgagccccaggccccaggccggtacttcgcccacagcatcctgaccgtgtccgaagaggaatggaacacgggggagacctacacctgcgtggtggcccatgaggccctgcccaacagggtcaccgagaggaccgtggacaagtccaccggtaaacccaccctgtacaacgtgtccctggtcatgtccgacacagctggcacctgctactgaccctgctggcctgcccacaggctcggggcggctggccgctctgtgtgtgcatgcaaactaaccgtgtcaacggggtgagatgttgcatcttataaaattagaaataaaaagatccattcaaaagatactggtcctgagtgcacgatgctctggcctactggggtggcggctgtgctgcacccaccctgcgcctcccctgcagaacaccttcctccacagcccccacccctgcctcacccacctgcgtgcctcagtggcttctagaaacccctgaattccctgcagctgctcacagcaggctgacctcagacttgccattcctcctactgcttccagaaagaaagctgaaagcaaggccacacgtatacaggcagcacacaggcatgtgtggatacacatggacagacacggacacacacaaacacatggacacacagagacgtgctaacccatgggcacacacatacacagacatggacccacacacaaacatatgtggacacacatgtacaaacatgcacaggcacacaaagagaacactgactacaggcacacacacacacgggcacactacccacaggcacacaacagatggacacgcgtacacagacatgcacacacccacaggcacaacacgtgcgcatgccggccggcccccgcccacattctcccagggccctgccggatactctgtccctgcagcagtttgctccctgcgctgtgctggccccggggctttgggcccaggctctgcttgtccttctgtctctgcttggaggtgctgccatggcacccagcttgggctctgcctggggagcggaggccccagggatagcatgtgacccctgctgaggccaggctcctgatgaaggcagcagatagcccccacacccaccggtgagcagaaccagagcctgtgccatgtgctgagagcaggcagtgactaagcatatgggcccagagggcagagtggctgccctgggcagctgctcctcttagcaggaggcctcaggagatgagctagagcaagtctgcccctgcaaataccacctgctccccaacccacagcagggagcaggcgaggtcagacagcagcagcccgggaaggaccgagccccagcagggaaggcagggcccgagtgaggtctccacacccaacgcacagtgctgtctctaactggggccacctccgagtccccgccacactcttggccctttggagtcctgggctccaggtgtctcccaagggcccatctgtgcaggggatgcaaccccccgaatgtcctcatcccactgtggagctcaggtctctgtctgctccctgggtcctggcagggtaggacaagtccgccaggatgtccccatgcagactctgctccaagagggagctggagagtcagggccttggtgagggagtcaggatcgggttccccccagctcagtcctcccacctgccagcccccacagcacagggcagggccacaccccctgcttccccctccaggagagtcaggacatgctggccgctgctccgctggggccccgccctccagcccccaccttggtctgtgtgctgcatcccccacgctctctctgccaccccaggactctgaggaaaagacctcagagtcccagccctgcccagcctcggcctgtgcccccgctgcatcaggctttcaggggcccagcccatgccctgggcagtgcccgagcccccctgcacttgctctccccacccctgggtgcagcacagcctaggggccaagggtgggcctagaggatgggccccgggggggctttgctgggtgccaccccagcctgaccctattcccccgtgctgtgtctcctgcagagggggaggtgagcgccgacgaggagggctttgagaacctgtgggccaccgcctccaccttcatcgtcctcttcctcctgagcctcttctacagtaccaccgtcaccttgttcaaggtagcacggctgtggcacagggaggagggcgcagggcgaatgtggggcccagggagcagcctgggctggacgtctagcccggaggcccccacaccaccccactgggtcatctctgccccggctcccttcccgaccacagggaaagcatttcacactgtctctgttgcctgtaggtgaaatgatcccaacagaagaacatcggagaccagagagaggaactcaaaggggcgctgcctccgggtctggggtcctggcctgcgtggcctgttggcacgtgtttctcttccccgcccggcctccagttgtgtgctctcacacaggcttccttctcgaccggcaggggctggctggcttgcaggccacgaggtgggctctaccccacactgctttgctgtgtatacgcttgttgccctgaaataaatatgcacattttatccatgaaactgctttctggtgagggtttttgtttctttttcaaaactttcatgctacatgggcatctcaagggggaccccagttccaaagggagctgtggaaaagagcgctgggtcagccagcgcagggggttcgaggaaagccacgtgcccaggaaaggggccgcagaagcaggtgggccagactcagactcggggcatgcccagcctgatggaaggaaggggactgagcaggagagggttccaggcctggtcctccaagcacagcctgaattgggagactggggctcaggcctcgggggcctctgtgtgtgctccacatgcctacaactgcccgggtcaccttgccacccttcccagcaagcccagacagttcttggccttgccccaaaccttcatgatgtgtggtgcacgccaccgggatccaggaggtgcaggctgagccctcgagagcatgtgggcctcaccgggatccaggaggtgcaggctgagccctcgagagcatgtgggcctgtctgcacagtgtgggggccttgcactccacaggagcacaggggtggggtagcagtcgcgcccgtggcaggggagtggaagttggagcaaaagtttcaggtgaacgagtgtcttagtctaattgggcagctatcacaaaacactatcggctgcaaagcttgagcaacagacatttgcctcccacagcgctggaggctgaaagtctaagatcaaggcgccggcaacttcaacgtctggcgagggccaattcccagctcagagacgcgcctcctcactgcatcctcgcgcagccgaagatggtgaaggagctctcagggtctctgtcatacaggcactaagcccgtcacgagggtctctgtcatacaggcactaagcccgtcacgagggtctctctcatacaggcactaagcccgtcacgagggtctctctcatacaggcactaagcccgtcacgagggtctctctcatacaggcactaagcccgtcacgagggtctctctcatacaggcactaagcccgtcacgagggtctctctcatacaggcactaagcccgtcacgagggtctctctcatacaggcactaagcccgtcacgagggtctctctcatacaggcactaagcccgtcacgagggtctctctcatacaggcactaagcccatcacgaggtcctcatcattgcccagatgctagggctcccagtgccatccccttgtggatgaggatggggggcgtgaccatgtcgtccttagaagccgttagggaatgcatagtggggaggacaagtctctgccatcaccctgaagatgggcaggtggtggccaggcttggggcagtgccgaaaaatgactccccaggtaggtgggagcaggatcaaagagcaggggattttttcagagatggcagccaagccaaagttgggggctcatgccaggaggctcacttggccatggtgcagtcacccaggggtgacccacagtccgtggcaaagtcaaggacagcagtggctgtgagaccagggtggaggcaggtggctggggggagaggaccaggctggaaggactgggcagaccccaaggccatagaagtgtcctagaggaagcatccaggatggcgtcttgggagggctcataagctgggggcccagaaggaggccatttcaggttctgaggagcagcctggcacttgctctgagccagctgtcatgggtatctgggggctgctgggtacaagttgtgtccctcccactaaatgtgctctccacatggacccggcccgcccttctgtccctgctggatccctgagctggcaccagccctgccctcagagacaatgtccaggagacaggtggaggtgcacgtgtgggtccctggggaaatccatcctccaaccgtgggctccgagtcgcctcccagcctctcgctccagcttcaccccatgtagctcatcacaggctcaacctcccagcctgggggaggatggagtgaggagccccacactgcccagggcacacccagggggctggggagtctgcactgggctggggcagggaggcctcgtgcagcctgtggggctggcagctcaggacaacactcgtatccgttaactgtggccctggcaacactgcaccccagactgcgtggcttaaacaacagacgtttattccgtcctggttctggaggccgggcatctgggatggaggcctcggcggggctggctcctctgtgtcacgggagactctgttccaggctctctccctgctgctgggctttgccggccgtctctggtgctcttggcttatggaagcagcaccatcttcacagggcgttctccccacgtgctgtctgtgcccagattcccccttttcatgaggacagcagtcatattggatcagaggcttgccctactccagggtgacctcatctgaacttgattgcagctgcaaagactgtttccagacaaggtcacattctgtggtcctgggggttaggacttcgacacattaatttacaggggacacattttaacccatgacagtttgccctccgttccccccataatcatgtccttctcacatgcaaaatccctgcatcccatagcaacatctccagaacggctgaccccttccagcaccaactcttagtccacaatctcagcgaaatatcacctgcatcaagtgtgggagaaacccagggtgagattcattctgggtgaaattcctctccatctgtggacctttgtaacttgacaagaagttatctgcttccaaagtacaatgatggggcaggcataggatggacattcctattctaaaagggatacatagaaagggagagaggagccatgggtcccaagcaagcccaaacccagcagggaaagctgcattagatttaaggctcaaggctcatcctcctgggtccgtgctccatcttccaggcccactggggtgaccccatgctcttcgcccatggtggccagagcccccacagcctcctcatctttggctctgatctcaaagtcacccttccttcattttttctggtcttctttcccttccatccaattggcattgtttcttctgttttacaattcacaaaatccttgtcagcttcccatgaaattcatgggggtttgagtcatcagacaagagagccctgcacagttatatcctcaataaccttatctctactcctggtttctgctgagatggttgattggatccataagtcatgattccaatctctttaacaaatggttgcccagacacatccttggccttgtttccagagcatgctattggacaggctgagaattttccagctgttcaagttgtgggtcctgtttactgaacactttctctcactttttactataagcagtcaggagaaatcaggttgtgccttcaacacttttcttagaaatatcctcagctaaaatccaggttcatcacttgtaagtcctacttaccataaatagaatgcaattcagccaagtgctttgccactttctaacaaaggtcacctttcctccaattttcaataacatcttcctcatttctgtctggggcctcaccagaggcatctttaacattcacatttctagcaacattctgtttgtgacaatttatgtattctctaagatgacaggagttttctctatagctctcctctttctttctgagcccccaccaggatcaccttcaatgtccaaatttctaccatagtcttcaaggaaatctaggctttttctaacatgcacctgaaaactcttctcacctctacacattaccctatcccaaattcatttccacagttttaggtatcaattaaatcagataaataaatcattaccctgaattatttcagttaagcatgttagttggtggcataagagaaaactcagtcagatagtgctgaagacaggactgtggagacaccttagaaggacagattctgttcagaatcactgatgcggcgtcagcaggactggcctagtggaggctctgggagggtggctgccaggcccggcctgggctttgggtctccccggactacctggagctgggatgcgtggcttctgccgccgggccgactggctgctcaggccccagcccttgttaatggacttggaggaatgattccatgccaaagcttttgcaaggttcgcagtgaccaggcacccgacatggtaagagacaggcagccgccgctgctgcattcacttctcttaaaactttgtatttgatgtcttatttccactagaaggcgaattggtcttaattgcttctcttaagccaccacttctaaagccaaaatctgttttagtttcttatgagctattgtaacaaagtaccacaactgcatggctgaaacaacagaagtgtattctgtctcatttctggaggccaggtgtctgagatcaagctgtgggcagggttggctcccctgggttggcagggagaatctgttccaggtgtctgtcctggcttttgttggtttgctggaaagctttggtgttccttggcttttggaaacagctcctccgcctccatctttaccttcacatggcattctgcctgcgtgcatgtctgtgtctaaatttccactttgcataaggacaccagccatattgggtcagaggctcacctgcctccagcgtgacctcatcttaacttgattgcatctgcaaaactctgcttccaaagaagggcacattctgaggccctacgggtcagagcttcaacacgtccatttatttggagacacaactcaacccataacaagacccatccctagtgtctcaccagtggtgctgtagagggaggcctggcagggctgacatcccagaacctcagggaaaaatgaaaacagcccagaggggtccaagaggtggctcgaggaagggaattaggaacacactgttcaggtggaagattctgagatgggccgtgaatactgcctaggatgtggagggttgacaatgggttgacaatcctgctcagaaaatcccaggataaaggatgtaaatggggagaagaggagggtcatccagaatttgggaaagcagggcgacagtttctgccccaagggagaagggaaggaggatggggccaccgccacaccagatgaccttgcgtaccaggccaaagaacgggaacacctggccccacctgagcagcaatagtcagtgtggtggtgggcagacatgggtggaggcagggggtgagtagaaggttagactaagacggagcacctggggcctccagggacccaggcaagaaccctgcacttgctcagctgccctgggtacccaggtctccaggaaagtgaggctgagagccaagcccagcaggcagccacacattctgggacctgccaccctacagcctgctgtccatgagtaacaccccttacaaggggccaggtcagctcatgggtttatcccaggcagcagagcccctggggccaggaatcagggagaggagcatccaatcccaccagctcctctggagccactcagagggccagacgcatggccctccacagggaccccatggcccctgcagggcagctgaggacccgtggctgggagcctgggcaggagggtcatacagccctaggcccgttgctcccaggcttgagtgcccctcctcccctcaggggcccaagggaagtgggttccagagaggttgggggcagcagggaaggtggaggtcccaggaatgcccagaggggcaccaaagcctctggagggaagacccctcccttccaggagctctcggcaacaagagcccagggtccacaaagccacaggtcccactcggttattctgactcacaacacaggagcggcagcaggggcattcgtgttcacgggccacttggtcagccccgctcaccctgggcactcctcctgggccccttttccctgccttccctgtcaccctgctgccagggtcctctgccctgccctgccccttgtcctcagagcctccagcctcagactcccactgtgtctgtcttccagcacccaccaaggctccggatgtgttccccatcatatcagggtgcagacacccaaaggataacagccctgtggtcctggcatgcttgataactgggtaccacccaacgtccgtgactgtcacctggtacatggggacacagagccagccccagagaaccttccctgagatacaaagacgggacagctactacatgacaagcagccagctctccacccccctccagcagtggcgccaaggcgagtacaaatgcgtggtccagcacaccgccagcaagagtaagaaggagatcttccgctggccaggtaggtcgcaccggagatcacccagaagggccccccaggacccccagcaccttccactcagggcctgaccacaaagacagaagcaagggctgggctgtgaggcaacccccacctccccctcagagcacgttcctcccccttcaccctgtatccacccctccggaccctccccatctcagtccctccgctccctctctctgaggcccatctcccaatacccagatcactttccttccagacccttccctcagtgtgcacggaggcagcttgcccagcaaaggtgactgtctagtgggcttcccacagccaagctcccaccccatgctgcggcccttcccttcttcctgcttggctgcctgtgccccccacctgcctgtccacaacccagcctctggtacatccatgccctctgccctcagcctcacctgcacttttccttggatttcagagtctccaaaggcacaggcctcctcagtgcccactgcacaaccccaagcagagggcagcctcgccaaggcaaccacagccccagccaccacccgtaacacaggtgagaagccccttccctgcacactccacccccacccacctgctcattcctcagccgcctcctccaggcagcccttcataactccttgtctgagtctccaagtcacactttggtaaggagagggacactgaacggacctctaacaaacacctactgccagccagccccagtctgggggccagcagatgccaaacagccagcagactcccagagcagacctgggccggctccctggcccatggacccagctctgcctcgctgagctgaggcatgggctctcagcgcagcctcacatagagccaccctgccgaggcagtccggcttgcagactcacaggtcacttgggccgcagcagcccctccccgtgaccctcgcctcccgcccgccccagcctggctctctccaagtgttggatcttggtggccagcctgcttctcaccctcaccctgcctgccacctcagaatggcaggggaaagagggccctcaccaagaactttatctgaggagtctgaggcttgtgactctgacctgcctgagatgtccatgtggccggggggacgggttcagtgttcgggagaactcgggtacgtgcctgactttctctgagtagggcaggaagctgttaggagaagcagcagtgaggtgggctggaccaacaggcagaatgactgtccctcagccaccctctgggatgtgggtcaagctctgacaaaggcatggcacagccatggtggcccctgcttggatgagtggccacggtgccctcaccctgggccagaatctgcctccactctgcaggtgcagaaacacgacattcccgtctctaaacacacctagctcctaggcttggggtgggcctatcaaatgcagggagatggacacagcacaagggccagagcttcccatgagaaaggtgagggcagctgctccctgacccgggcatctgcacttgtccctctccaccctcctcatgggcagtggagactcagcaacaaaacaagttgagtgcattagcagccagctctggagccaagtcactcaccccacggccttggctgctggtggaggggccttcccctgggcagcctccaagaagacggccaagtgctcttactcagaccacggcgctgcttcctggcacctcgatttcccacaacaacatggggtgcagacaggctagggccccctgccctggggcctggacggcatccagttaaagatgacccttcacgggcggtgcctgaggtgtgctgacctcagcagctaagccctcaggtctggtctgcactgccccacctggaggacccaactgacccagacacagccagggttatggcatgaccccgtggacggtgacccacaggccagatgcagccaggggctgttttgtgtggcctagaaatgtctttacagttgtagtgggatggaggaggaagaggaagagaggaggggagagaaaagcagggaaggggaaaaagaggagttcaatgcaaccccaaaagccagaacagttttgagctgaaagaacaaggcaggaaacatcccagtacctgacttcaaaacatactataaagcagttgtaatcaaaacaggatcataaaaacagacacacagacccatggaacagaaaagcgagcccagaaataaatctacatgcttgcagtccattgattttcaacaaaggcaccaggaaaacacaatggggagaggacagtttcctcaataaatagtgctggggaaactggatatccatgtgcagactaatgaaactacacaaaaatcaattgaaaacagtctaggccaggcgcggtggctcatgccggtaatcccagcactttgggaggccgagacaggcggatcacctgaggtcaggagttcgagaccagcttggccaacatggcgaaacccggtctccactaaaaatacaaaaattagcacatggtggcctacgtctgttatcccagcttttcaggaggctgaggcaggagaatcgcttgaatccgggaggtgaaggttgcagggagccaagattgcgccactgcattccagcctgggcaatggagcgagactgtctcaaaaaaaaaaaaaaaaagaaaagaaaacagtctaaaggtttaactgaacagataaagctactagaagaaaacatagggggaaaactccatgacattagtctgagcaacgatttttggatatgatcccaaaagctcaggcagcactagtcacaaaagccaagatacagaaccaacctaagcacccctcagcagatgcacaggtaaagaaaatgtggtacgtatggggcacaatggaatacgattcagcctttaaaaacagtgaaattctgtcattggcaacaatgtagatgaacctgaaggacacttatgctaagtgaaataagccaggcacagaaggagcaatactgcatgattgcacttacatctggcaggttaaaaaggcaaactcttagaggcagacagtagagaggtggtgccagggagcgggcactggtggctggggagatgttggtcaaagggcacaaaactgcagttgggaggaattagttcaggacatcccttgtacatggggacagtggttagtaacaacggattgtatccttgaaaaccgctaagaaaatagtttttaagtgttcttgacacaaaaagtgacacgtatgtgagatactgcatggtcattagctggatttagccattccacaatgtacacatatttcaaacattgtgttgtatatgataaacatgtataatttttgtcaattaaaaatttttaggaagaggaggagaagagaagaagaaggagaaggagaaagaggaacaagaagagagagagacaaagacaccaggttttttctgacccctgggctatcaaaacacctattgcccaataactagttggccgttggtgccctaaactattgaagcgattgctgttatgtggatgggccccggacacttagaaactcgtgacccctgaggacccccacgaggacagtcagggtccccccgaactcagggagcactgaggaaggagctcttagaggcgtggggcccctcaggcccctcagagggctctgccacatgggtcaggggcaggctgagggggagtcccaggctccatgcccagcctctgtgcctctgaccagggtgtcccccacaccgcctcctccccagtgccctccactggccacacctggccagaagctggggagaggagagcacagtggttaagtcagtccctgcagggagacggcaccagaaaaacctggcctgtggatgagtcccggcctggcagccacagagcagagagctctagaagcaacgaaggcccgagtctgctcagggaagagcgggcagcagccccagggccggacagtgaccaagagtggcaccgcccatggctcaacgggtctttgcccacagatcccccagcccctggagacagggtctgtgtgcctggccgtgcaggcaggcaccacactcagggggaggccactgtggagctctgtgcagagccccgggcgggagcctactgctcccgaaggtccggccacagctgctctcgtttgctctcccctgcagagtgtccgagccacacccagcctcttggcgtctacctgctaacccctgcagtgcaggacctgtggctccgggacaaagccaccttcacctgcttcgtggtgggcagtgacctgaaggatgctcacctgacctgggaggtggccgggaaggtccccacagggggcgtggaggaagggctgctggagcggcacagcaacggctcccagagccagcacagccgtctgaccctgcccaggtccttgtggaacgcggggacctccgtcacctgcacactgaaccatcccagcctcccaccccagaggttgatggcgctgagagaacccggtgagcctggctcccaggtggggagacgagggtgcccacagcctgctgacccctacgcctgccccagggccatgaccccagctgggccccagcagcaccggtcatcctccacaggaaaggagaagggaggcaccagcaccctggccggccccacttctctcccagtgcccccgtggccagaggctgacagcctcccccacctccccgcagctgcgcaggcacccgtcaagctttccctgaacctgctggcctcgtctgaccctcccgaggcggcctcgtggctcctgtgtgaggtgtctggcttctcgccccccaacatcctcctgatgtggctggaggaccagcgtgaggtgaacacttctgggtttgcccccgcacgcccccctccacagcccgggagcaccacgttctgggcctggagtgtgctgcgtgtcccagccccgcccagccctcagccagccacctacacgtgtgtggtcagccacgaggactcccggactctgctcaacgccagccggagcctagaagtcagctgtgagtcacccccaggcccagggttgggacggggactctgaggggggccataaggagctggaatccatactaggcaggggtgggcactgggcaggggcggggctaggctgtcctgggcacacaggccccttctcggtgtccggcaggagcacagacttcccagtactcctgggccatggatgtcccagcgtccatccttgctgtccacaccacgtgctggcccaggctggctggcacagtgtaagaggtggatacaacccctcgccgtgccctgaggagtggcggtttcctcccaagacattccccacggctgggtgctgggcacaggccttccctggtgtgaccgtgaatgtggtcaccctgaacagctgccctctctggggacatctgactgtccaagaccacagtcagcacctctgggagccagaggggtctccagagacccccagatgtcaggcttgggctcagtgcccagcgaaaggtcagccccacacatgcccataatgggcgcccacccagagtgacagcccccagcctcctgccaggcccacccttttccgcccccttgaggcatggcacacagaccagtgcgcccactgcccgagcatggccccagtgggatgtggtggccacgaggggctgtacacacagcaggaggctgtccgccctgctcagggcctgctgcctatgccccagctgtccaaccaagggaggcatggaagggcccctggtgtaagctggagccaggcacccaggcccccggccaccctgcagagccaaggaaaggaagacacccaagtcaacaaggggcagggctgagggctgtcccaggctcttttggcccgaggggctgccagcagccctgacccggcatgggccttccccaaaagcgaccctgtgaggtggcctcacagagaaccccctctgaggacagtgtctgaccctgcctgcctcacacagatgggccccacagcagtgggcaacctggggggcagcagcccaacctgaccctgcagggactgccccctgcagcagcagctgcttctcagtcccccaacctccctgtccccgccagagggtcttccccgaagctgcagccccaacccatggctgcccacctggaaccgggactccctgtccactgccccctccccttcggggccccatctgtgctggggcccaggttcggcctacagattcccatcattgccatggcctcctgaccttgcctatccacccccaaccaccggctccatgctgaccctcccccaggctcccacgcccagctggccggccatccccaggcacagacagtctgggatctcacaggttagcctggaccatccacctggccagacctgggagaggctggaagctgccctgccaccatgctccagggccccaggttgcagtactatggggtgagggtgtgtgtgcacacctgtgtgtacctaggatatccgagtgtacccttgtgcccccaagcacaagtctccctcccaggcagtgaggcccagatggtgcagtggttagagctgaggcttatcccacagagaaccctggcgccttggtcaaggaagcccctatgcctttcttgcctcgatttcccctcttgtctgctgagccagcaggggccacgtcctgggctgctgtgaggaggaagcaagttggtgctaggaggggctcctgtgtgtgcatgggcgggaggggtgcaggtatctgagcaccccggtctccacttgagagagcagggcaggagctccctgacccacccagactacacacgctgtgtccacgtgtctcccattatctgtggcagaggatccggcttctttctcaatttccagttcttcacaaagcaatgcctttgtaaaatgcaataagaaatactagaaaaatgatatgaacagaaagacacgccgattttttgttattagatgtaacagaccatggccccatgaaatgatcccggaccagatccgtccacacccgccactcagcagctctggccgagctcacagtacaaccacaataaactcttgttgaatgaactctaggaagtctgtgacgtggctggttcttgtcaatgcttcctgcctgcccacaggctcttcctcgtggatggggctgtgcttgccacggaagcgcgtttttcccggcctaggcttgccttgggccccactgccgtctccagctggagatgaccttctatacacacatttgctcatgacagacccttgcttagcccccttccatggctccctcctgctgctgggataaaatcaccttgcctggatatcccctcctgggcccctttccaccctccttagtcagcacccccagttcagggcacctgctttccccgctgcggagaagccactctctccttgctgcccggctgtgtcttgccttccacaccttgtcacagtggccacttcctaaggaaggcctccctgtgtgcaggtgtgcagaagtgccccagcctcccgtcacctttgtcacgggagcccaatccatgagagtctatggttctgtctgtctgccccactcagggcagcgacaagtccaggcggggaggacacagtaggcagagatttgtcgaggggacatatgagcaagagggtgaggctgggagctccctggagataaccacgcctcctgggaagactcgccgtcatttcagctccacgctgtgcgggggtgggtggaggggtagcctggccctcatgaccagggagcttctcactcagcccctgttcctccccagacctggccatgacccccctgatccctcagagcaaggatgagaacagcgatgactacacgacctttgatgatgtgggcagcctgtggaccgccctgtccacgtttgtggccctcttcatcctcaccctcctctacagcggcattgtcactttcatcaaggtcaggggagcggccaggctctcagtgaccctcggggtgggtgtggggcaaggtgcccttccaggggacatgccagagctggtccagggatcctggaccaggcagaggcagggctgagggagcctggaggacatgcaggccctctgtggcctgtggacactgtcgaaggccctcttgaccctgtggataaaggacaacaccccctcccctgctcctctgtctcccctgcccctccacccctcaggcttctagccccctgtctgaccccaggggctgtctttcaggtgaagtagccccagaagagcaggacgccctgtacctgcagagaagggaagcagcctctgtacctcatctgtggctaccagagagcagaaaggacccaccctggactcttctgtgtgcaggaagatgcgccagcccctgcccccggctcccctctgtccgccacagaatccagtcttctagaccagggggacgggcacccatcactccgcaggcgaatcagagcccccctgccccggccctaacccctgtgcctccttcccgtgcttcccccagagccagctacacccctgccccggccctaacccccatgcctccttcctgtgcttcccccagagccagctagtcccacctgcagcccgctggcctccccataaacacgctttggttcatttcacctgcctcctgttctttgtcccagtggtctggattcacctcaagttaaaggacacagggagctaacggcaacggggagggagtttggggtgtcagcagcaacagggaacgcaatagccaaagctgtcacagcaagaactgagcggagaccttgctctgaagttcatgggttaagaaacgcccctccccacaccaaacacaaacatttcacgctcactcgtacatgcacacacatgcacacaagcatctatgcacacatgcacatgtgcacagctcacgaataaacatatatgcacacacatgcagtacactcacatgcaaacaggcagatgcacaggcatgggcacacatgcacaaggcatgcatgtgcaggtctgcagacacacacatctgcatgcacatacacggacgtgcacctgcacacacacaagtgcacataggcatcaaagacacacatgctcgtgcacgcgcatacacacagacatgcacacttatgcatgcacacgccatgacaggatggcacgggaacaaccttgcacatggagcctgttctgtgtgtatcgagagcctgcacctcttactgtctgcatgactgtgggcaagagcctgaactccgtacctccatttcctcatcagaatggggtgaaaatacacctgtcaagtagagtgaggtgagaagtgagtaaaatcctatctgaaaggggctcagcaaggacccaggtattggtcggacctcctgttatcatctgctgtgggctgaacatttgtgtcctcctgaaattcatacattcgtatattcatacctttccccctgaaatcctaacctccaatgtaatggtattagaagatggggcttttgggggtgctgaggtcataaaaggggggccctcatgaagaggattagcacccttatgagaggggccccagagagctccctcaccctttctcccctgtgaggagatgccgtctatgagctgggatgcaggcctcaccagacacccatctgctggagccttggtctgggacattcagcctccagaatggtgggaaataagtttctgttgtttctcagccaccacgtctgtagtatgtggaagtcatcagaatcaaaattgagtcacctgtggttttttttttttctaaatccctgacaaatagagcctaggaaggccaagaagagaagagggttctcatccataaacacttgataacaaaaactatcaccaaggactctacaaaaactgcaactggcacaaagaccatcacaaccttacacagaaagtacttctgtgaggacatcttcccagcaacgggctgtccaacctcagactggcattgcctttgttattggtccttgtagagagggtaattatctcaaagcaatcatgtaatcctcctcatttttcctttgaaagccttggtctccctttgcctccctgaatacgcacatagctgatcatggcaggtgtatcccactgcagtgctctacctccaaatagatatctttttcttttagacggcatttctcttgttatttagattgagatacatggagtcagaagtgggatgtggagaaggatcactgctggaaggagtcagtaattcttgggccggtgtgcagtattcacttgagccctttgagctctcagctttttctgagctactccgtcttctctcaggccaaccctccctctttttggaagatgcttttttaatattatgtggggtttgtttattagactgccttaataaaggaccttatgtccctcctgggatgataaaaggcttttcgtgctttctggcaagtcctgtttagcataaagacattccagcctgagtactctggtttccacagagtttgcattctgtctctgagggatgtcttctctggtgaggtgcctcctttaatactttgttggatatgcatgcctgggtgaacatatttgtgagcacccttatcttgccttcttttgctgtggttatgtgtatctgtaaatgacctggctcttttcctctgcttgcttctaaaaatctttggagagcaaaataaacattctaaatggtgggcacaggctgtctcattagaagctgctacagcagtcaccaccgtctaaagcaccagtccaaactgccggcgtggcctcatagtatctgtagaatgttctttactgtaaaaagattaataagaagggggatggtttttaaatattaaggcacagtaagttttctggaactcccgctggctacgtctttgtgcacatttttaaactaatgggcaaattacgtcaaggaaaatttagagttccaatggttatttttcgaactctaacaaaaaccctgcaacagtagtcatcatgcagtgcctcctaagtcctctatctctctattttgtttttctgcctactttaaatctgctgacttttttactcatgttgcaataaaactcactggttacagcattccagccaagatatttttggttttttgtttgtttgttttttgttttttgtttttttagatggagtctcgctctgtcacccaggctggaatgcagtggcgctatcttgggtcgctgcaacctctgcctctcgggttcaagtgattctcctgcctcagcctcctgagtagctgattacaggtgcccgccaccatgcccagctaatttttgtattttagtagagacaggctttcactgtgttggccaagctcgtcttgaactcctgacctcaagtgatccacctgccttggcctcccaaagtgctaaaactataggcgtgtgccaccgtgcctggcccaagattttttaaagtttcctaaaggttttaaattagtggctttacaaattacaacagctctatggtaaccaatgacctagatgtaagagtcatttcttttgaaaatgtagattagctttgcttggctaacaactgcttaggctgatggaatagctaactgaaggactgatggtctcaaagaacagaactaggtaaatatttacagaaattgggctttcagatcgaacaggccaaaatcttgagcttagagcagtaatataaggtatctctgtctgccataaaaattttgctttgccacaggtgccagaaaaaggaaaaacactgctaaatgcttccctgcatgcattgtctagtccagaaaatcagaccagcaaccaaaaaatagatttgttactagtatagacgagttgaagattttgtttttcatatacaattcagccagtcctagctaaaacgcaatcactggaaatttaaccttaaattcatttaaaactgaaaaaggtcttttgaaatcaaactaatgcagaaactgctttacccaaaattctgatccatggccctcattagacgacccatcaggacaaataaagtttagcttgtgaacaagtcccagttttgtcaaaaatataatttggattgaagtgtcttttagaaactgacacatttgtgttattatctcatgaccaaaattctaaaatgaaagctacagtgtctttatttgtgtgcgtatgtggttaagtgtgtttatgcatatgtatgtgtattatgttgtatgttgttatctacatggtaaaatctggcatcatcaacaaaaaatctattaagggattctatttagattggcttagataaataagcattcataaaaaatatgtactaattaacccaaatgccttttagttcatgtgacttaggtatatctttaataaacaaatcagttttaaaattgttggtaaaataaaaatacaaatgttctcagaattgtcagcatatatttttccctgagtttactcgtcagacagctttatatttgtctctgatagatgttttaagatgtcagggtttgacacaaagatgataaaactataaacccatcctaaaacagaataatctttgtatgatctttgataaataagactaatttggctgagtgcagtggttcatgcctgtaattccagcactttgggaggccaaggtgggcagatgactagaggtcaggactttgagaccagcctggccaacacagcaaaaccccatccctactaaaagtacaaaattagccaggtgtggtggtgggcataatcccagctacttgggagcctgaggcaggaaagtcactggaacccgggaggcagaggttgcaatgagccaagagagcgccactgcactccagcctaggcaacagcgagactccatctcaaaaaaaaaaaaaaaggctaatttaatattgcaggcttaataaaaacagctgtatcttatgagctatcgacaaaatacccatacacttcactaagtttcttactaagtgaacatctaataatcacaggctataaaaatggttaaaagggaaataactttaagtaatggctagctttgtctaatatctcaattttcataagtaatctaggtaaattattaaaaataaattaattaagcctggtgtcatggcacacgcctatagtcctagctactcaggaggctgaggtgggaggattgcttgagcccggaagttcagaccaccctgagcgatgcaacaagacccccatcactaaaataaataaataaataagataaatgtcaagaaaataaatgtttataaataagcttcttatgtaatttaagatcttaaaattatgttatcttcagttaaataatagatactcattaaatgtctgggtcatttccaaataagatttttaaaactaacacaaattactgaacataaatgtttgttcttggcttcttaaattttatagaaattttgtagaaagactaaatttatttgggtctattaatatatgtaaaaattatgtcatagaaatatgttttcaaaaattataaaatttttctcatctataaaatagtgatatgtgacaaatggttaaaatttgcttgctagaaaataaggttactaagagttaaaattctaattaatatatataattctgtctacaaagtataccacaaaaaataagatgtgtttttcatttttaaaaactataagacaggcatttataatttattttactgcaaaaaaaaatttatctaatttggagtttgtttaaaggttgtttcaaagcacagatttaggaaaaaagtaaaaacaagatggaaaagaaccactctcatctgcccccacgtaagacgtacctgctccccttccaccacgactgtgtttcccaaggcctctccagccatgtggaactgaatttaatctacaaatagagttgatcaagtaactttaaggtatatggacaataatatgctttgcagcataaagacctgaaaacaaactaaatgcccatcagtgggaaattgtttcaataaaccacagaacattccgtggaaaactccacagccattcaaaagaatgaagggggagagatcatcatggtggacaggagtcaggactagattgcagtccgactgggatggacagagcacatgtggaggctggcaccgtgaattttagctccagaacaactgcaggaataaatcaggaatcccaagaggatccacagaccatgtgaaggaagcagcctgctcctgcaggacccagagacaccccaaatactgtgagtgcccaaactgtggaagtgggaatgggagatcgtccatcctgcacacacaccctcactagagaaaccaaaggtctagttggtgggaaaaggttccaaccttacctggagctgagtcaatttagaaagctgagcgaaatacaggggtacagggagcagcgggaaaggccctgggagcttcctgggtccccaggcaggccattcctgcatggcaccatatgaatactttgggagggtggccagaggcacagggaaaatgtcacagggagaaggaagtctccagctgaacgcaggggagggcacgaatcctgcagaccccactggtagaggaacaaccaaagcccttcttcatagctgggaagtaggtagcctggggcaagttctctgcttgcccaatgcctggaaacagactcagtgctgttggcgaggggcatggtgtgagtgagacccaccttcagtttgcatgggagctgggtgacacctgtgactgccggctttccccacttccctgacaacctgcatgactcagcagaggcagtcataatcctcctaggttcacaactccattgacctgggaacctcacagccatcccccccagcagctgcagcaagaactgtccaaggagactctgtgagctcagacacacctagccctgcccgcatctgatggtccttccctacccccccttgtagttgaagacagagggcatatactcttgggagttctagggccctacccactgctggttcctctccatactaccaccactgatgctctctggaaaacgccatctcctggcaggaggccaaccagcacaaaaacagagcattaaaccaccaaagctaagaaccttcatggagtccatttcaccgccccaccacctccactgggacagttgctggtatgcacggcggagaaacccacagacagttcacatcacaggactctgtgcagacaacccccagtacaagcctggagcctggtagacttgctgggtggctagatccagaagagaaataacaatcaccacagctcggctctcaggaagccacatccacaggaaaagggggagagtgctacatcaagggaacaccccgtgggacaaaggaatctgagcaacagccttcagccccagaccttccctcagacagagcctactcaaatgagaaggaaccagaaaaccagctctggtaatatgacaaaacaaagctctttaacacccccaaaaaatcgcactagctcaccagcaatggatccaaaccaagaagaaatccctgatttacctgaaaaagaattcaggaggttggttattaagctaatcatggaggcaccagagaaaggcaaagcccgatgcaaggaaatccaaaaaaagatacaagaagtgaagggagaaatgttcaaggaaatagatagcataaagaaaaacaataaaaacttcaggaaacattggacacacttatagaaatgcaaaatgctctggaaagtctcagcaacagaactgaataagtagaagaaagaaattcagagctcgaagacaaggtctttgaattaacccaatccaacaaagacaaagaaaaaagaataagaaaatatgagcaaagcctccaagaagtctaggattatgttaaatgaacaaacctaagataattggtgtccctgaggacgaagagaaatctaaaagtttggaaaacatgtttgggggaacaattgagggaagcttccccagccttgccagagacatagacatctaaatacaagaggcacaaagaacacctgggaaattcatcacaaaaagatctttaaaactaaaactaaaacaagcaatctacaaaacctaggcacattgtcatctggttatctaaagttaagatgaaggaaagaatcttaagagctgtgagacaaaagcaccacatgcttagtttcactggatacaaaattcttggctgataattgttctgttggaggaggatgaagatagggctccaatctcttctagcttgtagtgtttctgctgagaaatctgctgttaatctgataggttttcgtttataggttacctggtgctttcggttcaaaaatttttttaatttccatcttgatttcgtttttgacccaataatcattcaagagcagtttatttaatttccatgtatttgcatggttttgaaggttccttttggagttgatttccagttttattccactgtggtctgagagagtgcttgatataatttcaattttcttaaatttattgaggcttgctttgtggcctatcatacggtctgtcttggagaatgttccatacgccgttgaatagaatgtgaccatatgataggaaataaactccaaaagaagccgaacaacaacagtgacacaacctgttgaaacctctgggatacagcaaaggcggtgccaagaggaaagttcacacccctaggcgcctacgtcaaaaagactgaaaaagcacaaattgacattctaaggtcacccctcagggaaccagagaaacaagaacaaaccaaatccaaacccagcagaagaaaggaattaatcaagatcagagcaaaactaaaggaaattgagacaaaaaaatacaaaagataaatgaaacaaaaagctggttctctgaaaagataaataaaattgatagaccattagcaagattaaccaagaaaagaagaaagtcccaataacctcaataggaaacgaaatgggaaatattacaactgacaccacagaaatacaaaagatcattcaaggctactatgaacgcctttacacacattaactagaaaacctagaagagatggataaattctcaggaaaatacaaccctcctagcttaaatcaggaagaattatataccctgaagagaccaataacaagcagcgagattgaaatggtaattttaaaattaccaagaacaaaaaaaagtccaggaccagattcacagtagaattctaccagacattcaaagaagaattggtcctattggtactattccacaagacagagaaagcgggaagcctccctaattcattctatgaagccagcatcaccctaataccaaaaccgggaaaggacgtaaccaaaaaagaaaactacagaccgatatccctgatgaagatagatgccagaaatccttaacaaaatgctagctaaccaagtccaacaacatatcaaaaagataatccaccccaatcaagtgggtttcataccagagatgcagggatggtttaacatacgcaagtcagttaatgtgatacaccacataaacagaattaaaaacaaaaatcacatgatcatctcaatagatgcagaaacagcatttgacaaaatccagcatcgctttatgattaaaactctcagcaaatcagcataccaagggacatacctcagtgtagaaaaagccatccatgacaacataattctgaatggggaaaagttgaaagcattccctctgagaattgaaacaagacaaggatgcccactgtcaccactcctcttcaacacagtattggaagtcctagccagagcaatcagacaagggaaagaaataaagggcatccatatcgataaagagaaagtcaaactgtcactactgatgatatgattgtttacctggaaaaccctaaagactcctccagaaagctcctaggactgaaaaaaaaattcagcaaagtttccagatagaagattaatgtacacaaatcagtagctactctatacaccaacagtaattaagcagagaatcaaatcaagaactcaaccccttttacaatagctgcaaaaaataaaataaaatacttagaaatataccttaccaaggaagggaaagacctctacaaggaaaactacaaaacgctgctgaaagaaatcatagatgacacaaacaaatggaaacacataccacgctcatggatgggtagaatcaatattgtgaaaattaccacactgccaaaagcaatctacaaattcaatgcaatccccatcaaaataccatcatcattcttcacagaattagaaaaagcaattctaaaattcatatggaggccaggcatggtggctcatgcctgtaatcctagcactttgggaggccaaggcagtaggatcacttgaggtcaggagttcaagaccagcctggccaacatggtgaaaccccatctctactaaaaatacaaaaactagccgggtgtggtggcatgtgcctgtaattccagctactactcaggaggctgaggcaggagaatcacttgaacctggaaggtttgcagtgagcccagattgtgccattgtactccagcctgggcaaaagaatgagaatctgtcacaaaaaaaaattcatatgaaaccaaaaaagagcctacatagccaaggcaagactaagcaaaaagaacaaatctggaggcaacacacggcctgattccaaactctactataaggccatagtcaccaaaacagcatggtactggtataaaaataggcacatagaccaatgtaacagaatagagaacccagaaataaacccaagtacttacagccaactgatctttgacaaagcaaacaaaaacgtaaagtggggaaaggacaccctattcaacaaatggtgctgggataactggcaagccacgtgtaggagaatgaaactggatcttcatctctcatcttatacaaaaatcaactcaagatggatcaaagacttaaatctaagacctgaaactgtaaaaattctagaaactataaaaatttccaataacattggaaaaacccttccaggcattggcttaggcgaggacttcatgaccagaacccaaaagcaaatgcaataaaaacaaagataaatagctgggacataattaagctaaagagcttctgcacagcaaaaggaacagtcagcagagtaaacagacaacccacagagtgagagaaaatcttcacaatctgtacatctgacaaaggactaatatccagaatctacaacaaactcaaacaaatcagcaagaaaaaaacagacaatcccatcaaaaagtggggtaaggacatgaatagacaattctcaaaagaagatatgcaaatggccaacaaatatatgaaaaaatgctcaacatcactaatgattagggaaatgcaaatcaaaaccacaatgcgataccaccttacccctgcaagaatggccataatcaaaaaatcaaaaaacattagatgttggtgtggatgcagtgatcaggggacacttctacactgctggtgggaatgtaaactagtacagccgctatggaaaacagtgcagagattccttaaaggactaaaagtagaactactatttgatcctgcaatcccactactgggtatctacccagaggaaaagacgtcattctacgaaaaagatacttgcacactcatgtttgtagcagtacaattttcaactgcaaacttgtggaaccaacccaaatgcccatcaatcaacaagtggataaaggaactgtagtatgtatatgtgatggaatactactcagccacaaaaaggaatgaattaatagcattcacagcgacctggatgaggctggaggctattattctaagtgaagtaactcaggaatggaaaaccaaacatcgtatgttctcactgacatgtgagagctaagatatgaggatgcaaaggcataagaatgatacaatagactttgggaacttgggggtgagggtgagagaggaaagagggagaaaagactacaaatatggtgcagcatatgctgctcgggtgatgggtgcaccaaaatctcacaaatcaccactaaagaacttattcatgtaaccaaacaccacctgtattccaataacctatggaaaaataaacattaaaaaaattaagaagactgaaagaattaaaaaatttaaaaaacagtaagtagaagagaggtatttgaaggaagttatgggtatgaagatgtatttttggtacggaaggttaaaaagaaaagagaatttttttaaaaaaggaagaatcttgcgtgataaatttttgtcataaagtaaaatgactgcttactttaaaaaaagaggtatcacacacaccagggcctgttgtggggtggggagaggggggagggataggattaggagatatacgtaatgtaaatgacgagttaatgggtgcagcacaccaacatggcacatgtatacatatgtaacaaacctgcacgttgtgcacatgtaccctagaacttagagtataataaatatatatatatataaagaaaattccacacctgaagccatgtgacaggctacagacaaaacacagttaaaactttgtttcatgtacaaagttatttaaaatattgtacaaaatcaccttcaggctgtctgtataaggtgtacatgaaatacaaatgaattttgtgtttagacttgggtctatccaagatatctcattatatatatgcaaatatcccaaaatccaaaaaatataaaatctgaaacacttctggtcccaagcatttcagacaggggatcgttagcctgtaatgagagggagtatgggtcaattatgacgttgaagattcaaaaaaaatttttttttaattttcagtcaagctctaccaactacactaactagaaaacactcaggcagattgctttttgctaggttaatatggcatgattacaactgtgcatatgaataacatgtatcagattccttttgtttgggaattatttcattacaacactaaacactgcttatgtacgctgggtctctttttcaaagactacaaataatgcttggttctttgctttcaaaatataccaaacatgaggtacaagaatgtacccatccatatttgaccaggggtagaattaaaaggtttgggttgaagaagatgacataacatcccaagagggttgcatccctaggggtcatgggaacaaatgtggccaagtccctttttaactggaaaggatttcagatccctgaacaagacaattcatcagtcttaagcgtagtaagtcatcagcaaataagagaatgataaacactagaaaaataatcaaatcattgtctaaattcattataaaactatatgagaaaactataaaactatatgagagagataaacagagacaagaagacaaggataaaataaaaaaagaggtatcaaacaaagcagaacgcctcaacatgtcataaaacatctgagtaagtcataataaggtttgcaaataatgaatttacgaaaggaattttgcgtgtgatcaagatggctataattagaagggaattatttataagtctttctaaagactgaggtttgctattaaaaatatgctaatataaaactaaagatttagtttcctgtgttagaacaacaaagttatcttgaagtattgatctgttcttaaaactacaagaagtttttatttttaattctaaaatctgtttctttaacagaccatttctattgcttcctgggatccatttactttccctagtttcaggttggaagtcctcttcatgtaaaacgagaatttcatttcttgacatagtcttttccccctaaagcttctcagttttagatttcagaacttcaacttctgttgtatttcacagcacatgatttatagatcatgtatataaatatggatttatagatcatgtatataaatacagacttatccatcagtgccttcagctcttcctccccatgagatggcctggggtgatagctctctctttcaactttttttttatcaactcctataacattttttctcccattacaactctgttgttatggctcgatgctgaaatgtttatcccgaaagtctagaaaacaaatgttctctccagtataattccagtataattgaattttcccttgtaaccaggaagtttctcatgctgttgctttttctatgtgttcccctgctcaggtactagttatcttgtttacatttctctactaatggtttacacttatagccttggacatactctttctctgcctaattaaactcagtgtctttttcatcagatttgacttccagtttatctacatgggcttcccaagaggagacacaatcacactgcaggaggcatttctttaacttttgggtaagtagcctaaaaaaaacaaagattttgtattttattaggataattttttgtgttgtctttatgaggtttttggttacttaggtaacttgagctttgaagaagttaggtccttttaatccatgtaactttccgtattactcttcaagtcttttgatgatcactggttgaatacatggctatatttaatagtgacctgagattctgctttgattagccatgttgaacctttgacatctttggcaggcttcctcaggatcaaaattctaaaataagtctttttttatctagaattgacttagggattttacagttagacccctggaaagcctcaaagaatttatctctcatcctatagagaaaataaatgattaggcttatttggtaaattatatgggaaacattgtcaaataataagtgatattagatcttctttcagttacatttgtgggtatgctattgatatgatgtttcaaagattatataaattcatatcagtctataacgttatcagccataattttggttatgctacatcttctttaaagctatatttgtatggagacgttactgatgtgagtatattctaaagattatgtgaaatttataaaaccctgatggttctgatgtgatgctatcagtcacagtcatgattctgtttgctaccttaaaacactatagtaatttttaaaaagtcaatttccttatcaattgctgattataatgaatttttatcagatgtttaaccatggccattttgtttttgtgacccagagttattgttttgatttttctccaaaagcatttgtaatcagctattgtccaaaattgcttttcatggaagagactcaaacaggaactcttaaatacggtttcccgataaaagatcaatggactcaataaaaaattttcagaactctaataaagaaactgagaaattcaaaaacctccaatcaagctcaagcagaaaagctgacttcatgatattgaagaagtgatgaggggaatatttttatgaattttatttgaagcatcgttcgttcttaaatgttttgtttgccagatttaaggaaattttctctcgtaagtcatctatagtttacagtaatttaatacagtatactttttgtgaacaaagatgaaagcaattattttcccccctacgtgactcctccaaaatttagaaactattcacaagtgttcttatgacgatgtggccatttgtataagtccagataaaaactagttgtctcctcactgcaggatgtaattggaaacatcaggtatattactaaggctttggctgaaataccatatttgaaaaatatacatagaatgcctagtttcagccgggcggggtggctcacccctgtaatcgcagcactttggaaggccaagccaggcggatcacccgaggtcaggagttcgagaccagcctggccaacatggcaaaaccccatctcaatcccgtctctactaaaaatacaaaaattagccaggtgtggtggtgggcacctataatcccagctgctcgggagactcaggcaggagactcttttgaacatggaaggcagaggttgcagtgtgccaagatcacgccactgcactccagcctcggcaacaaagtgagactccgtctcaaaaaaagaaaaaagaatgcctggtttccagggttccttataatgagtaaaaatcatcacttcctggcaagcccagaaaccttaaaactgtaagtaaaagctaaagcctgtcttggtttggcttaccagcataaagaggtattgaagtacgagattcctatgtgatcaatgtacagaggaaaacttatgcttccaaagaaaagctgtaacacacctgcttttagattgtagctctgtgcattattttcaagttcttgttttctacctatagactagatcctgaattcttctagattattccaatccaactttcttccatggagaaaaatgagaactgctctgttcctgaagccctataagctgaagctagataaatgctaagaaacaagtctcatgcttgatgtccgagccagacagaaagttcaccagactgcccaatgccacgactagagacattcaaactgcaaagcaagatgaggaatttcacattttcactctgtagacagcttctcccaagtcatgggaacaagactccatatcataatgggactcttacctgtcctagggcctacagtttttacttagcttcctattttatttattcaattaattgccttgaatcctggattcattatttattcaattaattgcctttaatcctagacattgcataatcctattatgcaaactaggattgtcatgttattactaattttactttttattttccctttttaaactttgtatctgttacttgctgaattttttcagaagtacaacttctaacagaataatgctagcccagcactttgagataatagcaaaagaccacaccacagacaaaattgaacttaatcatttactccaggtagacttagcctgaaagccactgtcttcaaacctcctttgttactcaaatgtggctaaaaggattttgacactgactcctagacatcaatcactccttcaaacatgtgaccagaccagacacctgggacaggcccatccaaatactgagggacatcagaacctaccacagcatggtccatcagtgaggcttccagagaaagaccttgaccaaagggagaaaatatgatgaaagtcgtcagaatcaaaatggagtcccttgtgttaaaaaacaaacaaacaaacgaaactctgacatataaagccagagaaggctgagaagcattctcatgcataaacacctactagcaaaaactatcacaaaagactataaaaaacacagccttgcacaaaggccattgcaaccttacacaaaaaaatacttctgtgaggacagctgcccagcaactgcctgtgcgcctcatactggcatcacccttgttattgatccttgtagccaaagattatttcaaaacgatcatgtaatcgtcctcatttttcctttaaaaacctttgtcgtcttttacctccctgaatatacacatagtttatgatggtacgtgtgctcccactgcagtgcttggggaccaagctccctccacacctcactgttcccaaataaatattttctgttagagcctctctctgttcattatttagctcgacaggtatttggtacagcagccaaaacaggccaagacattgcccggaatcttccagcagtagactgggggcccggatttgaccctggtcagttggacacgggcttctctcactccaccagatgaggaacaaatagtgaggtgtggcgggagcttggtccccaaacagctcctccggccatttgccctccccacccacggaccagagacaggacgagggtgagccccggtgtcagccatgtgccccaaccccggtgcctcatttgctcctaggatgcgtcctgtaggtcatcttcttgcagctgtcccgctcagtctcccctcaacccctgctcatgctcttggtgagcttatcaatattatggtttccaatagcttctgttcatagtttcaactcatatctgtccctaagtgtggacttttattccacgcgttggcactggcagtcagctatgtgcctcctactcaaggcatctgaaactgcaggtgggtagttggctaagtcaggccccaaaagtgtcttcatccagattcccagaactgtgactctgagatcttacatggcaaaagggactttgcagatgagattaagccaatgatcttgagatgaggagaggggcctggattacttgggtggctccgaatgtgggcacaggtgtcacaggagggaggcagagggagacgtgagaaggagaaggtgccatgactccgaagccagaggctcctgctgatcctccggccccacccccaccccacggaccatgtggtctttttaaaacatgaatctatcaggacggcccattcaaacccacagagaggttcccactgcaccaagaacaaagtcagaactctcaggcctgacccactgccctcggccaccctggagccccagtgcccccagacccggtcctggcctcagagtgtaacaggctcgctcccaccacccatctgcatggcaggcgccttgccatcgcctcccctctgagagcacagacagccacagctggcctccgggtgaaaggatggatgaacagtcaggccgggcgagtgctctcagagcctgctggccaacggaggcagccgctcaggcctctgcctgagccatgtgcgatcacagctgctgcccagctgtcccaaggaggcagctcttggcttttcccctgggagtcgaattcgcagggagtcccatccacaggcccctgggaggcgggaagacatctcggtctccaaagccagtaacctgtgattcccctgaggatggtgggaacctggtgtggggcagatgatctgtatttgagctttgtttctctctagcaattatacctaggaaataccctaaaatgcacgacgcaatgcacattgaccccagcaaactccccaccctgcgcctgtttctagtgccggggctgctccagcacagcctgtgcacttgaccgaatgtctacagccctggccctcagccacactgtgttgttttcatgcaccttcacccaacagaattgctccaacagagtgattcagggggctgccctccagcaccacttcccctttccatgttacataaatgtccattgagtcctgactgactacagaaatctgtcttctgggggcatgtgatgccccaggtggcccagggccccgcacaggaatgtgtttacagctttcccggcactgaagccacagtcgtaactcagcctcctgacatgggccagggccctcgcctccgcacgctctgcagctcacccgtgtcgccacagcctgctgggcctggacgccaccctctgaggtggcactcggggcagaaacatctgtttccagctggtaacaaacaggacatgtctgcctcccacacctaaatcaatgcttgacaagcctggcctgatctcggggcgctcaccaccagccacctgcctgggcccagccgacctcctctcccttggtattttgagggaagggtctgagccctttctgcccccctagacttgtggacagaggccccccaagacctggacagaaatcaggccatagtctccagccccaaagagacttccagaggcctgcacctctcctctccagccgaggccctgatgtctgtggctgtggccacagccggctctatacctgccaagtttattctagaaaacattggtttggacaagacctcaaaacggaattgggaaaatgaaagagaaaagagaaaggatttctgctctcattgtaaggacaaaaagcaaattgaagaccagcactgatacagatcaataatcacaccagaaaaaaatatggcaaaatatctatattctcttaaggtgaataagtgttctctcagaatgaggctaaggccaggaacagtgaaaagtaagactgataaatttgcccacaaggaaaaaaataaagtctctataaggacaaagccaccaaaaacaaagtaagcaccccaggaaagaaagtgaccaaagtatctaacatgaaagagagcctgtattcgcatgagctcccgagaaacagaacccatagatgtggatgtggatatcgacagaaataggtatcaacatagacacaggctatggccacaggtatggatagagggagagatgcgagagagagattttaaggaattggctcacacagttgtggagacgaatgtccaaaatctgcagggcaaaccagcaggctggtgacccagagaagagctgaggctgctgctcccgtccaaagttcagcctgctggcagaattctgtcctccttggggactgccgtctgttttctcttaaggcctccaactgcctggatgaggcccacccacattatggatgatgatctgccttacccaaagtccacaggttgaaatgttaataacatctaaaaatcacctgcactatctagactggtgtttggccaaatatctgggtagtatggcctgcccaagttaacacctaaaattaactatcagagtccaagtaagtgaatgtaaaaaacaaacaaacaaaaaaaaaaaaacatgatgaatgagacaagctcgaccttgaagaagttttcagtggaacgtggggaagaggagttctctttagccagctgcagacacaaatagccaatagaacacatggagagtgttaaaagtcacaaatcgtcaatggaaagcaacttacaatgtgatgttcattgaacatctactgtgtgccaggccaagggctaaggtggacacgtgcagtgtgtctgcactgcggcactaaggtcctggtggggaatggataatacaattaaaaacaaatcacaaagaaaccagaagaggaaaaaaagcaattaaaaacaaataaatgctccataaaggacaacagcgccagctgagggtgtggccatcaatgccaggcatccagaatatgtccttggggacatggaccactgggaggtgcatcccaggcaaaaggagcaggaggggaagggtccaggccagaaacatgcttgccaagttcaagagcggtgggaaggccagtgggcttgggaaggagtgggctggaaggacaggccagaggccagactgcatggggccagactggccctgattccagccttggacttcactctgtggtgataggagaccctcagagggacttggggaggggttgtgtgttttcctgggagccacagaaaagtgagtgacactgggctgaggaaggaagtcacaggacccaccagtgtctgcgcaggagtcccagtggaagagcagaaaaaatccaggagaagatacaaaagtattcaaaagtaattcaaaatagcaaaaatccaaaatattcaataatttaaatggtattacttaaaatagtattataaataataaaaatatattattaaaaataatagattactggctttaataccaatgtacagaaatccgttttatttctatagaccagcaacaaacggaaaatgtgattcttataaagatgccagatgtctgcttctattaagggcatacagggaactcggaccagttagcaaatctgaaagaagtattttaaaaatctgtttgaaggtaatggagagataccagagtggtgaataatagccaccaaagtagctgccatttgcagtcacttccccctgagcccctccccaaaagcatttgctgattctgggatagtcagtgagaagctgagcagaaatcctgacaatcttagagctagggagaaaaactcagaggccaggactcaccaggagaaaggcgcttgggaagtacatgcactttggattagaaacccatggactttccttataggagcaaaggtgaaggaaatcatccctcacaggaactgcaaccagatgcactttattcaggtccttagaaaagctcaacctctaccactgggttaagttgatctcagattttgaattccaccaggaaccagccagaagcatatgaaaaccgtctctggaaaattataacgtcattttaggttcagttgctcaacccaatacttctgaatacagtatccagcacacaatcacaaagaaccacacatacaagtagacgaagcaacatgagtaagaacagcaaaaacggaagatcaacagggactccagacctcagctatgggaattagcacatgaagactttcttaatattttttatttcaatagcttttgggatacaagtagtttttggttacacggatgaattctatagtggttaattctgagattttagggcacccatcatccaagtagtgtacactgtacccaatatgtagttttttatccctcacctcccccacccacttgtaatcccagtgctttgagatgccaggaggtttgggaccagcctgggcaacatggcaagaccctatctctacaaaaaatgtttaataattacctgggcatagtggtacttgtctgtagcccccactatctgagaggttaggtgggataatcacttgagccagaagtttggggctacagggagctgtgattgaatcactgcactccagcttgggtgacagagtgaggccccatctctgaaaaaaaataaaaataagtaaaattttaaaactgataaaataacagtgctactaggtttgaagagtttaaacacaatctgaaaatttcatcataaattgaaaactataaaacacacatagcagatcttttttaattcagaattttagaacagaagtatacaatgaagagctcaaatgatgggtttaagagcagacttaacacagctgaagaaagaattagtgaatcagaagttggatcagaagaaaatatctagaatgaaggatagacaaaaacacagcatggaactggagggttaaaagaagagagtatccaccgataaggtctaacatataggtagttagagtcccagaaggagaagtgagaaggaagagaagaaacatttttaaagaggcaattgcagaaatcttcccaaacttaaggaaatatcctaccccatcattcatatggaataaaatacgtagaaaatctcatctaggccaggcgtggtggctcatgcctgcaatctcagcaactttgggaggctgaggcaggcagatcacttgaggccaggagcttcagaccaacctggccaacatggtgaaaccctgtctctagtaaaaatacaaaaattagctgggtgtggtagtactcatctgtaattccagctgcttgggaagctgaggcaggagaatctcttgaacccgggaggtggaggttgcagtgagccaagatcgcaccactgcactccagcctgggtgacagagcaagactctgaagaaaataaaataaaataaaaccacatctatccataacattataaaactcctgaagactaaaaaaaaaaaagaggctatcttaagagtagccaaggtcggggaagctcacaatacctttaaaggaggaccagtgaggctggcagctaatgtcgtaacagaaacaagaacagaatgagatgctgtcttaggctggcagctaatgtcgtaacagaaacaagaacagaatgagatgctgtctttacagtgctaaaagaaatacctgctaagccagggaaactatctttggaaaataaagatgacttttctttttctcttcttttcaattttcattccctagggctatcctaacaaggaccgtaaagaacagaagtgtattcttgcacagctctggaagctggaagtctaaactcaaggtgtcaggagggctgggctctctctaaagcctctagggtaggatgcttcttgccccttctagcttctttttttttttttttttatttctaaaacgactttattgctaagaaccatgattattacttaaaatagatttttcagttactgatataaaatatgttccttttgagaacacatggacacatagaggggaatgacacacactggggcctattggagggtggaggccgggaggagggagagggtcaggaaaaataactaaggggcactaggcttaatacctgggtgatgaaatcatctgtacgacagatccccatggcacacgtttacctgcgtaacaaacctgcacgtgtacccctgaactcaaaataaaaggttttttaaaaaatgttctttgtgcttctaaaaatgtctaaataatcctatatgcatttttcttatttgcctcttatgcgtagcttacagatttaaaagtacaatgttgcttgttttgtattcatcttggtggatctaataatttacaaataggacataggcatgctgatacagtcagcagttaattcctccttctgacagtggggtttggacatacaaccagcaatgcgtgcaggtggagagacatagaggatctttttttttttttttttttttgagatggaattttgctcttgttgcctaggctggagtgcaatggttcgatctcggttcactgcaacctccgtctcctgggttcaagcgattctcctgcctcagcctcctgagtagctgggattacaggcatgcgccaccacgcccagctaattttgtatttttagtagagatggggtttcaccatgatggtcaggctggtctccaactcccaatctcaggtgatccacccgcctcggcctcccaaagtgctgggattacaggcgtgagccaccacgccctgtacgaagttttaggtcatctgtgattcacaaacgaccggcttcgagaagctctggaacgtgccaaacaaggcactgtggagtagtttggctccatgtgacctaagagaggaaaatctgttgtctttgggaacattacacaattcaggtaagatatgtgcatattctcaagggaaatttaaggtgctcatactcaataaataaacacaagagcagcgttacagataatattcaaagagacagaggcttcttcatacctgatgtggtgggaagaccactggatgactggacactgagatacgtggttgacagtctcgtctctgaaacacatgatttgagttttgagcttagacaaacttgtttttctccagcatcagttttttcatcagtaaacaataataataatactgtgtttatgccaacatcattaggaagatcactttaaatggtgtatataaaaggatccatcaactttaaagccagtacccaatatacactcatagatatcagcgtattacagaaaaatagtatttattttgtggtcaagcatatctggattctaatcccaattctactaattgctcccttatcttttgtgtcccgtgatcatcaatgtttttatcattagaatcttgataatatctagctcaccatgtttttctggaaattatatgagataacatatgcaaaggacttagtgcagcaccagatgtgactcttccagctcctgtggttgccgactgccctgggtgttcccgggcctgcagacgcatcgctccagcctctgcctctgtcttcatgcagtgttctccctgtatctgtgtctaaatgtttctcttcttataatggcactggccatagtggatctaggacccactctactgtagagtggcctcatgttatcgtgattatatctgccaagtccctctttccaaataaggccacattctcaagttcttggtggacataaatttgggggtgactctattcaacccagtatactttctcttcctgagaagagcagtttggactcaaagctgttcggtgggcagatcaagggttggggggtgtctgcatggtgggggtaggaggagagatgcaggggcccagagcgggaagccagtgtggagtccaggctcggagcacccacatgagcagaggtgggcagcctgatatagaaagtcagatcttaagtggggtgagaagggttccagatggggaggagtgcacactagaatggagggggagccagaatggcagaggggaagggagtactggcagagagggcaggttggtcacacaaggggattggtcaagtaagtaaatacaccgaaaagaatagaaaagagagaaggcagttccaaataccaaaagggagtgatatggtttggatctgtgtccccacccaaatctcatgtcgaattgggtttcaatctgtgtccccacccaaatctcatgtcgaattgggtttggatctgtgtccccacccaaatctcatgtcgaattgtaatccccggtgttggaggtggggcctggtgggaggtggttggatcacgggggtgggttctcatgaatggtttagcaccatccccctagtgctgttttccttatagagtcctcccgagatctggctgtttaaaagcacgtggcacctccctggtctccttttctcctgctccgggaatgtaagacatgcctgcttcccttcaccttcaccttccaccatgattttaagttcctgaggcctccccagaagccaagcagaagccactatgcttcccggacagcctgcagaaccgtgagtcaattaaacctcttttccttataaattacccagcctcaggtatttctttatagcagttcaagaacagactacagggagaaactggaatgaatcctatggtactggattggaatttgatccgtaagtttgaattcatggtttctaacataaatagccattatataggagttgtcctgatttgtagaaaacacactaaaatattcatgaaggaggaggtgtcaggtcaaaaaaatactctcttgaatgattcagataaaaattgtttgtacttttcttgcaacttccaatttttggctgaagctaaagaaatattttcagacaaaacagaatatttgttgccagaagacacacactaaaggaactgcttaaagataggtttaagaaagaaggaaaatgatcccagaggaagcctcagagatgaaaaaaagaatttaagagtgtaaagtacacaggtgagtacattttaagagttattaactaataacaatgatgatgtgatggatagtgaggatagaaaattaaaacaattcagatgcatagcaataacatataagtaatgaagggctaataacactgcatcatcatatctgaaaagaagatcaaagaattagtgacaaatttcttgataaatttaactaatagaaaaaaatgcaactgtaagaaagtccatccaaagggaagcaaggaaaaagggataaaagaagaccaacaaggacagcattatctcacttatttgtggaatcttaaaagagttgagctcataaaagtagatattagaatggtggttaccagaggctagaggcagagagggagagaatggagcgtggttggtcaaagggtacaaagtctcaggtagacaggaggaataagttctgagatctattgcatgacagagtgactatattcagtaataatgtatattttgagataactaagagagtaaattgaaagggtctctccacaaaaaaataagtaaatgaggtaacagatatattaattagcttgattcaatcattccacgttgtttacatgtatgaaaatattgtggctgggcacagtggctcacacctgtaatcccagcactttgggaggccaaggcgggtggatcacttgatgtcaggaatttgagaccagcctggccaacatggtgaaacctagtctccactaaaaatacaaaaatcagctgggcgtggtggcacatgcctgtaatcctagctacttgggaggctgaggcatgagaatcacttgaacccaggagacagaggttgtagtgagctgagatcatgccactgcactccagcttgggtgacagagccagactctgtctcgaagaaacaaacaaacaaacaaaaaacattgcattgaactccataaatgtatctaattatgatttgtcaattagaaattatattaattttaaaaccacattgctagataggagatttaggctcaaatatatcagtatttacattaaatgtaaatgggctgggagtaatgtcactgaaaatggcagctccaaaaatgtgtcccttcacgaaagcaacaattaagctggcaaaaaactgacagaattcattttttcataactctagaatataaccaaaaacttaaaacaaagggtgcttaatgaagaaagaaactgctaaatttgggtaagagagaattgtggaattttcttacctgcctataaagccctcattttccagctcagaagtagccagggcaacagcagcccatcttcccggtgtggtttgctggtgccagagggagtaaaaaagccgttgtcatcaaagaattgtgcttgcgaatctcaacctatctgacagctctctgagggatcagctcaggatcttgcctttgttttgctcaccctgctcctgcccttcctcccctgtgtcctacccccaacaaacacacacagaattctctacaggatggaacagcctcctgggcagcatacatggaaagtatttaaaggtatatacttgtcacaaccatctaggtcaacagataatagaaagggaaaacagtagacaggctaaaacgcctaggaagaaaaaggctaaggaaggaaacgtggggaaatgagaactttaaaaaactcccacatatactaaggaattcaaacagccacatgtatttctagatgtatgctcagataagacctgagaagaccctaagcttttacctctggctggtcattaggcttcacatgagcaggaagtaaaggctaaggcagagttgtaaatgacctggttaagtgttgcagcagtgctctaacccagagccagcctgcaaagaacaggagggtcttcttcctctttctttctttctttcttcttttggcttaagaaatttaagaagatctgtgaaaacactagctgaccactaaactaacataacaaagatttcagtggccacatatgacaaaagtcttcacaaaagtagtttagacaagtcactaaacaactataacacaaaacaagcagcaataacaaaccctagggagaagaaagaatctagtttcccatattataatatttattcaaattttccagtttttaacaaagaagtatgagacatgcagaaaaacaagaaatatgaccctttcacaggaaaaggtaaattaacggaaacttcccctgaggaagcccaggctgtgaacttactagaaaaaggccttaaatcaactgtcttaaatattctcaaagagctaaaggaaaccaggagaacaatgcctcagaactagtgattatcagtaaagagatagaaattataaaatagcgccaaatagaattcttgaaatgcaaagtactgtaactaaagtgaaaaactcactacaggttcaagaggaaacttgagcaggtagaagaatcagtgaacttgaaggtaggccaattaaaattctcccaactaaagagcagaaaaaagataaggaaaatgagcttaatttgaacaatatgatcaataaatttgatctactaggcatatacagaccttagaaagagcagctacagaatgcaccttcattttgagccaggtggaatattcacacattataccatttatgaccacaaaggaagatttaacacattttgaaaggctaaaagtatttagttatgatgtgatcacagtgctaagtcagaaataaataacaaagaggtaagttaaaatacacatatgcttggaaaataagataaaaactgctaaataaccctgaagctaaagaagaaatcataatggaaacattaaaattttaaaaagtttaaaatatttttaactgaataataagggaaatactacatatcaaaacatggtgagatgcagcctaaacagtgcttagaggaaaacttatagccttagaagcatgtattatgaaagataaaatcctgaaagttgatgaactaaaaattcacccgaagaagttaaaaaagaatgtaaaaccaactgaaaatagaaggaaagagatcattaaaataatataagaaaatgattgaactgaggataataaagcaaagaaatgatcaaccaagtgaattaacaaaattgataaatctctgataacacttgttggggaagaaaagagaaaatgcaaataactaatgtcagaaataaaaagggacgacacacacatcctgcagatgtttaaaatgtaaaaaagaatatttgggaaagctttaagctactaagtgtgaacaattggatgaaatctaactggataaatgtaagtatttaaaaagtttaatctacaatttataaccttaccccagagaaaactgtgaaccagacatgatttcataggggatttctgatcaatatttagggaaatatcaacactcttagacaaactcttccagggatctgaagaagagtccatgccctgtaagctactgtatgaagccagtgtaatctgagttccgttgggactgcaaccgataaagtaattcatcacagaaatgacctcaggaaactggccttcagaacgggcttctgggaagttgtctcacatatttgaggaccacaggcataattcattgcccgcaggaaatggggcagccatacatgacatgtggtggcaccatgatgtctcagactgtcactgacaggagtgcatccaaagtacaaggagagaaaaaggcatgggcaggtcaagatgcagtagcactttgttgtcatggcaacaagagggctgctaaagattatggagtcaccaactttttctcatgaccatagagagtgtacacaggggaaaagaaacagtgaaagctatgaacatagcaaaaagaacatatacagagagccatggacgcttgaaggagtcccttacctcctggtcatgggtcagatagagctgatacccaaccaattcactacagatgaaagtcttagaaattgtggggctacaacatgcaaaggtttatcatcatcccacataacactaaacaggaggctctaactgcattcttgttggacatgtatccaatttcagaatagtgttccaagaatctgcctcctaggaccacttttgttggtgtcagggatccccagaagctgatcttgagagaatattttaagtggacagtttgtttgagaggtgatgccaggaaacactggtggaagagttggggatgaaaggaagccaataaaaagtgcactaataagcatgttaccatggaaataactgtaactgaaattcaccagggccctcaggaagccagtgtcaaacaaacaccttctcagtacgtccccccaacacacaccagcagcaagggagtttggggtatttatatgctaacttattagtcattggttgatggcagtttgtgcagagcaaaatcctgtgcaacttcaggcctgttgtgcacagaaaccctgactaccagagaaaaccctcaggcaagaagatgcagatgctagcagtttgaggttacaccagtatacactaaagtgtaaaggcccaaggcacctggagtgcaccaaaaactattgccacaggtgtacaaatgttcaaattaacaagaaaatgccatgtcatcctccaaagtcatggcaccaattcacattcccatcagcaaatctgagaccttatccaataccaatatcctgacctgaaactagatcatcatttatttgcatctgtgtttccttcttttatgtatccttttgtctcttgatcagagttagccacactctttattttgtatgcatcattccctccctttccataaaaaaaatttatcaaatatggccgggcgcagtggctcccatctgtaatcccagcacgttgggaggccgaggcaggcagatcaccagaggtcaggagttcaagaccagcctggccaacatggagaaaccccgtctctactaaaaatacaaaaattagctgggtgtcatggcacacacctgtagtcccagctactcaggaggctgatgcaggacaatctcttgaaccttggatgtggaggttgcagtaagccaagatggcaccactgcactccagcctggatgacagaggcagactgtctcaaaaaaaaaaaattatcaaatatgtatgtatatctgaacttgtctgattctgtttgcccttgagctatgtaaaattatatcatactatatgcagttgtctgcattggcattttttaccaatttttttacatcttgtttccaagattcatctatgttgttgtggggagttgtaatttattcacttttactgctgtataggtttccagaatttattttccttggataattgtttcaaaatttttctattattagctgccttactattgcattcttgttcctgtctgttgagatcctgttataggctgaatatgtcctcacctctccccaaattcatatatggaagccctaatcctcaatgtgatggatttggagatggggcctttgggaagtgattagtttttgatgaagtcaggagggtgggcgcccacggtggtggtggtcatgagggtggtcctcataggaagaggaagaaacggaagagcctcactctctctgccatgtgaatgcaccatgagaaggtggccatcttcaagccaggaagacagccctcatcagaacccagccacgctggcacccagattctggacttccaacctccagaacaaagaaaactaaatttttgttgtttaagccacccagtctatggtatttttgtcaggacagcccacactaagatggatactagtgggagagtttctctatgaaatatgcacaggagtggaagtactgaggtatagaatattatccctatttagttttctggaaagtgttttatcaagcatgttaccatgacaattaactagagtctaacacctctggggaattttgattatcgttgtagaatatatgccttagaattatcaccagggacaagtgacctcaggcatttacacacacaagctcccatcagccatgggttaagagctgctccaatgagtactaattcctggcacttctgttctgtattcatttaggctctggaagccacaggaagcaatcagacaaaaagtttcaggtgtcgtggctgggcatagtggcttatgcttgtaataccagcactttgggaggctgaagcaggaggatcacttcagcccaggagttcagaaccagcctgggcaatatagtgagaccacatttctacaaaaaatttaaaaattagctgagtgtggtgatgcatgcctatagtccctgttactcagtaggctaaggcagaaggatcgcctgagcccaggaagttgaggttgcagtgagccgtggtctcaccactgtgtgcattccagcctaggtgacagagcaagactctctctctctctctctctctctctctctctctctatatatatatatatatatatatatatatatatatatatatatatatatatggctgggtgcagtggctcatgcctaataatcccagcactttgggaggccaaggcgggcagatccctgaggtcaggagttcaagaccagcctggccaacgtggtgaaaccccacctctactaaaaatacaaaaattagccaagcatggtggcgcatgcctgtagtcccagctatttgggaggctggagtaggggaatcattgaacccagaaggcggaggttgcagtgagccaaggtcatgccaccacactccagcttgggcaacagagcgagactctgtaaaaaaaaaaaaaaaaaagaaaagaaaagaaaagaaaaaagaaaaaaaaaggaacacagaaggcacaaacagcatccactacagtcacccctcgcatgtctaaggtgcacttgcaccccacagtgatgtcaccacttcctattatttcctctgaaaatgaacccattttgagatgggcttgggccagaattacccttacccactgatccctgtaaacactcactctaacaggtgaggagtgaagagaatagggaggcttctatggtattctggtccctcaattcattatctgggttcgtggaacaactacagattctgctgttgcaactgatcccgaggccttcattggcctttgtcatctcccttttggagataggtttctaagggtttcccttgaccatggcaagaacttctgctgggctatgctctatgcctggtgggatgatccaaacctccattttctgcagaattacagaccccaacaaaaatgtccttattccaggtcttgaggtcccactccttcattattggggtgctttccttagtggaagagaactttgagctcctggattcagccttctttgtaatcccactactcttacaatcaggttctgggcccaattttcagtagtttcttctccagctgcaggagatggagttttttctaatgctgtgatgaaggttttctgaaatttgcaccatttcctgagttgaaaggggttcaactgagcctgttgttatatttcttcagtgattcaatttcactaaacaacaaccaaactattccaccattcttatgatcctgtctttctcaaaggccagagaaattacataaggagcacatcccccaacactgtaacactttctatctatgtcccattatcataatgccaggagaagttatttacaaagggttatttacaaaagtgcaagtgagatgtaagagaaccactagggatagtgcagtaagccaggttaggtaacaggagggctgttgctgcccacaaaaccaaatctcaaggtgttttagacaagacacaaactgtaaaagacttattggtaaatttaactatacaaaaattaaaaagtcatgtccatcaaaagataaagaaagtgaaagacaagtcacaacccgggaaaatacatatgcaacacctaaacttaacaaaggaatattatcaaaaatgtgtaaactcctacaaataaagaagaaaaggataaatatcccaatagaaaataaaggccaacagcttaggcaacatggcaaaaccccatctctacaaaaaatacaaaaattagctgggcatggtggcacacacctatagtcctagctacttgggaagctgaggtgggaggatcgcttgaccccaggaggtcgaggctgcagtcagccatgattgtgccactgcactccagcctgggagacagagtcagaccctgtctcaatcaatcaaccaatcaatcaagtaaaataaagaccaaaagacacgaacaggtatttcagagaataaaaaaaatacataaggccaataaacagtttagaaggtgtcagcttcactagcaatcagaaaaaaagtcaaatcaagagaagaatattcaagaaatcatgttagcaaaatgatgttggcaaaaattaagaagttgaaccataatcattaagacatagattcacagcctccaagtacgaatgatcctccgacctcagccccccaagtaactgggactacaggtgcatgccaacatgcccagctaattttttttcttttttgtttttttcatttatttgtagagactgggttttgccatgttgcccaggctagtctcgaactcctgtgctcaagcaatccgccccatcttggcctcccaaagtgctgggattacaggcgtaagccaccccaccgggcccagaatgctttcttaatctaaaaactcccctaagtggccaggcgcagtggctcacgcctgtaatcccagcactttgggaggccaaggcgggtggatcacgaggtcaagagatggagaccatcctggcaaacatggcgaaaccccgtctctactaaaaatacaaaaattagctgggcatggtggcgcgtgcctgtattcccagctactcaggagactgaggcaggagaactgcttgaacccaggaagcagaggttgcagtgagccgagatcacaccactgcactccagcctgggcgacagagcgagactccgtctcaaaacaaaaacaaaaaccaaactcccctaagtagggctattttcctgtccctgatgccaccttgacaacataagtcaaccactgttccacatttgtcttttaggaacgccccaggactgttggctgctgtccatggtgctgccttggtcagacacgtggtgtccaagctgctgtccgtggttttgctttcatttttctgtgtagcataatgatttttttgtttatttctttgtttaattaattgattttctctttttagaacagcgctaggtttgcaaacaaattgaacaaaaagtccatagactttttacatacccagcgcctctctatacatatacagtgtcacctactgtcattgtgcatctgtatggcacatttgttacaaatgatgagtcgatattgatacattatcattaactgaaatccgtagtttaccttagggttcactacttgtgttgtatagttcatgagttttgacaaatgtgcaatgtcacgtatccaccatggcagtgttatgcagaatagtatcccctatatttcactattcattcctgacccctcaccccaaaccctggcaactgctgatctttctactctctctgtagttttgcctttccaaatatatagtttggaaacgtacattatttagccttctccaactggctgctttcacttagcaatatgtatttaagattcctccatgcgttctgtggtttaatagttttttgtttttgttttttgtttttgatagggtcttcctctgtcacccaggctggagtgcagtggtgcaatcatatttcactatagcttcagcctcccaggctcaagcgatcctcttgccttagcctccaacacagctgggattacaggcaccaccatcatgcccattttttaatttttcatagagatggtatctggctatattgcccaggctgatctagaactcttgggctcaagtgatcctcctgtctcaacctcccaaagtgctgggatcacagtgtgagccaccatgcctgcccttgatagctcactttttattgctgaataatattccactgtccggatgtaccacggttaactgaaccattcacctgtgaatggtatcttagttacttccaagtttggcaattgcgaggaaagctgctataaaagctcacgtgcagatttttgtgtggacataagttttcaactcatttgaataaatacctaggagtgtgattgtatggtaagataagatttagcttttaaaactgtcaaactgtcttccaaagtggctgcaccatttgtattcccaccagcaatgaaagagagttctttatgcctcacatcctccacagcatttggcgttgagagctttttgtttcatttgttttctttgggattttctccattctagtagctggtcgtggtagctcattgttgttttcatttgccatcccaatggcacaccacgtggagcatattttcatgtgcttatttgccatccgcaagccttctttgctgaggtgtctgttcagatcttttgcccatgttttaattgggttgcttgttttcttattgtttaaatttaataatggttctttaagtgttttagatacaagtcttttatcagatatatattttctcctcccagtctgtggcctgcctttttcattctcttgacaatgtctttcacatgtagacattttttcattttaataaacctcagttaactaatttttctttttatacaaattgtgatttttgtgttatatctaaaaactcattgccaagcccaagatcatctggattttctcctgttatcttctaaaatttcatagttttaggctttacatttgggcctatgatccactttgagttgatttttgtgaaaagcataaggcctgcgtctagattcttttttttttttttttttttttttttgctttggtgccatgtagtgaaaagatgacgctttctccattgaactgcctttgctcctttgttgaagatcagttgactatgtttatgggcgtctattatcagaaaattttgttctatggatttatttgtctatcctttcaccaattccacactcctgattattgtggcttcacagtaagtcttgcataaaagttgggaagagtcagtcctctaactttgttcttcttcaatattgtgttgtctcttctgagtactttcccttcccatataaactgtagaatcagtttgccaacatccataaaataatgtggtgggaatttgattaggattgtgttaaatctatatataaagttgggaagaactgacatcttaagaatattgtttttcttttcatgaacgtggaatatctctcgactgatttagatcttctttcatttcttttatcacagttttatagttttcctagtatatatcttgtatatgttttattagatttatacccaagtatttcagtttctggtgctaatttaaatggtattcggttttccactttaaatcccaattgttcattgctggtatatagggaaaaaatggcttttgcccattaaacttaacgtccttcaaatttgcttttaggccattcttgcgttgctataaagaaatacttgaggttgggtaattttttttttttttaaaagaggtttaattggctcacggttctacaggctgtacagaaagcatggcagcctctgcttctggggaggcctcaggaagcttccaatcatggcaaacagcaaagggagagaagccatatcacatggccgaagcagaagcaagaaagagactctgtggagggggaggtggcacacacttctaacgactagatctcgtctgaactctgagcgagagctcactcatcaccaaagggctggcacaaaccattcatgaggatctgcccccatgatttaaacacctcccagcaggccccacctccagcattggggattacatttcaacatgagatttgggtaggaacaaatacccaaactatatcattgctataatcacttattagttccaggaggttttttgtcgattatttgggattttctgcagagatatcatgtcatctgatgacaaacgcagcttcatttcttctcctccaatctgtatatcttatacttgcttttcatgttttaatgcattagctaagacttccagcatggtgttaattgggactggtaaggggacctactcacctgttgcttctcaccatgaagtacaatgttagcagtaggttttttgtagatgtcctttataaatttgagagtattcccctttattcaaagtttgctgagagtttttatgataaattgagttgtattttgtcagacacttttttgttatctattgatatgaccacatgagttttcttaatcttttgaagagatggattatattaattgacttttaggtggaaagcttatattaattgattttgaatgtccaatcagccttgtttctattactgagagttctccagattaacagaaccaatagaatagggtgtgtgtgtgtgtgtgtgtgtgtgtgtgtgagagagagagagagagagagagacagagagagagagagaattttaaggaattggctcacatgggtgtggaggcctgcaggtccaaaatcatcaaatcggtagtgtggaacctgacctagggaagagatgatgttccagcttgagtccaaagatcttctggaggcaaaattccatcttcctcaggggacctcaatctgtcttttttaatagtcttcaactgattggatgaggcccacccacattttggaggatgatctgctttacttaaagtctaacaacttaaatgttaatcctgtctaaaaaaataccttcacaacatccagactgatgtttgaccaaatattgggttccaagacctagccaagttgacaagtaaaatcagccatcatatttgcatacctgggataaatctcaatgggtatattattttttatacatggttggatttcatttgctagtatttcattaacattagattttacactgtcgatattgaaggtaagcaatctttgaaaaagactactagaactcacccatagctgtttttctccttcctttgactcctgctagactgtgtttcccagtgccatcacatgtggatggagacctgttaccagttctgttcaatgagtaatgtgaataagtcagacagtactttgaagagttgtgatgctgtaacaaaaaataatattatgtggctcatgcctgtaatcccagcacttcgggaagctgaggcaagaggatgatttgaactgagtaattcaagatcagcctgggcaacatagcaatactccatctctagaaaaaaaattaaaaattagccaagcatggaggcacatgcctgtagtcccagccaccagggaggctgaggtggaaggatcacctgagcctgcagaagcagagggtgcagtgagctgagatcataccactgcaccccagcataggtgacaaagtgagactctatctcaaaaaaataaaataaaaaacttgccttagaatatgagaagcagttagcaaggaagctggtgtcaggctggaggactgcagatccttgtcatgccttaataaatcagttgttaacatttggaaggcagagtccctgcctattcagcctgcagctctagggtaagagattgcaaaatcaagtattaagagtttgttggctactattagctcccttcattaattaactagagaaaagaggttaggtcagagaattggtggctttgtaagcaaaaattttaaaagaatagagaaaatccaaaacttacaaggagggagtggaaaagctggcttcttctagaacccaaacaagacaggacaccaagaaaggttttagatgacgaggatggccaaggtgtgatttgcagtgtggccttcccatccatggcctctttcacagataatctaatttttaatttattatttttgtggatacataataattatatattaatgtatttatggggtacacatgatattttgatacatgcctagaatgtgtaatgatcaaatcggggtagttaaaatatctatcacctcaaaatttatcatttctttgtgttggaaacatttcaaatcttctcttctagctattttgaaatatacaataaattattgttaactatagtcaccacactgtgctgttaaacactagaacttattccttctaaccaactgttttgtgtgtgtgtgcgtgtgtgtttttttttgagacagagtcttgctctatcatccaggctgaagtgcaatggtgcaatctcgactcactgcagcctccgtctcccgggttcaagcgattctcctgcctcagcctcccaagtaggtgggattacaggcacatgccatatgccctgctattttttgtacttttactagaaacagggtttcaccatgttgtccagattggtctcgaactcctgacctcaggtgatccacccacttcagcctcaaagtgctgggattacaggcgtgagccacaacacccaacctacccaattgtatttttgtatccattataccaacctctcttatctcctccccacagcagtgatccttcccagcctctggtaaccaccattctcctctctacctctatgagatccacatttttagctcccacatatgaaagaggacacatgatatttgactttctgtgcctggcttatttctctttaacataatgacctccctttccatccatgttgctggaaattataggatttcattcttttttatggctgaatagtattccattatgtatatataccacattttctttatccatttatccattgatggacacttaggttgataccctatcttagctattgtgaacagtgctgcaataaatatgggagtgtagatatatctccaaaatattgatttcctttcttttggatatatatgcatcagtgaaattgctgaattatatggtagttctatttttaattttttgaagaacttctacactgttttcaataatggctgtactaatttacattccaactagcagtgaatgagcattctcctttctccacatcctcatcagcatctgttcctttttgtctttggtaataactattctaaatggggtaagataatatctcattgtgatttcgatttgcatttcctagatcattagtaatgttgagcattttttcatgtacatgttggtcacacttgcatgtcttcttttgagatatgcatattcatgtcttttgtccattttaatgggatttttcttgttgtggagttgaattccttgtatattctgaatattagtcccttgttggatgaattttatcccatcaaaaagttgactcttcactctgttgactgtttccttgctgtgcagaagctttttagtttaatatagtcccatttgtctatttctgtttctgttgccagtcattttgaggtgttagccataaaatatttgcttatgacaatgtcctgtagtgttttccctgttttcttctagtagttttataatttttagtcttatgtttaagtctttaatacattttagttgtttttttaattcagtgagagattgggacctagttttattcttctgcatatgaatatccagttttcctagcatcatttattgaagaggctgtcctttcccagcactttcattgaaaatcagtaggctataaatatgtggttgttttgtttctaggttctcaattctgttccattggtctgtgtctatttttataccaatgtcatgctgttttgtttcctatatcctcatgatatattttgaagtcaggtagtatgatgcttccagctttattctttttcctaagggttgctttggctatacaagctcttttttggtttcataataattttgggattgtttttccatttctttgaaaaaatgacattgatattttaatagcgattacattgaatctgtagattgctttggatagtatggtcattttaacaatattaattctcccaattcatgagcatggaaggtctttccatttgtttgtgtcctcttcaatttctttcatcagtgccttgtagttttccttgcagaagtctttcacctccttggtgaaatttatttatatggatttttgtagctattgtacatgggattgccttcttggtttctttttcagctagttcattatcagggtatagaaatactactgactttcatatattgatttgtatcttgcaactttactaaatttatttatcagacctaagagtttttggtggagtctttgggttttttcctttcagccagtatatatcttttaagtggaaaattctatctgtttacattcaaggttattattgatacgtggggacttatttctgccattttgttggttgttttcttgttgttttgtctatcctgtgttcctttctttctctcttattgtttatcattgtggcttggtggttcctgtagtggtaacatttgtgtcttttctcttcctctttttttgtatttgccgtgcggctgtaagttttatacatttatgtgttttcacgatggtagagatcatccttttgcttccaagtatagaactcccttaagcatttcttgtaaggccaatatagtggtgatgaatttccccaggctccagtggctcacataggtgctggctgtggtgggcaggatgggatgatcctttgccccacccagtaacagtagcagtgtgacgggagagcctgtcctcagggcatgtgaagtgcacagtggccctgctatggggtcactgcccgtggcatgtacttcagccctggaagcagcagcagcttcatcatagcttatttaattcagcggaccaagagcataaacacctgagcttcctctttttatctgctcattctgcttcccaagttctcaaggacttatgtggacagtcttcccgcacttgccaaaaactcagttcattctgttataaatctcagtgcctctacctgctacagacacggagctcaccccgtcagtggcaccccttctgacccagaagtgtccctaggtgtcttcgtggcctctgccatgggtgctggtatgccattgtgggaggtggggggcagtgggagtcaggaggttgctcctctgggtggagctgcctgccaatcaagatcctgactctacctccaccccatgtgaccaggctgcaggggcaggccttagtgggcaccggtggtgccctggtcacaagacaccctggaggtgaagggggccttccaattctaaagctgtagctgcagacttgggcagtgcaaatcctgtcaggaccaaacaccaaattctatcacccactcaagcttgaagttaagtgggagggagagagtccctgcaggacccttgctatagttggatgtttgtcccccaagacttcatgttgaaattcgacccccagtgttggaggtggagcctggtagaaggtgtttggattttgggtgcagatcccaaaatgctctcctttgagggtgagttctcactcttattcctgctagagctggctggtgaaaggagcctggcatctcccctctttcttgcttcctctctccccatgtgatctctgcacataccatggttcttgtacagcctgcagaaccatgagccaaataaacctcttttctttataaattacccagcttcaggaattcccttatagcaatttaatggacaaagacaacacctgacagccactctcccacatgcctccagcaatgctctgtgggtttgcacctccaactaagtcatttaggcaggatttaatggaaggacaccttgctgacacagatctgggctcagtgcaagagcccctgggacactgaggactccagagctggctccggcagagtgaagagtagcagaatatgccactttcaaacaagaataattttgagccgaagacaattaaaaagaagcatacccaagaaaaaaatccctgcccactccctttctaccaggaaaagcagaggattcttagtccttggagacaactctagatgcttatcagcccagagaaggcactagaggaatctacacaacaaactagcaagctatcttctgttagcttcccctatatatttacttcccagaatttgctgccctacaggttgaaagcccctttcctttgtcttgccaattctgtaaaaatgattgcccatttgctaagatgctccgtaagctcacgttccaaccgcccctttgaattcctcatctctgacggctcccacatagaggcataatgcacatgttagtaaacttctgtttgtttttctcatgttagtatcttgttaatctaattgacaagaccccagctaatgaacctaagatgggtagaagggggaaaaatgtttcttcccctacaagagcaagcacctccccacacactggaggaggagagagagccgctccgagatctgcaggaacagaggctccttgggctgtctgttgaggaaggcaataaggtccaggcaaccctgcaaggagagagccagggtcaccacttagcatcagcatccccttcctctgatctcctgcaggcagccagcccacccaaagagctgacccatccagcacccaaggagtgaggcaggccagagtccactccaagggcagaggctgtggggcaggtggggagccagcctggaggatgttagcagagccaggtgggtcatggcacccacagcctcggggatccagcttgagagagaccctgagggccaggcttgtcagagctgataacagatgagttgtgatgacagggctcattgtcagacactgtaggctgtcaggctgtcaacctgagcagactaccaagtcttcccatccgcaaaacagctcaccccagctatcaggggtgggcacccagaggagagaccattctcatctccacctgaactcttttggtgctcccagaacattctgatgctgaaaaggagtgtagaatcagatagaaacaattcctcttgtagcttccatgatggttggatggtaaagtacaactggctttgttagttcattttgcattgctgtagaggaatacctgaggctcagtaacttataaagaaaagaggtttatttggctcagggttttgcaggccataaaagaaccctggtgccagcatctgcttctggtgagggcatcaaggagcttacaaccatggcagaagttgaagggggagagagcatgtaacatggtgagagagagagcaagagagggaaagaggaggtgccaagctcttttaaacaaccagctcttgtgtgaaccagtagagcaaaactcactcatcaccaagaggatggcagcaaggccattcatagggatccatggcatgacccaaacatttccactaggccccacctccaacattggggatcacatttcaacaggagatttggaggggacaaatatccaaaccatgtcactccacactgtccccccaaatctcatgtccctctcacattgcaaaatataatcatcccttcccaatagtgcccaaaaaatctcaacttgttctaggatctactcaatcaaaactccgaagtttcatctgagactcaaggcatgccccttccacctatgaggctgtaagatccaaaacaagttgctacttccaagatacagtgatggtacaggcattgggtaaacatttcccttccttccaaaaggaataaattggccaaaagaaggagggggaagaagcaacaggccccacacaattctgagagaaagacattaaactttaaagctccaaaataatccttgactccatgtcctgcatccagggcacactggtgtgaggagcgggttcccaaggccttgggctggtctgcccccatggctttgcagagtgcagcccacatggctgctctcatgggttgtagttgagtgcctgaatcttttccaggctctgggcgcaagctgctggtggctctaccattcttgggtatggagggcagcagccccattcccagagctccactaggcagtaccccactggggactctgtgaaggggctccaaccctacattttccctccacactgccctactggaggctctgtgggagaactccacccctgtggcaggtttctgtctgggctcccaggctttcttttttgtctctctctttttttatttttatttcaatagttttaggtttttggttacatagataagttctttcatggtaatttctgagatcttggcacacttgtcacccaagcagtgtacgctgtacccaatatgtaatcttttatccctcacctccatcccccacttgccctcaagtatccaaagtccattatatcattcttatgcctttgcatccttatagtttagctcccacttataagtgagaacatatgatgtttgtttttccattcctgagttatttcacttagaataatggcctccaactccatccagtttgctgcaaatgccactattttattcctttttatggctgagtagtatcccatggtgtatatataccacattttttatccactcattggtcaatgggcatttaggctggctccatatttttgcaattacaaggagttgcaattgcactgctctaaatatgtgtgtgcaagtgtctttttcatataatgacttatttttttctggatatcgaatagtgggactgctggatcaaatggtgattctacttttagttatttaaggaatctccatactgttttccaaagtggttgtactagtttacattcccaaccaggagtgtaaaactgttcccttttcaccatatccatgacaacatctgttagtttttaatttttaattatggtcattcttacagaagtgaggtggtatctcattgcagttttaatttgcatttccccaaaaattagtgatattgagcatttctttatatgtttgttggccatttgtatatcttcttttgagaattgtctattcatgtcgttcgcccactttttgatggtattttttttattgatgatttgtttgaattccttgtagattctggatattagtcctttatcagatgcatagtttgcaaatattttctcttattctgtgggctgtctgtttactctctgattatttcttttgctgtgcagaagttttttttgtctaattaggtcacatttatttatttatttatttatttttggttttgttgcacttgcttttgggttcttgatcatgaactctttgcctaagccaatgtctagaagagttttaccaatgttatcttctagaattttcatggtttcaggtcttagatttaagcctttcatccatcttgagttgatttttatataaagtgagagatgaggatccagcttcattcttctacatgtggcttgccaattatcccagcaccatttgttgaataggacatcttttccccactttacatttttgtttgctttgtcaaagatcagttggatataagtatttgacttcatttctggattctctgttctgttccattggtctaatgcctatttttatacaagtaccgtgctattttggtaactatagccttgtagtatagtatgaatttgggtaatgtaatgcctccagatttgttcaccttgcttagtcttgctttggctatgtggggtcttttttggttccaaatgaattttagaattgttttttatatttctgtgaagaatgatggtggcactttgatgggaattgcattaaatctgtagattgtttttggcagtatggtcattttcacaatattgattctacccatccaagagcatgggatgtgtctccatttgtttgcgtcattgatgattgctttcagcagtgttttgtagtttttcttgtacagatcttttacctccttggttaggtatgttcctaagtattttattttttgcaggtgttgtaaaagggattgagttcttgatttgtttctcagcttggtcattgttggtgtatagcagtgctgctaatttatgtacattgattttgtatcctgaaattttactgaattaatttaacagatctagaagctttttggatgagctttagggttttctaggtatgtgatcatatcatcagtgaacagcaacagtctgacttcctttttactgatttggatgggcacccagactttcctatacaccctctgaaatgtaggtaggagctgccatgcctccttcactcttgtattctgcccacctgtgggcttagcaccatgtggaagctaccaaggcttccagcttgcaccttctggagtggcagcctgagctgcacctgggactctttgagccttggctgaacctggagcagcaacctcccaagataccacagggaagcaaggccccagccctgacccccataacaatttcatcctcctaggcctctgggcctgtgatgggagagactgtcccaaagacttctgaaatgcctttaagacctttttctcattgtctttgctattagcatttagttgccttttagttatgctaatctctctagcaagtggttgctccataaggcatttgggttccttgcctgaaaaggctcttttcttctcaacctcatggccagcctgcaaattttccaaatgtttatgttctgcttaccttttaattataaattctaattttaagtcattttttttgctcccatatttgatttaggccattcaaagcagccaggttacttcttggatgctctgctgctttgaaatttcttccaccagataccttaggtcatcactgtcaatctcagcctttcagaaagccctggaacatggacacaatacagccaagctccttgctgggggcataacaagcatcacctttactccagttcctaataaattcctcatttctacctgagacctcatcggcctggcctttactgtccatatttctatcagcactttgatcacaactatgtaaccagtctctaaaaagttccaaatttcccctcatcttcctgtcttcttcctgggccctccaaactcttccaacctctgcccattacccagttccaaagccacttccacattttcaggtatctttatagcaacaccgcactccttgctaccaattttctgttttcatccattttgcattgctataaaagaatacctgaggctggataatttgtaaagaaaaggaagtttatttggctcactacaagctgtacaagaagcataatgccagtatctgcttctggtgaggcctctggaagtttacaatcaaggcagaaggcaaaaaaggagccagcataggacaggcatggtggctcatgcctgtaatcccagcactttgggaggccaaggcaggtggatcacttgaggtcaggagttcgagaccagcctgaccaacatggtgaaaccccatctctactaaaaatacaaaattatccgggtatggtggtgcacacctgtagtcccagctactagggaggctgaggcaggagaattgcttgaacccaggagacagaggttgcagtgagtgagccgagatcacaccattgcactccagcctgggcaacaagagtgaaactccatctcaaaaaaaaaaaaaaaaaaggagccagcatgtcacatggtgagaatggtgagagggagaaagagagataagaaggaagtgtcaggtttttttaaacaaccagctcttgtgtgaactaatagagtgagaaatcacccatcaccaaggggatggcaccaaaccattcatgagagatctggccttatgaccccaatacctcccaccaggcctcacctccaacactggggatcatatttcaatgtgaaatttggaggggacaaacatctaaatcatatcaggaactccatggtactgctaacccccaaatctctaggggtgatattgagtgacatgcatggtactgaacgatacttggtcaggttctcccagtgaagcccaagcaccctcagggtacagggctgggaggcccaatcacaccagctcagcccaggacttggctgagtctgccctggtattagaaggtagcagacctagaactgggttgaacaagatcaggccactttgtgcatgttgccaaaggagaaactgaaggatcagaagtgggcagtaagttttcagtgagcccaggggtcataagtagcaaaatgtggaattcagtaaggggtagaggctggaagagttttgaggtgtgtgttagaaaaagcctaggtttccttgaagactatgttagaaatttggacattaaaggtgatcctggtgggggctcagaaagaaagaggagagctatagagaaaactcctgtcatcttggagaatacataaattgtcacgaacagaatgttgctagaaacgtgaatgttaaagatgcctctgctgaggctccagacagaaataaggaaggtgttattgaaaacgaaggtgacccttgtcatacagtggcaaagcacttggctgaactgtgttccgttttgtggaaagtagaaattatacatgatgaacttggatgtttagctgacgaagttcctaagaaaattgttgaaggcattcttgatttctccttgctgcttacagtaaaatatgagaagagagagatcagctgaagagggaagtgctgaggtggctgggtcagctgacccaagggcccttcaagctgatttaggctgctcaccttggtctcagaatcaccacggccatggccggtcagtcacaggtgatccagcagctgctgcaggccgagaagcaggatgccaagaaggtgtctggggcccacaagcaaaagaaccagaggctgaagcagcccaaaggagcagcttaggctgaaattgaacagcactgcctgcagaaggagaaagagttcaaggccaaggaagctgcagcactaggatctcgcagacccaggataaccatcctccagacctacttccagcagaacagggaagaagtcttagataaccttttggcctttgtctgcagcatccagccagaaatccctgaaaactatcgcataagtagatattaaaagagagaagcacctgttaaatggactggcactttagatgccctcatggaataagaagctctagttatattcttataagaagacattaacttatctctgtatattatagagtaggcccattcacttttcggagagaagcaaatccagtttctttgtacagacttagaatttatctaggctgggcatggtggttcacgcctgtaatcccagcattttcgggggccaaggcgggcagatggcttgagctcaggagtttgagacctgcctgaacaacacagtgagactgtgtctctacaaggaaatataaaaattagccagatatggtggtacatgcttatagtcctacctacttggaagagtgaggcaggaggatcacttgggcccggaaggcagaggttatagtgagccaagattgtgccactgcactccagcctgggtgctagagtgagaccctgtctcaaaaaaaaaaaacttaaagatttcatctttttacctcatgtttcttaggaatataatgggtaaatattgtctattttattatgccttttggctcaagcaatatatatacatatatatatatcactgttgatgttttctttcttgtatcaagtttaaaagaaaaagcaaaacaatcctttgaaaaaaggaaggaattaaatcattttttccttaatgcttttttgaaggtcaggggctttatctatgaaaaagtagtagtttctgtaacctgtgtgaagcatcagccagccttaaagtagtccattgctgctaataattagaacagtgaatattactagtataattgtttcagcttcttaatcaaaataactagatgatagaattcaagaacttgttacatgttattactcggtgtactactaatcatttaaaagtaaagcctatcatgcaaataaataaataaataaataaataaatacatgagaccagataaaatgaaggaagaatgactttgagatcagagccacaggtgaggaggctgttggggctgctgttgccaccttgggcccagagtgtggggccaccccagtgggcctggaagatggagcattaaccgaggaggatgaatcttgagacttaaatctaataaagggccaactagaagcccctagtgctcatcatcctcataaagaaagccagaaaagtcaatagacaactatattttaacgaaaataactgagggagagcactgagtgcatcagaggagtaacagaaaccctgataagcacagaaatgtgggctggccacatagaaaacagaaggaaacacacggcctccaccactccatcccccaaccaggattatctgggaatcaggaggaatttctgacatgaggaggtaagcaagaggatcccagtggcacccactaacacctcggacacctgcagacctcgccactggggtcccctgcagtttgcactggagggagttgcctggaggccacatagctgtgctctccaaaaaaggtgctgacaccgtaccccactcccacatggctagtgcttcaccacactggaataggaactatggctggagtgtgtcttacccaaggagtgagtagtcacagctccccttcatctctgaggctaagctgccactgaacaacccagactagtggtcccacgtccccaagtcaagctatgggcatctattaaacccttccccacagagccaagtggatcagctctacccactcctccccctgaccctttgagtccaagctaaagcagtttcttgcctcctagcaaaacaggactttggccatgcctttctagtgtctacgttgaagcagcaccctgcattccaggaactaatgccttggccacccagaaggtcacacactgcagtgcttaggctgaagcagcaacctgtatcctacagaaatggtgcctgggccactcagaacaatcacaccctctgatacataaatgcaggactttccttacagcagagaaggcctgagctgaagcaacacatcaccttctagggaatcagtgccctggcttaagctgagcagcagcacatcccaaggctgagctgatatagtaccctatgccccaggaaaacagagcagtggctaagctgagacatctcagcctacaggccaaacaactgtagtgccctgcttccctggagcttgcctaggcccctagggtctgagctgctgaggcaccctctccctgggaagtagaatcagcactgtgctgttccctgcctactccccaccaaggcccaaattacagctatgctctgccatcttgggatacttgctgacactgtacctggtctcacatagtctgggatcctgctgagccctaccatcctagggtctagagtcaataccatacagtgcctcatcccctgggaccaaagtttccattgtgccctattggctcagcttcccaaattgcagccataccatactccccaggtccacacctccagaacaccccttcttccccagagttggacaaatgctgcaccccccaggaatagactcacagctacaacctggccccttgagcaaaacctgttaaagggtacctcagagtcacagatcctagcactgtgagccacctaatccaaacctgccacagaaactgaacctacaccccaagacccagatgccacagtagattcttgaaaccaggagactaggactccagttgcacagctactctaattttctgcacctggaatccagcaccattgcagctgcacgttggccacattagacctgctaccaagagagagccccttgactaaatctcctcattgtggggaaacaagaagaggaggactacaaaagcccttgacactgagtacattaacctgtgccaccactacatccacaaacttctacagcctagtccactgaggtgcccacagttattgctgaggttgaatgcagttgaagaagacgcatggaagctatgccactgcacctattcagaaacagagtcatcacactttcccaaccaaaacactaaacccaactgcaggtgaaattgtttctctaaaaaacccactcttgaaagtttggaagaggtgactatttcgccagatgcacagacatcaatgcaggaacacaataaacatgagaaagcaaggaaatatgacaccaccaaaggaacataactctcattaatagacctcaatggaaaaagaaatcaatgtattgctggaaaaggaattcaaaataatgatcttaagataactcaataagatacaagaaaacagataaacaattcaatgaattcaggaaagtaatttacagtatgaatgaaaatttcaacagagatagaaataaaaaagaagcaaactaaaattctgcaggtgaagaattcaatgaataaaattaaaaaatacagtaatgagcttcaacagcagatatgatgaagcagaagaaaggaagagatagatcccaatacaataatagttgataacttcaacaccactctcagcactggacagataatccagacagaaagtcaacaaagaagcattcaatttaaaaagcactttagaccaaatgcatctaacagatatttacacaacatttcatccaacagctgtgaaatacacattcttttcatcagcacatggaatattctccaggataaaccatacagtaagtcacaaaacaagtctcaacaaatttgaaagaattaaaattatatcaaatatcatttatgaccacaataaaactcgaaatcaataagaggaacttttaagactgtacaaagacatgggaaattaaataatgtactcctgagtgaccaataggaattaagaagggaattttagaatgtcaacaaagaaaatgaaaatagaaatgcaacgtactagaatttataagatatagcaaaaagcagcattaagatggaagtttatggcaataaatacctacatcaaaaaagcagagagatttcaaataaatctcatccttgaaaatgcatgtcaaggaactaggaaatcaagaataaaccaaacccaaaattagtagaaagaaagaaataataaagatcagagcagaaataaatgaaattcagactaaaaaaaaaaaagatcaacaaaatgaaaaattgaatttttcaaaagataaacaaaaatgacaaataattagctagactaaacaaaaaagacccaaaagaatgaaatcagaaatgaaaacagaaacattacaactcatatcacagaaacacaaaggataattagagaccatacaccaacagattagaaaacctagcagaaacaggtatatttctggacaatacaacctaccaagactgaacccagaagaaatagaaagcctgcacaaaccagtcatgagcattgagattgaatctgtaacaaaaagtctcccatcaaaggaaagcccaaagaaattcctgttgaaataccaatgacattcctatcaaaatgccaattctacagtaatccaatggcttcagtggggaattctaccaaacactaaaaaaactaatacctattcttctgaaaatcttcccgaaaattgaagaggagggaattcttctaaattccttgtatgaggccactattatggtaattatgattatgattatgattatgtgattattattatgattccaaaaccagacaaggacacaacaaaaaaagcaaactataggctaaatactctgatgaagataatagatgaaaaccttcaaccaaatactagcaaattgaatccagcagcatattaaaaacattatttatcatgatcaagtgagatttatcccaggaatgcaaggatggttcaacatatgcaaatcacatcaacagaatgaaggacaaaaaccgtattatcatcataacagacacagaaaaagtatttgataaaatccaacatcccttcataaaaattctcagcaagttaggtatgaaaggaatatacctcaacacaataagagctatatgtgacaaacccacagccaacatcatactgaacatgcaagagttgaaagcttttctctaaaatctggaacaagccaatgatatcaggccagatgtagtggctcatgcctctaattctagcactttgggaggccaaggcaggaggatcacttgagcccaacaaaggaaacaatcaacagagtgaaaagacaatctacagaatgttagaaaatatttgcaaactctccatccaacaagggactaatatttagaatacattggaaactcaaacaactaaacagaaaagaaaacaaatttttttattaaaaataggcaaatgaaaaaatatttaaaagtttttaaaaccaaaaaaggaactgaatagacgtctctaaaaggaagatatacgaatggccaacagacatatgagaaaatgctcaacattactaatcataaggaaaatgcaaattgaaaccacaataagatataatctcaccccagttaaaatggctattattaaaaaaggcaaaaaacaattgctgtcaaagattcagagaaaggggagctttaatgcattattggttgaaatcttgtctttggaattagcacagccattgaaaaacaataaagagcttcctcaaaaaatggaaatgagtactgccccatgatcccaccatcctctaccgggtatttatccaaaggaaatctatgtcaaagagacatctacactacatgttcattgcagcactattcacaatgccagtgttggaatcaacctacgtgtccatcaacagatgaatgcataaagaaaatgtagtgtttatacacaaacacacacagagagagagagagagaggaattctattctgccatgaaaaagaatgaaatcttgtcatctgaggtaacatggatgagcttggaggacatgttaagtgaaataaagctagacacagacagccaaatatcacatgttctcactcatatatggaagccaaataagttgatctcatagaaatagggagtagaatagtggtaaccagaggctgggaatgggaggggataggatagctagaagtcgattaataaataaaaaattacagtcaggtaggaggaataggccccggtgttctctaacaccatagggtgactataactaacaacaatttattgtatattttcatacggctagaagagcaaattttgattgttcccagcacaaagaagtgataaatgtttgaggtgatggatatgctaattgttgcaggaagtcagggaccccgaatggagggaccagctggagccatggcagaggaacataaattgtgaagatttcatggacatttatcagttcccaaataatacttttataatttcttatgcctgtctttactttaatctcataatcctgttatcttcataagctgaggatgtacgtcacctcaggaccactgggataattgtgttaactgtacaaattgattgtaaaacatatgtgtttgaacaatatgaaatcagtgcaccttgaaaaagacagaataacagcgatttttagggaataagggaagacaaccataaggtctgactgcctgaggggttgggcaaaaagagccatatttttcttcttgcagaaagcctataaatgaacgtgcaagtagggaagatatcgctaaattattttcctagcaaggaatattaatactaataccctgggaaaggaatgcatccctgggggaggtctataaacggccgctctgggaatgtctgtcttatgtggttgagataaggactgagataaggactgagatacgccctggtctcctgcagtaccctcagcttattaggggggtgaaaaactccaccctggtaaatttgtggtcacactggttctctgctctcaaactctgttttctgttgtttaagatgtttatcaagataatatatgcactgctgaacatagacccttatcagtagttctgtttttgccctttgccttgtgatctttgttggacccttatcagtggttctgcttttgccctttgtcctgttccctcagaagcatgtgatctttgttagacccttattagtagttctgctttttgcctttgaagcatgtgatctttgtacccactccctgtgcttacaccccctccctttttgaaacccttaacaaaaaacctgctggtttgaggctcaggcggtcatcacagtcctactgatatgtgatgtcacccccggctgcccagctgtaaaatcctctctttatactgtctctctttatttctcagctggccaacaattatggaaaacagaaagaacctacattgaaatattgggggcaggttcccccaatactaattatcctgatttgatcatcacccattgtatatatgtatccaaatatcacaatgtaccccaaaatatatacaattattatgtgtcaattaaaaacaatcataaaacttttaaacagctaaaataaaagtatattgttttcttcaaaaaaaatctaatgcagttttccctactaggttttgggcttgcttaggacccatggctcctctctcccttccaatgtatcccttttggaataggaatgtccatcctatgcctgccccatcattgtactttggaagcagataacttcttgtcaagttacaaaggtccacagatggagaggaatttcaccccagaatgaatcaccctgcatttctcccacacttgatgcaggtgatatgtcgctgagattgtggactaagagttggtgctggaaggggttagccatcgtggagatgttgctatgggatgcagggattttgcctgtgagaaggacatgattatggggggagcggagggcaaactgtcatgggttaaaatgtgtcccctataaattcatgtgttgaagtcctaacccccaggaccacagaatgtgaccttgtttggaaacagtctttgcagctgcaatcaagttcggatgaggtcaccctggagtagggcaagcctctgatccaatatgactgctgtcctcatgaaaagggggaatctgggcacagacgcacgtgtggagaacgccctgtgaagatggtgctgcttccacaagccaagagcagcagagacggccggcaaagcccagcagcaaggagagagcctggaacagagtctccatgacacagaggagccagccccaccgagacctccatcccagatgaccggcctccagaaccaggacggaataaacgtctgttgtttaagccacgcagtctggggtgcagtgttgccagggccgcacttaacggatacgagtgttgtcctgagctgccagccccacagactgcacaaggcctccctgccccagccaagtgcagtctccccagccccctgggtgtgccatgggcagtgtggggcccatcactccgtcctcccccaggctgggaggttgagcccattatgagctccatggggtgaagctggagcgagaggctgggagccgactgggagcccgcggctggaggatggatttccccagggacccacacgtgcacctccacctgtctcctggacgttctctctgagggcagggctggtgccagctcagggatccagcagggacagaagggcgggccgggtccttgtggagagcacatttagtgggagggacatgatttcccctcacaagtgtccattcttcctgttccttgctggacgcttcctcttccattctggacacttcctgtgcgacacctcctcgggctttcccgaggccctctggcctcattccgttccctgctacctcccacttccacgtacgtccttgcccagctcttccctctatccagagcttctgcctggcaaggtccctgctgagatcagtccaggctcccccagcacaggtaggagccttgcacatgcccttggacctccccaccctgcatgatgccagcatccccaggccccagggaggccccatttctctctctgctggtagtccagtggccctggagtcccactgcaggtggggtgtgcccctgaactctgaggaagctaagtaccctgccctcagacaggctatcccccctgctcagccccagggccctgccccctaccccttcccctcacctgcaccacaggctctggccaactctgcccaggccctgaatgggcccctctggctcccctctgctgctacactgccctgcaccacctccactcagcctcagtgtgttcatccgcctgtcccacgtcccctcggcccccaggagcacagctggtggccctggctcctcgcagcccatcttgttccttctggagcaccagcctcagaggccttcctgtgcagggtccactcggccagccctgggaccctcctggtctcaagcacacacattctccctgcagccagacctgcccctgcctgtgagctcagacctgagccttggaacgccttcccttctccatcccagctcgcctttgccagctgctcagcaggatgaactcacactcccctccctgcaccatgagtgagagtcagctggagagatgcccaggcaaaagcagccaccagggcccagtgggggccagaagcttcagatgagaggcccaggtattgagaggctgagaccacgggcagaatggtcataatcgttgccagtctcagtccagccccagggactcagagacagagaaaagagcagcacacaaggtccgggctccccaccttctcccgtgagtacgggggagtatgggggcagccaccacccccatccccacacacccatgaggcagcctcagctgtgtctggactccccctcgccctctgacacagaaaccaccagaagaaaagggaacttcaggaagtaagtggtgccgccggtttcaatcctgttcttagtgtttgcagcgtggagttcacacccctggggacctgggggccgagctgtgatttcctaggaagacaagtggcagctgacagcgtgggcaaggctgcccacatgtacctcgccacaacaggaagggctgagacccccacctcggtgagtggggtcagcacagggcaggagcacaggctcaggagaaggacagagcctgggcgcagccatcggcgcttctggacctgagctgctgaacaggctgcaagaggctggggagaggctggggcgaggccagccccacatggaagcctaagcggagccagcacaggggaggtgggcagccttcaggcaccgatgcccacccagtgcgagacgacagggaccgtgggcaggggcttccaagccaacagggcaggacacaccagaggctgactgaggcctccaggacgaccgggctgggagtgtgaggaacatgacgggatggggcagagccagccatggggtgatgccaggatgggcatgaccgacctgagctcaggaggcagcagagagagggaggaggagaggccccaggtgaaccgaggggcttgtccaggccggcagcatcaccggagcccagggcagggtcagcagagctggccgtagggccctcctctcagccaggaccaaggacagcaggtgagctgggagcagagcagggagggtgagtgtggcagcaggacaggagggtggaagccaaggagcccagaggcagaggcagggacaggggaggcacaggggctgggctcagagccagctgatggggttggggcacctgctggccgggagcagggctgtggtcagcagcggagaggaggggagagctgtgctgagtgcacgggcgggaggagggaagagtccagggaggcccagaaaggcccagagtgcagcaggcctggggcgaggggaggggctgaggctccgtgcgttcagggaactgacccagcagagcagaggccactgaggagctgaggttctggagaggcttccagagcaggagcagtgcagggacgggaggatccgggagctcatccaggaggggcacatgggcaagggcaaggggctctgttggggagacctgactggacactggggctgctccacagcatagggaacacgccaagtgctgcaaaaacaaaaatgaggcaagaaaaacagcctaaacctggacagagggtgccaggacaggcaggggggcaacagtggaccgagtgacgttgctgccccaggttgagggagggcagagtgagcagggggcaggcattggagttcaggggaccaggaccaagcagccacaggtgcacagggcaggtgggaggcaggaagaacagggggcagctcctggagctcaggggaccacgggagagcatctgaaggtgaacaggagccggtggaggggcaggatgagcaggaggaagaccctggagctcaggggaccagggcagagcagccacaggtgaggaggcagccacaggtgcgcagggcaggtgggaggcaggaccagcagggggcagcccctggagctcatagagccagggcagagcagttgcaggtgagcagggctcagtggaagatgggcaagcagggggcagctcctggagctcagggcaccagggcagtgtagccacaggtgagcaggggctggtgggaggcaggacaagcaggcggcagctcccggagctcagggaaccagggcagtgtagctgcaggtgagcaggggctggtggaaggcaggacaagcaggtggcagctcctggagctcagggaaccagggcagtgtagctgcaggtgagcaggggctggtgggaggcaggacgagcagggggcagcccctggagctcaggggaccaggggagggcatcagaaggtgagcaggggctggtgggaggcaggatgagtaaggggcagcccctttagctcaggggaccagggcagagcagcctcaggtgagcaggggcaggtgaggggcaggacgagcagggggcagtcctggagctcaggggatcagggcagagcatcagaaggtgagcatggctggtgggaggtgggcgagcagggggcagcccctggagctcaggggaccagggcagagcagtcgcaggtgagcacgggttggtgggaggtagaacgagtagggggcagctcctggagctcagggaacaggggagaacatcagaagatgagaagggccggtgggaggttgcagagcagggggcagcttctgcagctctgccagccagggcagagcagctgcaggtaagcagggctggtgggaagcaggggtagcaggtgggcagcccctggagctcagagagccggggaagatcatcggtaggtgagcaggggctggtggaaagcaggaggagcaaggggcagctcatggagctcagaggaccagggaagagcagccacaggtgaacaggggcaggtgggcggcagaatgagcaggggcagctcctggagctcaggggacaagggcagagcagccataggcaaacaggagcagggtcaggggacaggaggagcagggggcagctcttggagctcaggggaccagggcagagccgctgcaggtgagcaggggcaggtggggggcaggaggagcagggggcatctcctggagctcagagcaccagggcagagcagccacaggtgagcagggacggtgggaggcagcacgcagctcctagactttggcaggagctgggtagttgccggcagcagacagctgagggctggtgaaagtgcagtgcagcctcctggtgccgggaagggagtgtgagtccatcccactgagcagttggcaagggcgagctgggatggagaagggaaggcgttccagggctcggggctgagctctcaggcaggggcaggtgtggctgcagggggaacgtgtgcttgagaccaggagggtcccagggctggccccagcggaccctgggcaggaaggcctctgaggctggtgccccagaaggagcaagatgggctgccaggagccaggaccatcagcacaatgaagctgagtggaggtggtgcagggcagtgtagcagcagagggcagccagaggggcccattcagggcctgggcagagtcagccagagcctgtggtgcaggtgaggggaaggggtggtgagcggggccctggggctgagcagaggggatggcctggctgagggcagggcgcttagcttcctcagaggtcaggggcacaccccacctgcagtgggactccagggccactgggccagcagcagagagaaatggggcctccctgtggcctgggggtcctggcaccacgcagggtggggagggccaagggcaggtgcaaggctcctacctgtgctggggggcctgggttgagcccagcagggaccttgccgggggaagctctggagagagggaggaggtgggctggtggctgagaaggccaggccagggctgggagggtgacggtgtggtgactgagcctccagaagtaatgcaggacactgggaggcagggggcatccaggcactcagggccctgacctgggctgctgcacactggggctaaggggaaaggaggggagaggctgaggaggaggctcccggggcgatattccaaggcagggggttccggggccctggggctgaagggcgccgaccctatgcagtgtctggcccctctgctgcacagaagaaaagggccttggagggcagagggcaggctatgaccagggccctgggcaagtcaggcccactcactagcggagggccacgctggggcggcagggtcaggagcttcaggggactcaggggacccacgagaagccatctgagaacagtgtccactggtcaagccaggcacccataaaaggctggagtggggccaatgggcatgagccgtccctgaggtggcaccgatggccagagctgaggccaagctagaggccctggactgtgctgactcccggcagacacagagcgctgacctggctgccgagccccgcctcctaggctgcaggggtgcctgcagaagggcaccacagggccaccggtcctgcaagctttctggggcgggccgggcctgaccttggctttggggcagggagggggctaaggtgaggcaggtggcgccagccaggcgcacacccaatgcccgtgagcccagacactggaccctgcctggaccctcgtggatagacaagaaccgaggggcctctgcgccctgggcccagctctgtcccacaccgcagtcacatggcgccatctctcttgcagcttccaccaagggcccatcggtcttccccctggcgccctgctccaggagcacctctgggggcacagcggccctgggctgcctggtcaaggactacttcccagaaccggtgacggtgtcgtggaactcaggcgccctgaccagcggcgtgcacaccttcccggctgtcctacagtcctcaggactctactccctcagcagcgtggtgaccgtgccctccagcagcttgggcacccagacctacacctgcaacgtgaatcacaagcccagcaacaccaaggtggacaagagagttggtgagaggccagcgcagggagggagggtgtctgctggaagccaggctcagccctcctgcctggacgcatcccggctgtgcagtcccagcccagggcaccaaggcaggccccgtctgactcctcacccggaggcctctgcccgccccactcatgctcagggagagggtcttctggctttttccaccaggctccgggcaggcacaggctggatgcccctaccccaggcccttcacacacaggggcaggtgctgcgctcagagctgccaagagccatatccaggaggaccctgcccctgacctaagcccaccccaaaggccaaactctctactcactcagctcagataccttctctcttcccagatctgagtaactcccaatcttctctctgcagagctcaaaaccccacttggtgacacaactcacacatgcccacggtgcccaggtaagccagcccaggcctcgccctccagctcaaggcgggacaagagccctagagtggcctgagtccagggacaggccccagcagggtgctgacgcatccacctccatcccagatccccgtaactcccaatcttctctctgcagagcccaaatcttgtgacacacctcccccgtgcccacggtgcccaggtaagccagcccaggcctcgccctccagctcaaggcaggacaagagccctagagtggcctgagtccagggacaggccccagcagggtgctgacgcgtccacctccatcccagatccccgtaactcccaatcttctctctgcagagcccaaatcttgtgacacacctcccccatgcccacggtgcccaggtaagccagcccaggcctcgccctccagctcaaggcgggacaagagccctagagtggcctgagtccagggacaggccccagcagggtgctgacgcatccacctccatcccagatccccgtaactcccaatcttctctctgcagagcccaaatcttgtgacacacctcccccgtgcccaaggtgcccaggtaagccagcccaggcctcgccctccagctcaaggcaggacaggtgccctagagtggcctgcatccagggacaggtcccagtcgggtgctgacacatctgcctccatctcttcctcagcacctgaactcctgggaggaccgtcagtcttcctcttccccccaaaacccaaggatacccttatgatttcccggacccctgaggtcacgtgcgtggtggtggacgtgagccacgaagaccccgaggtccagttcaagtggtacgtggacggcgtggaggtgcataatgccaagacaaagccgcgggaggagcagtacaacagcacgttccgtgtggtcagcgtcctcaccgtcctgcaccaggactggctgaacggcaaggagtacaagtgcaaggtctccaacaaagccctcccagcccccatcgagaaaaccatctccaaaaccaaaggtgggacccgcggggtatgagggccacatggacagaggccagcttgacccaccctctgccctgggagtgaccgctgtgccaacctctgtccctacaggacagccccgagaaccacaggtgtacaccctgcccccatcccgggaggagatgaccaagaaccaggtcagcctgacctgcctggtcaaaggcttctaccccagcgacatcgccgtggagtgggagagcagcgggcagccggagaacaactacaacaccacgcctcccatgctggactccgacggctccttcttcctctacagcaagctcaccgtggacaagagcaggtggcagcaggggaacatcttctcatgctccgtgatgcatgaggctctgcacaaccgcttcacgcagaagagcctctccctgtctccgggtaaatgagtgcgacggccggcaagcccccgctccccgggctctcggggtcgcgcgaggatgcttggcacgtaccccgtgtacatacttcccgggcacccagcatggaaataaagcacccagcgctgccctgggcccctgcgagactgtgatggttctttccacgggtcaggccgagtctgaggcctgagtggcatgagggaggcagagcgggtcccactgtccccacactggcccaggctgtgcaggtgtgcctgggccgcctagggtggggctcagccaggggctgccctcggcagggtgggggatttgccagcgtggccctccctccagcagcagctgccctgggctgggccacgggaagccctaggagcccctggggacagacacacagcccctgcctctgtaggagactgtcctgtcctgtgagcgccctgtcctccgacccgcatgcccactcgggggcatgcctagtccatgtgcgtagggacaggccctccctcacccatctacccccacggcactaacccctggcagccctgcccagcctcgcacccgcatggggacacaaccgactccggggacatgcactctcgggccctgtggagagactggtccagatgcccacacacacactcagcccagacccgttcaacaaaccccgcactgaggttggccggccacacggccaccacacacacacgtgcacgcctcacacacggagcctcacccgggcgaaccgcacagcacccagaccagagcaaggtcctcgcacacgtgaacactcctcggacacaggcccccacgagccccacgcggcacctcaaggcccacgagccgctcggcagcttctccacatgctgaccagctcagacaaacccagccctcctctcacaaggtgcccctgcagccgccacacacacacaggcccccacacacaggggaacacacgccacgtcgcgtccctggcactggcccacttcccaatacagcccttccctgcagctggggtcacatgaggtgtgggcttcaccatcctcctgccctctgggcctcagggagggacacgggagacggggagtgggtcctgctgagggccaggtcgctatctagggccgggtgtgtggctgagtcccggggccaaagctggtgcccagggcgggcagctgtggggagctgacctcaggacactgttggcccatcccggccgggccctacatcctgggtcctgccacagagggaatcacccccagaggcccgagcccagcaggacacagcactgaccaccctcttcctgtccagagctgcaactggaggagagctgtgcggaggcgcaggacggggagctggacgggctgtggacgaccatcaccatcttcatcacactcttcctgttaagcgtgtgctacagtgccaccgtcaccttcttcaaggtcggccgcacgttgtccccagctgtccttgacattgtcctccatgctgtcacacactgtccctgacactgtccccaggctgtccccacctgtccctgacactgtcccccacgctctcacaaactgtccctcacactgtcccccatgctgtcacaaactgtcactgacactgtcccccatgctatccccacctgtccctgacactgtccctgacactgtctctcatgctgtccccactcatctgcgacactgtaccccacgctgtccccacttgtcctcaacaatgtcccccatgctgtccccacctgtccctgatgctgtcccccacactgtcccaatctgtccccaccactctcccccacgctgtccccacctgtccctgacactgtcccccatgccatccccatctgtcccgacaatgtccccagggtgtccccagctgtccctgatgctgtcccccacactgtccccacctctccctgacgctgtcccccacgtggtccccacttgtccctgatgctgtcccccacactgtccccacctgtccctgacactgtcccccatgccatccccatctgtcccgacaatgtccctatggtgtccccagctgtccctgatgctgtcccccacactgtccccacctgtccctgacgctgtcccccacactgtccccacctccccctgacactgtcccccacactgtccccacctctccctaacactgtcccacacactgtcccctcctgtccccaacactttcccccatgctgtccccaccagtccccaacactgtacaccatgcttttcccacctgtccccaacactgtcccccatgctgtcccctcctgtccccaacaatgtcccccatgctgtttcctcctgtccccaacactgtccgccactctgtttcctcctttccctgacactgtcccccactctgtccccacctgtagccaacactatcccctacgctgtctccacctgtccctgatgctgtcccccacactgtccccactcctccctgacactgtcccctatgctgtccccaccggttcctaacactgtcccccacactgtccctacctgtccccgacactttctcccatgctgttcccacgtgtctccaacactgtcccccacacagtctccacctgtccctgacactgtcccccatgctgtcctcacccatctctgacactgtacacatactgtccccacctgtccctgatgctgtcctccatgatgtccccacctctccctgacactgtcacccatgctgtccccacctgcccctgacactctcctccacgctgttctcacctgtccccaacactctcccccacactgtctccacctgtccctgacactgtcctccacgctgtccccacctatccctgacactgtcccccatgctgtcctcacctgtccccaacactctcctccacactgtcctcacctgtccccaacactctccccccacactgtctcaacctgtccctgacactgtcccccatgctgtcctcacctgtccctgacactgtcccccatgctgtcctcacctgtctctgacactgtcccccgtgctgtccccacctgacactatcttctgtgctgtccacatgctgttgctgccctggctctgctctccatgtccaggcctcagagcaggcagtggtgaggccctggcacatgggtggcatgaggggccggataggcctcaggggcagggctgtggcctgggtggcctgaggggtgagcaggcctcgggggcagggctgtggcctcgctcacccctgtgctgtgccttgcctacaggtgaagtggatcttctcctcggtggtggacctgaagcagaccatcatccccgactataggaacatgattgggcagggggcctagggccaccctctgcggggtgtccagggccacccagatcccacacacgagccgtgggccatgctcagccaccacccaggccacaactgcccccgacctcaccgccctcaaccccatggctctctgtctttgcagtcgccctctgagccctgacacgccccccttccagaccctgtgcatagcaggtctaccccagacctccgctgcttggtgcatgcagggagctggggaccaggtgtcccctcagcaggatgtccctgccctccagaccgccagatgctcacacaaaaggaggcagtgaccagcatccgaggcccccacccaggcaggagctggccctggagccaaccccgtccacgccagcctcctgaacacaggcgtggtttccagatggtgagtgggagcatcagccgccaaggtagggaagccacagcaccatcaggccctgttggggaggcttccgagagctgcgaaggctcactcagacggccttcctcccagcccgcagccagccagcctccattccgggcactcccgtgaactcctgacatgaggaatgaggttgttctgatttcaagcaaagaacgctgctctctggctcctgggaacagtctcggtgccagcaccaccccttggctgcctgcctacactgctggattctcgggtggaactggacccgcagggacagccagccccagagtccgcactggggagagaaggggccaggcccaggacactgccacctcccacccactccagtccaccgagatcactcagagaagagcctgggccatgtggccactgcaggagccccacagtgcaagagtgaggatagcccaaggaagggctgggcatctgcccagacaggcctcccagagaaggctggtgaccaggtcccaggcgggcaagactcagccttggtggggcctgaggacagaggaggcccaggagcatcggggagagaggtggagggacaccgggagagccaggagcgtggacacagccagaactcatcacagaggctggcgtccagccccgggtcacgtgcagcaggaacaagcagccactctgggggcaccaggtggagaggcaagatgccaaagagggtgcccgtgttcttgcgaaagcggggctgctggccacgagtgctggacagaggcccccacgctctgctgcccccatcacgccgttccgtgactgtcacgcagaatccgcagacaggaagggaggctcgagcgggactgcggccagcgcctgcctcggccgtcagggaggactcccgggctcactcgaaggaggtgccaccatttcagctttggtagcttttcttcttcttttaaattttctaaagctcattaattgtctttgatgtttcttttgtgatgacaataaaatatcctttttaagtcttgtacttcgtgatgggagccgccttcctgtgtccacgcgcctcctgcccccggtgggaagcacattcaggaggaggctggtccagctgcacctcgggggctccctgcatacgccccccgcctcctgcagccacacgcattgcccgagcgaccctccctggcccctgtcgctacatggacccccggggcttctcctcttttctacatggatgcagtttctcctcctgctgggcacggtgctgcctgccctggtcactctgcgggggacagggcctccagggaaagctgggtcgaggctgggagctggctcaggctggccaggcagagccacagggagggccttccagaaccaaccatggtccgaagcgagaggtgggtgtcagatctgtgtgcgtcagctcaggaccacagcggggcggctcccacagcagacatggatcctcccaggcctagagaccaggaatctgagatcaggatgcaggcagggctggtttctctcaagccctctctccttggcttgtagacaccgtctcctccctggtcctcacgtggccatccctctgtgtgcccgtgtcctaagcttctcttcttataagaacacacatcagattagattagtgaccccctatgaacttaatgacctctgtaaagaccccatctccaaatagtcacattgtgaggccagggattaagacttgaatatatgaatttgtaggggccacgatttaacccatcacagtccagactctggcccccaaaattcatgttcttctcacatgcagaatacattcatcctgtctcagcatccccctgggcactaggtcatgtagcaaggacggattttcaacagaaataactattgcaacagaagaaagagtccggcatgacctggactcaccttcatctgtgcagaggccacagccttgtaaagggaggtggtagggggagcagggtgggtgctcggggctcagtcgtcggggaagggaaaagttgcccagcgctggtcagcgtccccgggatgggacccgctgtgtccgtgccggccactgttgaggtcaggattctgtcctcccagagcctggagacacaggccccatccttcccaatggggacacttcagggagcggctctcaggtcccgagaaagaccctcctgggtcacaggaaatgcacagacatcgggaacagacagaaggacgtgtggttgcggccctctcagcagataccctgagaaagggaggtcggggttggtccaaacggtgagttctggtgcacggagctttctcaggcaggtgttgacggggcaggggtcggcctaggggtacggccagaagctgttagaaactgttagtgtctgctcaagtctttacaagccaaggttgaggccgagtggagaggctccgaggagcctggctggaactcagtcaaggacagggtcttgttactgcagtggctgcggtggctgcggtggctggaaaatgccgtcggagttgcctgtggcaggagagagaccatctcacccaggaaggaggagtggttggattcgtttgtgtggcatcgagcagctggagcttcaccaaacacagagttggggactaaatccccagactccaggccctgccatgccgtgggaaggctcgccactggagggtgggctccagggggcctggcctgaactgggtgctgaagcccagccctttaactctcaggacacgctgctgcagccccgcggggggtgagggagacagcacctggggtgcagggcgggcagctgctgcatcaccggctctatcccaagcccaaggatggcgtcccagagatgcaggagagctttgtccagagaaggtgccagccctcagggaccctgctggagagatctccaccctctgcccttcaaggggccctacgggcttccgggtgccctggtggggtgggctccagtccactgtctgaggatggacggcctggccaggataaggaaaggaaacccaggacggtgccgggctccgggtcattccgtgcactgagcaggctgagttgggaagaagcagatgcttcctgcagctcctgcccctgcagggcctggcgcctggaccaggttcccctggggaaattgggcccctccctgagccacccggggcccaccgccccctttccacctgggaccgagcatcctccagagggtcagccctcctgagggaacaccatgcccagccccaggaccctccctcaactctccagcaaggctgcactgtgggcggcccctgcacataccccagcagtccatgctgtgatgtaacatgacatggtgtgacgtggtgtgatgtctctggtgtgacgtggatgtcatgtggcatgatgcgacaggacatggtgtgatgttgtatgatgtggtatgacggtgtgatatccgaggggtgatgtgatgtggtgtgacatggtgtaatgtccctggtgtgaggtggcgttggacatgctgggatgtggtgtgacacagtgtgacatccctggtgtgatgtggtgtgatgaagcgtaacaggctgtgacatagtgtgacgtggtgtgatataatgtgatgtggtgtgaggtggcgtgacatggtgggatgtggtgtgacatggtataatgtccctggtgtgaggtggtgtgatgtggtatgatggggtgtggcagggtacgacatccctagtgtgatgataagtttcatggtatgatgtggcgtgacatccctggcgtgacataatgagatgtggtgtgacatggtgtggcattcctggtgtgactcctgtgttctgacatttgtggccaccccaggatacagaggtccctgtagccaagggaagggggagaatagaaccatctgagcatgttgacctggaggaattggtggcccttgagtccacgaagcccaccctgccaggtgcccctgccccacgtgacccaagtgggcttgcagagcagcaagcaggactctggttagactgcaagaaggacctgccaccacgtggccttgtgaggagacacagagcaaggcagtgacctcagcgtccacccagcacagggtgctgctgaagctcctcctgtcctctcagcagcggtctcagagcaaggcccaaggcaggctgaagagaggggcagagggaggatgctggggaggcaggggtgaggggagtgagagcccaggtttcagctgagcccctgcacagggaaggaggctagctgaacacccatctccccacacactcccaaccctgcctctgcccgaacacctcccagaaggcacctcaaactctgctacccacactcagcaaggggtatggtgtccccaccgagtccagccagtgaggcccggcacagccatgcctgtgccgaccactcccatggccaagctccctgctaacatggtaggacagagccaggcctggaggagacagaacatcagtcccatggggaagctccctgctcacatggcagggccgggcctggaggagacagaacgccccgtctggtatggtactcaggctgcacatgcctgccacgcacgggggccatgtggcacacacgggtactcacacggtcctcacacagggacacacgcacttgcaaccccagcacccacccagtgcactcatgcacgggctccccaggtgggtcacagtctcacgccttgagctactccatgtgccaggcccttcacccacattcccgtccccggtgccagctgttgagccacaccgtcttctctgtggatccctcccagcccgctcagcacaatggacatgctctctccagtccagcaactgcactggcctcttcccctcagaatccacgtctggccatctcccaggaaacccggaccaccacgggcagggaccaccttctcactgtccatgtggaccaccccacacctgaccccaggcagagtcacactacgacctgcttcaatattgaaaaggggaaaagctggaggaggggaaagatgaaagagaaaaaagcaagaggggagggtcacattcttgtgaggctttgattagagttcactgagcccccacgttgcatgaaaaggaggggtggagggagcaattacgcattcgccttgtgctcagtaaatctgcactttataagcaaataaacagagtagaggaagaagtcaaatatgcattcgtctcaggggtaggaggaacgatttcttgtctcattttgtcccatgtcatgaagaccggcctgttaatttatattctcagggtgagggaggccacctgggtagacctggcctatctgctgctgctatcactttggaaacaaaaggaaaggcatgactttttttttttttcatgactcagcttcccacctcaactgttcattttggcatagtgagtttggagtcctgagattttattttcctttcacaatggtcaaggtcgcaccctcagtattcaggagagctggtccaacccagacccctgccgtccctggacgcttttcaaatacgtgctgcagtctctgacactctctcaccatggtagaaactgaggtcttggtgagcctgcaagcccctgctcatggggacaatgcaggctgaaacccgcatttctgaccccaaagctcctgttcctttcactcacccccacaccagctctttgagtccagagctttgtccttgcctgagtcctaccctcagggacaggggcccaacccagacaccaacacatcataccctgagagggtgccaggagcccagagatgtttggagagcacagaagccctggaggctctgtggagatgctgcacatttctctattcaacagatactcaccaggtggccagcggcagagatgccacatggcatggagctcgccttggccaacaggacaggtgtggggttgggaggccttcccagggcactccttgaagcagagctgtggggaaaagttggggccaacctcagatctcctcatcaacaccggttctcctgccctcctgggccacagaaaactaagctccctggatactgcggctgggtggggccatgagggagaagaaatcacaacgagttaaaagatcattttctaaaactgttatgatcaggactcacataaacatatgacgacacatttcagagatgctctttatctcattaattaaggtgtcgtaaccagttcaaagtggaattctaagtactacacttacataattgattcaggaatgctaaaaggagttcatagatagatgcaaaactggccttttccctggaagatgaggagcaattcattgtccttccaaaggtgagaacttgaatttctaccaactcaaagagcttttgcattgctatcaattatgtacaacttagagcagtagtccccaacatttttggcaccaggaaccagttccatggaagacaatttttccacagaccaggatcgggggatggcttggggacaaagctgttctacctcagatcattaggcattaggatttcacgaggagtgtgcaacttagatctgggaatgtgcagctcgcaatagggttcgctcctatgagaatctaatgctgccactgatctgacgggaggtggagctcaggcaggaatgctcacacacccctcacctcctgctctgtggcccagttcctaacaggccatgagcagattccagtgcatgacccaggggttggggacccctggcttatagaggtgtaaaatagttcaaaggaaataaaagatgcagagctccatagaatgaaataacttggaagagtgtacaagacgatgccttgctttccatggaaggcacctactaatcttttggtccatttcagttcttcttaatgcttcctataaacatatataactgactgacacaaacagatccataatataaagaagaccactgtaaaccaatgagaaaaaaaatcaaataatccaacaaggaataggcaagagaattgaacagatgttttacagaagatatccaaatagccactaaacatatgaaaagatgttgaaccacactagtcaacagggaaatgaaaatgaaaaaccacatgagagaaagtagttctgattccaataattctggagcagctaatatcagactagccctttggcagatggcaattataaacactagaaacgctgtaagcacacacaacacccacacacaccaattgcaggcactggaacatgaccagaagtaggcaaacactagtaaggattattccgttaaatattcgtctgaagtcacactccagggcatgtaatgggtacagctagagttcaagcaggaaactgcagccctcctggtgaggagtgggatgccgggctacattttcagagcagctggaaatgaagagaagatgtccataaaggagaaggtcaccgaagggaaaccccacaatctgcaagtaaactccactgaaacctctggctgatcccttaggtgtgcatgggtagggaaaactccaaagggcccagcagaaagcaacacgtgtaaggtcaagagaactgagattccagctactgccaactgccaggcagacagactggggagtttgagtcaactcaagctaactgcttgctaacattgaaaaaaacaattaatgttctgctaaggaagaatgcaaaccccatagcctgtacacatgttaacaacatcaggtgcacatccaaaattaccaggtatgcaaagaaatatgaaaatgtgatccatagttaaaagaaaaagggatcaatggagatcaactccaagatgacctagatgcagatacagttatcagacaaggactttaaagaagttatgttaaatatgttcaaagacttaaaggaaaatatggttatcatgagtgactagatgaggtatctctataaaaaactgaaaatagttacaagaagcaaatgaaaattctagaactaagagtatgattcggaaatgaaaaacatcatttgaccaggcccagtggctcatacctgtaatcctagcactctgggaggccaaacatggaaggatcacttgatctcaggagtttgagaccaccctgggcaacatggtgaaaccccatctctattttattaaagaagaaaagaaagagaaaaacattacccaagtttaataacagattggacaagacataagaaggaactgaaaacttaaagatgcatcaatagaatatgtcaattctttttaatccaatccaaagaagagagagaaaaatactaaaaaatgaaaagagactcatcctgctggacaaggtgaagcattctaaaacatgtgaaactggagtccagagggggatgtaatacttccatgggaaaggtcaaccctaagctatatgcaaatgtacctgcgtaggctggtgtggtgggctgatggcatctccctggccaaatgtatgcccacctggaacctcagaatgtgaccttatttggaaatggggtctttacaaattaggttaaggacttgagatgatatcatactaaattttggatggatcccaagtccaaacactggtgtcctcataagaggagaggacaaagacatacatggaggtaagccatatgatgacaaaggagaagatgagcggtgtgtcaggagccacctgtgtttgtccatttgcattactgtaaagaaatacctgaggctgagtaacttatgaaggaaagaggttcaattggctcacagttctgcaggctgtataggaagtatggcaccagcatctgcttctggcgaggacctcaggaaacttacagtcatagcagaaggtgaagggagagcaggtatgccacatggcaagaatgggagcaagaggctgagggggggccccagacttaaacaactagactgtgtgtgagctgactggggcagaattcactcatcaccaaggggatgattctaaatcattcatgagggatcttcccccttgatctaatcacctcctaccaggccccacttccaacactgggaatcatattacaacatgagatttggaggggacaaatatataaaccatatccttccacccctggtcccccaaatctcatgttgcaaaatacaatcatgccttctcaacagtcccccaaagtcttacctcattccagcatcaacccaaatttcccaagtcccaagtctcatctgaagatgagtcccttccacctatcagcctatgaaatcaaacacaaattattgactcccaaaatacaatgagagtgcagacattgcgtaaacattcccattccacaagggagaagttggcaaaaagaaaggatctacatgccccatatatgtcagaaatccagcagggcagtcattaaatcttaaagctccaaggtaatctcctttgacttcatgtcccatatccagggcacattggtgcagggggtgggctcccaaggccttggaaaactctacccttgtggctttggaggatgttgcccctgtggcttctctcacatgatagagttgagtgcctgtggcttttccagattcagggtgcaaactgccagtggatccaccattctggggtctggaggacagtggcccccttcccacagctccactaggcagtgccctggtggggacattatatgggggttcaaccccacattctctttggcactgctctagtagaggttctctgtgagggctccatgctggcaggaggcttctgtctgggcacctaggctttctcatacatttctgaaatctagagggaagatgccaagcttccttcactcgtgtattctgggggcctacaggcttaacaccagatggaagtcaccaaggcttatagtggcttgcactctccaaagaagcagcctaagctatacttggggccctttgagccaaggctggagccagaggaaccaggatgtggagagcagtgtcccaaggctgcacaggcagcagtggccatggccatggcccacaaaaccatcctttccctcttggcctctgggcctgtgatgggaaagaccacctcagagatttccaaaatgccttcaaggccttcttccctttgttctggatatgagcacttagctcccttttagttatgctaatctctctagcaactggctgctccatagcctacttatatttgtctcctgaaaataccttttcttttctaccatatggccaggccatgaattttccaaattttttatgctctgcttccctttgttgatgaaaaaagccaaactctataaaacacttgacgagattgattctgagccacatgtgagagccatgaactgtggcacagcctcaaaaggtcctgagaacatgtgtgcaaggtgcttgggttgcggcctggttttatgttttagggagacatgagacatcaatcaatacatgtaaagtatacattcgtttggtttggaatggcaggacaattcaaagtggggaattccaaatcataggtggatttgaagattttctgattggcaattggctgaaaaatttaaattatctaaaaagttgaagtcagcaaaaagcaatgcttaagataaagcaggttgtggaagccaaggttcttgttatgtagatgaagcctccacgttccagagagaagagatggtcaatgtctcttatcagaacctaaaaggtgccagactcttggataaatctctcctgaatcaggaagagacctggaaagggaaaaagattctcgacagaatatacatttcctccacaagagacggctttgcagggccattccaaaatgtgtcagagaaatatattctggcataaaatactttaatttccttccatgcctgccaactgtcatgtgatgctataccagagtcaggttggaatttgatatcttattgctacaaagagtctgctttgtcagtcttaagctccctgttttaatgttaacaccggtcagctgagcctaaactccaacagggagagggtatagtgagggagtccaaaccaccctccccttcctgtcatggcctgaactggttttccaggtttctttggaatccccttgcattagcattttattttttcatttgcaccttttaaatatcagttccaactttaagtcattcctttgctcccatatcttaccatagactgttagaagcaaccaggtcacaccttagaaatgtctgcttagaagtatcttccaccagatgtcctaagtcatcactcttaaggtcaaacttccacagatccctagggcatgaatacaatgcagccaagttgtttcttaggatttaacaagcgtgacctttactccagttcccaataagttcctcatttccatctgagatttcatcagcctggctttcacagtccatatgtctatcagcattttggtgacaaccatttaatcagtctctaagaaattccaaactttccctcatcttcctgtcttcttctgagtcctccaaattcttctaacttctctgcctgttacctgattccaaagctgcttccaaattttcaggtatctttatagcaatgttccactcctcaataccaaatttctgtgttagtttgtgttactagaaaaaaaaatacatgaggctagtaatttataaagaaaagaggtttaggccaggcactgtggctcatacctgtcatcctagcattttgggaggcagaggcaggaggatcacttgagctcagaagtttgagaccaacctgggcaacatagtgagaacttgtcttgaaaagacaagaagaagggaagggtggggaagagcagaagggcagaagggcagggcagaagggaagggcagggaaggcagaagagaaggaaggaagggaggtttaattagttcatatttctgcaggccgttctggaaacacggccctggcatctgcttctggcgaggcctcagggagattgcaatcacagcagaaggcgaagggggagcaggcatgtcacatggcaagagggagcaagagaagaaagtggcacgtcccagacttttaaacaaccagctgtcacagggactaactgagggagaactcgctcatcacctgggagatggtgctaggccattcatgaggggtccagccccatgatctaatcacctcccaccaggcccacctccaacactgggaatcacatctcaacatgaaatttggagagacgcacatccaaactattgcaccacaggaagctggaagaggtggacggtcctcccctggagcactcagagacagccaccaacaccttgatctcagatttctgactcccagaactctgaaaaaatttttgttgttttaagccacatttgtgatattttgttacggcagccacagcacggatatagctggtaacagagttctttagcctccaaaatacaagcctggggtaaataactattgaatttggccacatggaaatcaggaagaatgtaataagcatcatcgatggacgggatgacctgggagatcgtggcaagtttaaagctaattggaagttggcaaccaaaaaatcctgtcttgcaaatggccaggaaattgccaagaaaacctttagaaaacatggttaaagatggagaaacccggatgactccctggtttctgaagaggtgcttaggcattgaagtgagactgatgagacttcacactgtacccttcagaagggcagacactcacgagataatcaaccacggctccctcgctgggaggcagacacagagctggaggcggcggccacaaactaggtgggcagagaggcgtcagcatcgggacttgcgggaggccctgggaaggaacaggcagcggtggggcctggacagccctggggaaaggaagttacttggaggagaccaggggcttgcatttgggccaaaaccaaggacaagagatcagctggtcccagggaactctggagcccaacaccccaccacgggtgcaggggcctgacaacccaacagagggctgtgggcaccgggcaccagcctgtggggggtctgaaggctgctgcccagccacacatgtcctggttctgaacaaagggttcaagagacacctggaaacctacccttctgagagcagcctcttagcctcagctggtattggcccctggtcaccccacatgccccgacagtggggcctggcctcagaaaggggcccctccatttgtactttctatctgatccttgacacagtgctaacaccaaagaccaaacccgaatcttggttcacatactctgcaaagaaatgactaagacaagttcttccggaggtcagttttagaacattattctgacttaattctgccttatctctgtgcaacaagaaaactatctgcacatctgtagtaaaatgtgaaggtaccttcattttgtttgtatactaaacttttaagaaatacctcactttttaaaacttggttttgtgttttgtatgcttataatattttccataatagatcattttaatgataaactctgaatcttctgacagaatgcagatcaatggattcctggccatcagggaggcgttgattgcaaaggggcctggtggaatatttggagagattctacatcttcttgcaactgttcatctggattacggtggtggttgcatgagtgtgcatttgttgaaactcacatgtcacaggatggattatactgaatgtaaactacacttgcgtaaatatgacttttaaaactttaaaaagttgggggatggttcactgccccggctcgaagccccctggccacgctgcctggccagcccacccgcatccctgccagcgcttgcctccagcgtcccaacagcctcctgaccccctgggctgctctaaaccctcaggagcgcagccatccgggatcagctggatggagatggggagcccgagactcgtgccacaccacgtcctcccacccccaccagccacacgcagacgtcaaagcagcactgtcctcgcacgcgctgctcccacccaccctggcatggccattccaggcctggggcaggaaggcagatgctccccctgcccccagacacaagcattcctgcacatacccccagcacacacacacactcccatgcgcacactgacacacacaggtgtgtgcagctgagacacagcccattcccaggcagtccagcccccgtcactgagggaaaggggcagcaccacggggccacaggagtggcagctggacacagagccaggcgctggcgaaggcccaggccactgaggcgggctgccggcatggctgggcgtgaaggccagaagagggcaggaggggccgtaggcactgtgcctattgggcctaggtgggcacacgcctggcaggagaggaacagcccagcccctgaggaaggggtgggggcaggggccatttctggaggccagggcagggccagcaccccaaggaaaagcagagcagggtgagaacggacatggggctcagagctgagcaggcctgctgggccccaggagggagacacagacgaccggggatctcaaggctggcagaggccagagatggagccccacctgggatgccatcctccttcctgggggcccaccctgcccggcccctccagcccagcacagcttggggcattggatagaaccgggagagagccgaccaggcactgaggcccctgccccaaatgcccacagcctggggaaaatgagcaggtacatgggaggggcaagtggagccccaggcacacccacacagtgcacacggcctcacctgggccggagggggcaggaggctcgccaccccgctgtggtttctctcctaatctcaccctgggtttctgccacacttgatgcaggtgatgtttctctgacattgtggactaagagttggtgctggaaggggttagccatcttggagatgttgctatggggtgcagggattttgcgtgtgagaaggacatgattatggggggagcggagggcaaactgtcatgggttaaaatgtgtcccctataaattcatgtgttgaagtcctaacccccaggaccacagaatgtgaccttgtttggaaacagtctttgcagctgcaatcaagttcagatgaggtcaccctggagtagcgcaagcctctgatccaatatgactgctgtcctcatgaaaagggggaatctgggcacagacagcacgtggggagaacgccctgtgaagatggtgctgcttccataagccaagagcagcagagacggccggcaaagcccagcagcagggagagagcctgggacagagtctcccatgacacagaggtgccagccccaccgaggcctccatcccagatgcccggcctccagaaccaggacggaataaacgtctgttgtttaagccacgcagtctggggtgctgtgttgccagggccacagttaacggatacgagtgttgtcctgagctgccagccccacaggctgcacgaggcctccctgccccagcccagtgcagactccccagccccctgggtgtgccatgggcagtgcggggacccctcactccgtcctcccccagcctgggaggttgagcccattatgagctccatggggtgaagctggaacgagaggctgggagccgactgggagcctgcggctggaggatggatttccccagggacccacacgtgcacctccacctgtctcctggacattctctctgagggcagggctggtgccagctcagggatccagcagggtcacaagggcaggccgggtccttgtggagagcacatttagtgggagggacatgatttcccttcaaagtgcccattctggacgcttcccgttccatgctggacgcttcctcttccacgctggatgcttcctgttccacactggatgcttcctgttccacgctggatgtttcctgttacactctggatgcttcctgttccacactggatgcttcctgttccatcctggatgcttcctgttccatgctggacatttcctgttccactctggatgctccctgttccatgctggatgcttcctgttccatgctggatgcttcctgttccatgctggacatttcctgttccactctgcatgcttcctgttccactctggatgcttcctgttccatggtggacgtttcctgttccactctgcatgcttcctgttccatgctggatgcttccttttccattctggatgcttcctgttccatgttggatgtttcttgttccactctggatgcttcctattccattctggatgcttcctgttccatgctggacatttcctgttccatgctggatgctttctgttacatcctggatgcttcctgttccatgctggatgttttttgtttgactctggatgcttccagttccattctggatgcttcctgttccatgctggatgcttccttttccattccgcacaattcctattccattctggacacttcctgtgcgacacctccttgggttttctgtctgcccagtccctctatcctcatcccgttccctgctacctcccacctccacaatcgtccttgcccagctcctccctctctctagagcttcggcctggcaaggtccctcctgatctcagtccaggctcccccagcacaggtaggagcctagcacctgcccttggacctccccaccctgcatggtgccagcatcccccggtccccagggaggccccatttctctctctgcttgtagtccagtggccctggagtcccactgcaactcgggtgtgcccctgacctctgaggaagttaagtgtcctgtccctagccaggctatcccgtctgctcagccccagggccctgcccccaaccccttcccctcacctgcaccacaggctctggccaactctgcccaggccctgaatgggcccctctggctcccctctgctgctacactgccctgcaccacctccactcagcttcagtgtgttcatccacctgtcccaagtcccctcggcccccaggagcacagctggtggccctggctcctggcagcccatcttgttccttctggagcaccagcctcagaggccttcctgtgcagggtccacttggccagccctgggaccctcctggtctcaagcacacacgttctccctgcagccagacctgcccctgcctgtgagctcagccctgagccttggaatgccttcccatctccatcccagctcgcctttgccagctgctcagcaggatgaactcacactcccctccctgcaccatgagtcagagccagctggagacacgcccaggccaaagcagccaccagggcctagtgggggccagaagcttcagatgagaggcccaggtattgagaggctgagatcacgggcagaatggtcataatcgctgccagtatcagtccagccccagggactcagagacagagaaaagagcagcacacaaggtctgggctccccaccttctcccgtgagtacgggggagtatgggggcagccaccacccccatccccacacacccatgaggcagcctcggctgtgtctggactccccctcgccctctgacccagaaaccaccagaagaaaagggaacttcaggaagtaagtggtgccgccggtttcaatcctgttcttagtctttgcagcgtggagttcacacacctggggacctgggggccgagctgtgatttcctaggaagacaaatagcggctgacggcaggggcggggctgcccacatgtacctcgccagaacaggaagggctgagacccccacctcggtgagtggggtcagcacagggcaggggcacaggctcgggaggaggacagagcctgggggcagccgtgggcgctcctggacctgagatgctgaacaggctccaagaggctggggagacatggggtcgaggccggccccacatggaggcccaagcggagccagcacgggggaggtgggcagccttcaggcaccgatgcccacccagtgcgagacgacggggaccgtgggcaggggcttccaagccaacagggcaggacacaccagaggctgactgaggcctccaggacgaccgggctgggagcacgaggaacatgactggatgcggcagagccggccgtggggtgatgccaggatgggcacgaccgacctgagctcaggaggcagcagagcgagggaggaggagaggccccaggtgaacggaggggcttgtccaggccggcagcatcaccggagcccagggcagggtcagcagtgctggccgtggggccctcctctcagccaggaccaaggacagcaggtgagccgggagcagagcagggagggtgagtgtggcagcaggacaggagggtggaagccaaggagcccagaggcagaggcagggacaggggaggcacaggggctgggctcagagccagctgatggggttggggcacctgctggcggggagcagggctgtggtcagcagtggagaggaggggagagctgtgctgagtgcacgggcgggagaagggaagagtccagggaggcccagaaaggcccagagtgcagcaggcctggggcgaggggaagggctgaggctccgtgcgttcagggaactgacccagcagagcagaggccactgaggagctgaggttccagagaggcttccagagcaggagcagtgcagggacaggaggatccgggagctcattcaggaggggcacatgggcaagggcaaggggctctgttggggagacctgactggacactggggctgctccacagcatagggaacacgccaagtgctgcaaaatcaaaaatgagggcagaaaaacagcccaaacctggacagagggtgccaggacaggcaggggggcaacagtgacctgagtgacattgctgcccgggttgagggagggcagagtgagcagggagcaggcattggagctcagggaccaggaccaagcagccacaggtgagcagggcaggtgggggcagaaggagcagggggcacctcctggagctcaggggaccagggcagagcagcctcaggtgagcaggggctggtgggcggcaggatgagcagggggaagaccctggagctcaggggaccagggcagagcatcagaaggtgagcatggctagtgggagatgggcaagcagggggcagcccctggagctcaggggaccaggacagagcatcaggaggtgagcatggctagtgggaggtgggcgagcagggggcagcccctggaactcaggggaccagggcagagcagccgcaggtgagcacgggctggtgggaggcgggaggaacagggggcagctcctggacttcaggggaccagggagggcatctgaaggtgaacaggggccagtggggggcaggatgagcagggggaagctcctggagctcagggagccaaggcagagcagccgcaggtcagcaggggcaggtgggaagcatggggagcaggtgggcagcccctggagctcagagagccagggcagatcatccacaggagagcaggggctggtaggaagcaggaggagcaagtgggcagcttttggagctcagagcaccagggcagaagagcctcaggtgagaaggggcaggtgggaggcagaataagcaggggacagcccctggacctcaggagaccagggcagagcatcacaacgtcagcatggctggtgggaggtgggcgagcagggggcagcccctggacctcagagagccagggcagatctgcaggtgagcaggggcaggtgggaggcaggaagagcaggaggcagctcctggagctcaggggatcagggcagagcagccacaggtgagcaggggcaggtaggaagcagaaagatcaggggtcagcccctggagctcaggggacaaggggagagcatcagaaggtgagcaggactgaggctcagcctcagggagccagggcagagcagctgcaggtgagcagggccggtgggaagcaggaggagcaggtgggcagcccctggagctcagagagccagggaagatcatccgcaggtgagcaggggctggtgggaagcaggaggagcaaggggcagctcctggagctcaggggaccagggcagagcagtcgcaggtgaacaggggcaggtggggggcaggaggagcaaggagcagctcctggagctcaggggaccagggcagagcagtcgcaggtgaacaggggcaggaggagcaaggggcagctcctggagctcaggggaccagggcagagcagccgcaggtgagcaggtgcaggtggggggcaggaggagcagggggcagctcctggagctcaggggaccagggcagagcagccgcaggtgagcaggggcaggtggggtgcaggaggagcagggggcaggcactggagctcaggggaccagggcagagcagtcgcaggtgaacaggggcaggtggggggcaggagtagcaaggggcagctcctggagctcaggggaccagggcagagcagtcgcaggtgaacaggggcaggtggggggcaggaggagcagggggcagctcctggagctcaggggaccagggcagagcagccgcaggtgagcaggtgcaggtggggggcaggaggagcaggggtcaggcactggagctcaggggaccagggcagagcagccgcaggtgagcaggggcaggtggggggcaggaggagcagggggcaggcactggagctcaggggaccagggcagagcagccgcaggtgagcaggggcaggtggggggcaggaggagcagggggcaggcactggagctcaggggaccagggcagagcagccgcaggtgagcaggggcaggtggggggcaggaggagcagggggcaggcactggagctcaggggaccagggcagagcagccgcaggtcagcagggccggtgggaggcaggacgagcaggggacaggcactagagctcagggcaaggcagccacaggtgagcagggctggtgggaggcatcactcagctcctagactttggcaggagctgggtagttgctggcaacagacagctgagggctggtgaaagtgcagtgcagcctcctggtgccgggaagggagtgtgagtccatcccactgagcagttggcaagggcgagctgggatggagaagggaaggcgttccagggctcagggctgagctctcaggcaggggcaggtgtggctgcagggggaacgtgtgcttgagaccaggagggtcccacggctggtcccagcggaccctgggcaggaaggcctctgaggctggcgccccagaaggagcaagatgggctgccaggagccagggccaccagcacaatgaagctgagtggaggtggtgcagggcagtgtagcagcagagggcagccagaggggcccattcagggcctgggcagagtcagccagagcctgtggtgcaggtgaggggaaggggtggtgagcggggccctggggctgagcagaggggatggcctggctgagggcagggcgcttagcctcctcagaggtcaggggcacaccccacctgcagtgggactccagggccactgggccagcggcagagagaaatggggcctccctgtggcctgggggtcctggcaccatgcagggtggggagggccaagggcaggtgcaaggctcctacctgtgctggggggcctgggttgagcccagcagggaccttgccgggggaagctctggagagagggaggaggtgggctggtggccgagaaggccaggccagggctgggagggtgacggtgtggtgactgagcctccagaagtaatgcaggacactgggaggcagggggcatccaggcactcagggccctgacctgggctgctgcacactggggctaaggggaaaggaggggagaggctgaggaggaggctccaggaggctattccaaggcagggggttccggggccctggggctgaagggcgccgaccctatgcagtgtctggcccctctgctgcacagaagaaaagggccttggagggcagagggcaggctatgaccagggccctgggcaagtcaggccaactcactaggggagggccacgctggggcggcagggtcaggggcttcagggggctcgggggacccacgagaagccatctgagaacagtgtccactggtcaagccaggcacccataaaaggctggagtggggccaatgggcatgagccgtccctgaggtggcaccgatggccagagctgaggccaagctagaggccctggactgtgctgactcccggcagacacagagcgctgacctggctgccgagccccgcctcctaggctgcaggggtgcctgcagaagggcaccacagggccaccggtcctgcaagctttctggggcaggccgggcctgaccttggctttggggcagggggtgggctaaggtgacgcaggtggcgccagccaggcgcacacccaatgcccgtgagcccagacactggacgctgaacctcgcggacagttaagaacccaggggcctctgcgccctgggcccagctctgtcccacaccgcggtcacatggcaccacctctcttgcagcctccaccaagggcccatcggtcttccccctggcaccctcctccaagagcacctctgggggcacagcagccctgggctgcctggtcaaggactacttccccgaaccggtgacggtgtcgtggaactcaggcgccctgaccagcggcgtgcacaccttcccggctgtcctacagtcctcaggactctactccctcagcagcgtggtgaccgtgccctccagcagcttgggcacccagacctacatctgcaacgtgaatcacaagcccagcaacaccaaggtggacaagaaagttggtgagaggccagcacagggagggagggtgtctgctggaagccaggctcagcgctcctgcctggacgcatcccggctatgcagccccagtccagggcagcaaggcaggccccgtctgcctcttcacccggaggcctctgcccgccccactcatgctcagggagagggtcttctggctttttccccaggctctgggcaggcacaggctaggtgcccctaacccaggccctgcacacaaaggggcaggtgctgggctcagacctgccaagagccatatccgggaggaccctgcccctgacctaagcccaccccaaaggccaaactctccactccctcagctcggacaccttctctcctcccagattccagtaactcccaatcttctctctgcagagcccaaatcttgtgacaaaactcacacatgcccaccgtgcccaggtaagccagcccaggcctcgccctccagctcaaggcgggacaggtgccctagagtagcctgcatccagggacaggccccagccgggtgctgacacgtccacctccatctcttcctcagcacctgaactcctggggggaccgtcagtcttcctcttccccccaaaacccaaggacaccctcatgatctcccggacccctgaggtcacatgcgtggtggtggacgtgagccacgaagaccctgaggtcaagttcaactggtacgtggacggcgtggaggtgcataatgccaagacaaagccgcgggaggagcagtacaacagcacgtaccgtgtggtcagcgtcctcaccgtcctgcaccaggactggctgaatggcaaggagtacaagtgcaaggtctccaacaaagccctcccagcccccatcgagaaaaccatctccaaagccaaaggtgggacccgtggggtgcgagggccacatggacagaggccggctcggcccaccctctgccctgagagtgaccgctgtaccaacctctgtccctacagggcagccccgagaaccacaggtgtacaccctgcccccatcccgggatgagctgaccaagaaccaggtcagcctgacctgcctggtcaaaggcttctatcccagcgacatcgccgtggagtgggagagcaatgggcagccggagaacaactacaagaccacgcctcccgtgctggactccgacggctccttcttcctctacagcaagctcaccgtggacaagagcaggtggcagcaggggaacgtcttctcatgctccgtgatgcatgaggctctgcacaaccactacacacagaagagcctctccctgtctccgggtaaatgagtgccacggccggcaagcccccgctccccaggctctcggggtcgcgcgaggatgcttggcacgtaccccgtgtacatacttcccaggcacccagcatggaaataaagcacccagcgcttccctgggcccctgcgagactgtgatggttctttccacgggtcaggccgagtctgaggcctgagtggcatgagggaggcagagtgggtcccactgtccccacactggcccaggctgtgcaggtgtgcctgggccgcctagggtggggctcagccaggggctgccctcggcagggtgggggatttgccagcgtggccctccctccagcagcagctgccctgggctgggccacgagaagccctaggagcccctggggacagacacacagcccctgcctctgtaggagactgtcctgttctgtgagcgccctgtcctccgacccgcatgcccactcgggggcatgcctagtccatgtgcgtagggacaggccctccctcacccatctacccccacggcactaacccctggcagccctgcccagcctcgcacccgcatggggacacaaccgactccggggacatgcactctcgggccctgtggagagactggtccagatgcccacacacacactcagcccagacccgttcaacaaaccccgcactgaggttggccggccacacggccaccacacacacacgtgcacgcctcacacacggagcctcacccgggcgaaccgcacagcacccagaccagagcaaggtcctcgcacacgtgaacactcctcggacacaggcccccacgagccccacgcggcacctcaaggcccacgagccgctcggcagcttctccacatgctgacctgctcagacaaacccagccctcctctcacaaggtgcccctgcagccgccacacacacacaggggatcacacaccacgtcacgtccctggccctggcccacttcccagtgccgcccttccctgcagctggggtcacatgaggtgtgggcttcaccatcctcctgccctctgggcctcagggagggacacgggagacggggagcgggtcctgctgagggccaggtcgctatctagggccgggtgtctggctgagccccggggccaaagctggtgcccagggcgggcagctgtggggagctgacctcaggacattgttggcccatcccggccgggccctacatcctgggtcctgccacagagggaatcacccccagaggcccaagcccagggggacacagcactgaccacccccttcctgtccagagctgcaactggaggagagctgtgcggaggcgcaggacggggagctggacgggctgtggacgaccatcaccatcttcatcacactcttcctgttaagcgtgtgctacagtgccaccgtcaccttcttcaaggtcggccgcacgttgtccccagctgtccttgacattgtcccccatgctgtcacaaactgtctctgacactgtcccacaggctgtccccacctgtccctgacgctgtcccccatgctctcacaaactgtccctgacattgtccccaatgctgcccccacctgtccaacagtgtcccccaggctctccccacatgtccccgacactgtcccccatgctgtccccatctgtccccaacactgtcccccaccctgtccccctttgtccccaacactgtcccccacagtttccacctgtccctgacactgtcccccatgctttccccacctgtccctgacaccatcccccactctgtcccctatagttcctggccctgtcccccacgctgtcccctacagtacctggcactgtcccccatgctgtcccctcctgtatgaaaccctgtcccacatgctgtccccacctgtccgtgacaatatcccccacactgtccccacctgtccccgacactctcctccacgttgttcttacctaaacccgacactttcctccatgctgtccccacccatctccgacactgtaccccacgttgtccccacctgtcctcaacactgtcccccatgctgtccccacctgtccccaacactctcctccatgctgtccccacctgtccctgatattgtcccccatgcagtctccacctgtccccaatgctgtcccccaggctgtacctaccagtacaacactgtcccccatgctgtccccacctgtccctgacactgtcccccacgctgtcccctcctgtccccgacactgtcccccacactgtccccacctgtccccaacactatcctccatgctgtcccctcctgtccccacctgtcccctacactgtcccccatgctgtccccaccagtccccaaaactttcctccacactgtccccacctgtccccaacactgtcccccacgctatcccccctgtccccgacaatgtccccactgtttcctcctgttccctcctatccctgacactgtccgccatgctgtccccacctgtccctgacactgtctcccactctgtcccctataatccctgacactgtcccccacgccgtcccctcccgtatgcaccactgtcccccaagctgtccccacctgtcctcaacacagtcccccatgctgtccccacctgtccccaacactctcctccatgtccccacctgtccctgatattgtcccccatgcagtccccacctgtccccgatgctgtcccccgggctgtacctaccagtccaacactgtcccccacactctccccacctgtccctgatactgtcccccatgctgtccccacctgtcccggacactgttctccacgctctcccctcctgtccctgacactgtcccccacactgtccccacctgtccccaacactatcctccatcctgtcccaacctgtctcctacactgtcccccatgctgtccccaccagtccccaacactgtcctccatgctgtcccccatgtccccaacactgtcccccatgctatctcccctgtccctgacaatgtccccactgtttcctgtcccctcctatccctgacactgtcccccatgctgtccccacctgtcccccacatggtctccaccggtccctgacactgtctcccactctgtcccctataatccctgacactgtcccccacaccgtcccctcctgtatgcaccactgtcccccatgctgtccccacctgtccctgatgctgtcctccacacagtccccacctctccctgacactgtccccatctctccccaacactctcctccatgctgtccttaactgtccccaacactcttccacactctgtctccacctgtccctgacactgtcccccacactgtcctcacctgtgtctgacactgtcccccacgctgtccccacctgtccctgacgctgtcttctgtgctgtccacatgctgttggtgccctggctctgctctctatcaccaagcctcagagcaggcagtggtgaggccatggcacctgggtggcatgaggggccggatgggcctcaggggcagggctgtggcctgcgtggactgacgggtgggtgggccttgggggcagagaggtggcctcagtgccctgaggggtgggtggggctcgggggcagggctgtggcctcgctcacccctgtgctgtgccttgcctacaggtgaagtggatcttctcctcggtggtggacctgaagcagaccatcatccccgactacaggaacatgatcggacagggggcctagggccaccctctgcggggtgtccagggccgcccagaccccacacaccagccatgggccatgctcagccaccacccaggccacacctgcccccgacctcaccgccctcaaccccatgactctctggcctcgcagttgccctctgaccctgacacacctgacacgccccccttccagaccctgtgcatagcaggtctaccccagacctccgctgcttggtgcatgcagggcactgggggccaggtgtcccctcagcaggacgtccttgccctccggaccacaaggtgctcacacaaaaggaggcagtgaccggtatcccaggcccccacccaggcaggacctcgccctggagccaaccccgtccacgccagcctcctgaacacaggcgtggtttccagatggtgagtgggagcgtcagccgccaaggtagggaagccacagcaccatcaggccctgttggggaggcttccgagagctgcgaaggctcactcagacggccttcctcccagcccgcagccagccagcctccattccgggcactcccgtgaactcctgacatgaggaatgaggttgttctgatttcaagcaaagaacgctgctctctggctcctgggaacagtctcagtgccagcaccaccccttggctgcctgcccacactgctggattctcgggtggaactggacccgcagggacagccagccccagagtccgcactggggagagaaggggccaggcccaggacactgccacctcccacccactccagtccaccgagatcactcagagaagagcctgggccatgtggccgctgcaggagccccacagtgcaagggtgaggatagcccaaggaagggctgggcatctgcccagacaggcctcccagagaaggctggtgaccaggtcccaggcgggcaagactcagccttggtggggcctgaggacagaggaggcccaggagcatcggggagagaggtggagggacaccgggagagccaggagcgtggacacagccagaactcatcacagaggctggcgtccagccccgggtcacgtgcagcaggaacaagcagccactctgggggcaccaggtggagaggcaagacgacaaagagggtgcccgtgttcttgcgaaagcagggctgctggccacgagtgctggacagaggcccccacgctctgctgcccccatcacgccgttccgtgactgtcacgcagaatctgcagacaggaagggagactcgagcgggagtgcggccagcgcctgcctcggccgtcagggaggactcctgggctcactcgaaggaggtgccaccatttcagctttggtagcttttcttcttcttttaaattttctaaagctcattaattgtctttgatgtttcttttgtgatgacaataaaatatcctttttaagtcttgtacttcgtgatgggagccgccttcctgtgtccacgcgcctcctgcccccggtggaaaacacggtcaggaggaggctggtccagctgcacctcgggggctccctgcatacgccccccgcctcctgcagccacacgcattgcccgagcgaccctccctggcccctgtcactacatggacccccggggcttctcctcttttctacatggatgcagtttctcctcctgctgggcacggtgctgcctgccctggtcactctgcgggggacagggcctccagggaaagctgggtcgaggctgggagctggctcaggctggccaggcagagccacagggagggccttccagaaccaaccatggtccgaagcgagaggtgggtgtcagatctgtgtgcgtcagctcaggaccacagcggggcagctcccacggcagacatggatcctcccaggcctagagaccaggaatctgagatcaggatgcaggcagggctggtttctctcaagccctctctccttggcttgtagacaccgtctcctccctggtcctcacatggccatacctctgtgtgcccgtgtcctaagcttctcttcttagaacacacatcggattagattagtgaccccctatgaacttaatgacctctgtaaagaccccatctccaaatagtcacattgtgaggccagggattaagacttgaatatatgaatttgtaggggccacgatttaacccatcacagtccagactctggcccccaaaattcatgttcttctcacatgcaaaacacattcatcctgtctcagcatccccctgggcactaggtcatgtagcaaggacggattctcaacagaaataactattgcaacggaagaaagagtccggcatgacctggactcaccttcatctgtgcagaggccacagccttgtaaagggaggtggtagggggagcagggtgggtgctcggggctcagtcgttggggaagggaaaagtttcccagcgctggtcagcgtccccgggatgggacccgctgtgtccgtgccggccactgttgaggtcaggattctgtcctcccagagcctggagacacaggccccatccttcacaaaggggacacttcagggagtggctctcaggtcccgagaaagaccctcctgggtcacaggaaatgcacagacatcaggaacggatagaaggtcgtgtggttgcggccctctcagcagataccctgagaaagggaggtcggggttggtccaaacggtgagttctggtgcacggagctttctcaggcaggtgttgacggggcaggggtcggcctaggggtacggccagaagctgttagaaactgttagtgtctgctcaagtctttacaagccaaggttgaggccgagtggagaggctccgaggagcctggctggaactcagtcaaggacagggtcttgttactgcagtggctgcggtggctgcggtggctgcgaaatgccgtcggagttgcctgtggcaggagagagaccatctcacccaggaaggaggagtggttggattcgtttgtgtggcatcgagcagctggagcttcaccaaacacagagttggggatgaaatccccagagcccggaccctgccatgccgtgggaaggctcgctgctggagggtgggctccagggggcctggcctgaactgggtgctgaagcccagccctttaactctcaggacacgctgctgcagccccgcggggggtgagggagacagcacctggggtgcagggcgggcagctgctgcatcaccggctctatcccaagcccaaggatggcgtcccagagatgcaggagagctttgtccagagaaggtgccagccctcagggaccctgctggacagctctccaccctctgcccttcaaggggccctacgggcctccgggtgccctggtggggtgggctccagtccactgtctgaggatggacggcctggccaggataaggaaaggagacccaggacggtgccgggctccgggtcattccgtgcactgagcaggctgagttgggaagaagcagatgcttcctgcagctcctgcccctgcagggcctggcgcctggaccaggttcccctggggaaattgggcccctccctgagccacccggggcccacctcccactttctacctgggaccgagcatcctccagagggtcagccctcctgcgggaacaccatgcccagccccaggaccctccctcaactctccagcaaggctgcccctgcacgcccccagcagcccatgctgtgatgtagcatgacatcatgtgatgtggtgtgatgtcctatgacagggtgacatccctggtgtgatgtggtgtgatgtggcgtgatgtcctttgtgtgatgtggtgttggactacatggttggacatagtgtgatgtggtgtgaccgagtgtgacatccctggtgagatgtggtgtgacatggtgtgaggtgttgtgacatggtgtaatgtccctggtgtgaggtggtatgacatggtgtgaggtgttgtgacatggtataatgtccctggtgtgaggtggtgttggacatgatgtgatgtggtgtgacagagtgtgatgggtatgacatccctggtatgatgcggtatgagattatgtggtatggtgtgacatgatgtgatgtggcgtaacatccttggggtaatggggtatgatgtcgtttgacgggtgtggtggtgtggggtgtgatgaggtgtggtgtgacatgatgtgacctgtgacgtgctgtgtcagggtgccacatccttgctgtgatgtgatgcggtgtgacacggtgtgatgtggcatgatggggtgtgacccggtacgacatccccagtgtgatgagttaatggtgtgatgtgtgacatccctagtgtgacatagtgtgatgtggtgtgatgaagagggcctcgccctccacagctgtgggtatttctcatcaggtggaaacacgagactgagaaaagaaataagacacagagacaaagtgcagagaaagaacagtgagcccaggggaccggcacactcagcacgcgaggacctgcaccggcaccggtctctgggttccctcagtatttattgatgactattttcactatctccatacggggagtgcggcaggagaacagcgtgaacagggtgatgatggggagaaggtcagcaggaaaacatgtgagtaaaggaatctgcatcataaataactcccagggaaggtaccgtgctgggatgtacacatagactagatttatgtttctctttacccaaacatctcagtgtagtgaagagtaacagagccgtatcaccgctagcatatcttgtctccagccttagggcggttttctcctacctcagaatagaatgaatggtgggtgtaaagcccagacattccattcccagggacgtgcaggaaacagaggccttcttcttatctcaaccgtaaagaggccttcctcttttaccaatcctcctcagcacagaccctttacaggtgtcaggctgggggacagtcaggtctttcccttgccatgaggccatatctcaggctgtctcagtgaggagaaactgggacaatacctaggctttctccggcagaggtcccttcagctttccgcagcgtattctgtgcctagttaacagagaatggagaatggcgatgacttctaccaagcacactgcctgcaaacgtatcgtgaaccaggcacgtcctgcgcagccctaaaccccttaaaccttgattccatgcagcacaggtttctgtgagcacagtgttggggctaaagttacaggttaacagcgtctcaaagcagaacaatttttctttgtacagatcaaaatggagtttcttatgtgttccttttctacataggcacagtaacagtctgatctttcttttccccagtgtgacatggtgtgacgttcctggtgtgattcttgtgttgtgacatttgtggtcaccccaggatacagaggtctctgtggccaagggaagggggagaatggaaccatctgagcatgttgacctggaggaattggtggcccttgagtccacgaagcccacccttccaggtgcccctgccccacgtgacccaagtgggcttgcagagcagcaagcaggactctggttagacaggaggaaggacctgccaccacgtggccttgtgaggagacagagcgaggctgtgacctcggcgtccgaggcaggctgaagagacgggcagagggaggatgctggggaggcaggggtgaggggagtgagagcccaggtttcagctgagcccctccacagggaaggagcctagctgaacacccatctccccacacactcccaaccctgcctctgcccgaccacctcccagaaggcacctcgacccctctgctacccacactcagcaaggggtatggtgtccccaccgagtccagccagtgaggcccggcacagccacgcctgtgcccaccactcccatggccaagctcgctgctaacatggcaggacagggccaggcctggaggagacagaacatcagtcccatggggaagctccctgctcacacggcagggccgggcctggagaagacagaacaccccatccggcatggtactcaggctgcacatgcctgccacgaacgggggccacgcgacaatgctgccacgcacgggggacacacgacaatgcctgccatgcatagtggccacacaacaatgcctgccacgcgtgggggacacgcgacgatgcctgccatgcatggggacacgtgacacacacatacacacacgggcctcacaggcacacgaatgtttgcaaccccagcacccacccagcacactcaggcacaggctccctgggcgggtcacaacctcacaccttgagctactccatgtgccaggctcttcacccacgttcccgtccccggtgctagctattgagccacactgtcttctctgtggatccctcccagcccactcagcacaatggacatgctctctaccatccagtgactgcaccggcctcttcccctcagcacccacgtctggccatctcccaggaaacccggaccaccacgggcagggaccaccttcctcactgtccacatggaccaccccacacctgacctcagatgcagtcacactacgtcctgcttcaatattgaaagggggaaaagctggaggagggtaaagatgaaagagaaaaaagcaagaggggagggtcacattcttctgaggctttgattacatctcactgagccccccacgttgcatgaaaaggaggggtggagggagcaattacgcattcgccttgtgctcactaaatctacactttataagcaaataaacagagtagaggaagaagtcaaatatgcattcgtctcaggggtaggagggacgatttcttgtctcattttgtcccatgtcatgaagaccagctgttaatttatattctcagggtgagggaggccacctgggtagacctggcctatctgctgctgctatcagtttggaaacaaaaggaaacgcatgactttttttttttttcatgactcagcttcccacctcaacggttcattttggcatagtgagtttggagtcctgagattttattttcctttcacaatggtcaagatcgcaccctcagtattcaggagagctggtccaacccagacccctgctgtccctggacacttgaaatacgtgctgcagtctctgacactctctcaccatggtagaaactgaggtcttggcgagtctgcagcccctgctcatggggacaatgcaggctgaaacccgcatttctgacctcaaagctcctgttcttttcactcacccccacaccacctctttgagtccagagctttgtccttgcctgagtcctaccctcagggacaggggcccaacccagacaccaacacatcataccctgagagggtgccaggagcccagagatgtttggagagcacagaagccctggaggctctgtggagatgctgcacatttctctattcaacagatactcaccaggtggccagcggcagagatgccacatggcatggagctcgccttggccaacaggacaggtgtggggttgggaggccttcccacggcactccttgaagcagagctgtggggaaaagttggggccaacctcagatctccccatcaacaccggttctcctgccctcccgggccacagaaaactaagctccctggatactgcggctgggtggggccatgagggagaagaaatcacgagttaagagatcattttttaaaagtattatgatcaggactcacataaacatatgacgacacatttcagagatgctctttatctcattaattaaggtgttgcaaccagttcaaagtggaattctaagtactacacttacataattgattcaggaatactaaaaggagttcatagatagatgcaaaactggccttttccctggcagaggaggagcaattcattgtcctttcaaagatgagaacttggatttctaccaactcaaagagtttttgcattgctatcaattatgtacaacttagagccgtggtccccaacatttttggcaccaggaaccagttccatggaagacaatgtttccacagaccaggatcgggggatggtttggggacaaagctgttccacctcagatcattaggcattagggtgtcataaggagcatgcaacttagatcccgggaatgtgcagctcgcaatagggttcgctcctatgagaatctaatgctgccactgacctgacgggaggtggagctccggcaggaatgctcacacacccctcacctcctgctctgtgtcccagttcctaacaggccatgaactggttccagtgcatgacccaggggttggggacccctggcttatagaggtgtaaaatagttcaaaggaaataaaagatgcagagctccatagaataaaataacttggaagagtctacaagacgatgccttgctttccatggaaggcaccaagtaatcatttggtccatttcagtttttctcaatgtttcctataaacatatataactgactgacacaaacagatccataatataaagaagacccctgtaaaccaatgagaaaaaaaaatcaaataatctaatgaggaataggcaagagaattgaacagatgttttacagaagatatccaaatagccactaaacatatgaaaacatgttgaaccacactagtcaacagggaaatgaaaatgaaaaaccacgtgagagaaagtagttctgattccaataatgctggagcagctaatatcagaccagccctttggcagaaggcaattataaacactggaaatgctgtaagcacacacaacacccacacacaccaattgcaggcactgggacatgaccagaagtaggcaaacactagtaaggattattccgtgaaatattcgtctgaagtcacaccccagtgcaggtaatgggtgcagctagagtttaagcaggaaactgcagccctcctggtgaggagtgggatgcagggctgcattttcagagcagctggaaatgaagagaagatatccgtaaaggagaaggtcaccgaagggaaaccccacaatctgcaagtaaactccagtgaaacctctggccgattccttaggtgtgcatgggtagggaaaactccaaagggtccagcagaaagcaacacctgtaaggtcaagagaactgagattccagctactgccaactgccaggcaggcagacttgggagtttgagtcaactcaagctaactgcttgctaacattgaaaaaaacaattaatgctctgctaagaaagaatgcaaaccccatagcctgtaccacatgttatcaacaacatcaggcacacatccaaaattactatgtatgcaaagaaacatgaaaatgtgatccaaagtcaaaagaaaaagggatcaatggagatcaactccaagatgacctagatgcagatacagttatcagacaaggactttaaagaagttatgttaaatatgttcaaagacttaaaggaaaatatggttatcatgagtgactagatgaggtatctctataaaaaactgaaaatagttacaagaagcgaatgaaaattctagaactaaaagtatgattcggaaatgaaaaacatcatttgaccaggcccagtggctcatacctgtaatcctagcactttggaaggccaacaaggaaggatcacttgacctcaggagttggagaccagcctgggcaacatggtgaaaccccatctctattttattaaaaaagaaaagaaagagaaaaacattacccaagtttaataacagattggacaagacataagaaggaacagaaaacttaaagatgcatcaatagagtatatcaattctttttaatccaatccaaagaagaaagagaaaaatactaaaaaatgaaaagagattcatcctgctggagaaggcgaagcattctaaaacatgcaaaactggagtccagagggggatgtaatacttccatgagaaacgtcaaccctaagctatatgcaaatgtacctgcgtaggctggtgtggtgggctgatggcatctccctggccaaatgtatgcccacctggaacctcagaatgtgaccttatttggaaatggggtctttacaaattaggttaaggacttgagatgatatcatactaaattttggatggatcccaagtccaaacactggtgtcctcataagaggagaggacacagacacacatggaggtaagccatatgatgacaaaggagaagatgaggggtgtgtcaggagccacctgtgtttgtccatttgcattactgtaaagaaatacctgaggctgagtaacttatgaaggaaagaggttcaattggctcacagttctgcaggctgtataggaagtatggcaccagcatctgcttctggcgaggacctcaggaaacttacagtcatagcagaaggtgaagggagagcaggtatgccacatggcaagaatgggagcaagaggctgagggggggccccagacttaaacaactagactgtgtgtgagctgactgggggagaattcactcatcaccaaggggatgattctaaatcattcatgagggatcttcccccttgatctaatcacctcctaccaggccccacttccaacactgggaatcatattacaacatgagatttggaggggagaaatatataaaccatatccttccacccctggtcccccaaatctcatgttgcaaaatacaatcatgccttctcaacagtcccccaaagtcttacctcattccagaatcaacccaaatttcccaagtcccaagtctcatctgaagatgactcccttccacctatcagcctatgaaatcaaagacaaattattgactcccaaaatacaatgagagtgcagacattgggtaaacattcccattccacaagggagaagttggcaaaaagaaaggatctacatgccccatatatgtcagaaatccagcagggcagtcattaaatcttaaagctccaaggtaatctcctttgacttcatgtcccatatccagggcacattggtgcagggggtgggctcccaaggccttggaaaactctacccttgtggctttggaggatgttgcccctgtggcttctctcacatgatagagttgagtgcctgtggcttttccagattcagggtgcaaactgccagtggatccaccattctggggtctggaggacagtggcccccttcccacagctccactaggcagtgccctggtggggacattatatgggggttcaaccccacattctctttggcactgctctagtagaggttctctgtgagggctccatgctggcaggaggcttctgtctgggcacctaggctttctcatacatttctgaaatctagagggaagatgccaagcttccttcactcctgtattctgggggcctacaggcttaacaccagatggaagtcaccaaggcttatagtggcttgcactctccaaagaagcagcctaagctatacttggggccctttgagccaaggctggagccagaggaaccaggatgtggagagcagtgtcccaaggctgcacaggcagcagtggccatggccatggcccacaaaaccatcctttccctcttggcctctgggcctgtgatgggaaagaccacctcagagatttccaaaatgccttcaaggccttcttccctttgttctggatatgagcacttagctctcttttagttatgctaatctctctagcaactggctgctccatagcctacttatatttgtctcctgaaaataccttttcttttctaccatatggccaggctgtgaattttccacatttttaatgctctgcttccctttgttgatgaaaaaagccaaactccataaaacacttgaaaaattgattctgagccaaatatgagagccatgaactgtggcacagcctcaaaaggtcctgagaacatgtgtgcaaggtgcttgggttgcggcctggttttatgttttagggagacatgagacatcaatcaatacatgtaaagtatacattggtttggtttggtttggaaaagcaggacaattcaaagtggggaattccaaatcataggtggatttgaagattttctgattggcgattggctgaaaaagttaaattatctaaaaagttgaagtcagcgaaaagcaatgcttaagataagggggttgtggaagccaaggttcttgttatgtagacgaagcctccacgttccagagagaagagatggtcaatgtctcttatcagaacctaaaaggtgccagactcttggataaatctctcctgaatcaggaagagacctggaaagggaaaaagattctcaacagaatatacatttcctccacaagagacggctttgcagggcccttccaaaatgtgtcagagaaacatattctgggataaaatactttaatttccttccatgcctgccacctgtcatgtgatgctataccagagtcaggttgggatttgataccttattgctacaaagagtctgctttgtcagtcttaagctccctgttttaatgttaacactggtcagctgagcctaagctccaacagggagagggtatagtgagggagtccaaaccaccctccccttcctgtcatggcctgaactggttttccaggtttctttggaatccccttggattagcattttattttttcatttgcaacttttaaatataagttccaactttaagtcatttctttgctcccatatcttaccctagactgttagaagcaaccaggtcacaccttagaaacgtctgcttagaaatgtcttccccagatgccctaagtcatcactcttaaggtcaaacttccacagatccctagggcatgaacacaatgcagccaagttgtatcttaggatttaacaagcgtgacctttactccagttcccaataagttcctcatttccatctgagatttcatcagcctggctttcacagtgcatatgtctatcagcattttggtgacaaccatttaatagtctctaagaaattccaaactttccctcatcttcctgtcttcttctgagtcctccaaattcttctaacctctctgcctgttacctaattccaaagctgcttccacattttcaggtatctttatagcaatgttccactcctcaataccaatgttctgtgttagtttgtgttactagaaaaaaaaatacatgaggctagtaatttataaagaaaaggtgtttaggccaggcactgtggctcatacctgtcatcctagcattttgggaggcagaagcaggaggatcacttgagctcagaagtttgagaccagcctgggcaacatagtgagaacttgtcttgaaaagacaagaagaagggaagggcgggggagagcagaagagcagaagggaaacacggccctggcatctgcttctggtgaggcctcagggagattgcaatcatggcagaaggcgaagggggagcaggcatgtcacatggcaagagggagcaagagaaaagaagtggcacgtcccagaattgtaaacaacgagctgtcacagggactaactgagggagaactcactcatcacctgggagatggtgctaggccattcatgaggggtccagccccatgatctaatcacctcccaccaggcccacctccaacactggggcctgagagagaagagaacctcccccagcactcggtgtgcatcggtagtgaaggagcctcacctgagcccccgctgttgctcaatcgaattcccaagaacagagagaaaagggaacttccagggtggcccgggcctccaggggttcccactccatttttagctgaaagcactgaggcagagctccccccacccaggctccactgcccgacacagaaataacaaccacggttactgatcatctgggagctgtccaggaacccgacagggagccggacgggccacaccagccacaggcaccaaatggacgacccggcgcttcaggtatcccagcccaccgggagccccaatcaaggggccggcccaggcagcagtgagggagaggctgcctgggtccctgacagcgaggggactcctgggccaccctcacagcatcaaccaagcttcttagttactgcatggactccagacgtcccttccctgcatggggacacaggaaagctagaaacagcctaacgccgacctggagaaggcagggggctgggaatcttggctgggcccaagactaagaaggtcagaggccccatgctgggcagggctaggctgggtgcagactgcctgtcacccccaggacagggacagccaacccagagccgggagggagggtggggaggcggcagcagggagctgtcctgagctccactgcgcaactggctgatcttggcaagtccgagctgggtggactgaggggggcttggctgagtggactagactgagacgggcctaacagactgagctgaggcgagctgggtgggctgagagggctaccctgtcccttagaggacaggtggccaagctgggctgtcctgagccagggcgatcggggctggcccgggccaggcgggtttagctgagttgagtgagtggactgggtagagggaaatgagctaggctcagctgagctaggcttgagctgggttatcctaagccctaaggtggactgagctgggctgagctggacttatctggggagcagggcaaagtcaggctgagctgaggtggcctgccctgggtggtccaggattgagttaagctgaattaggctgacctggacttgactggacttggttgaaataagctgggccgacacaggagtagggacaagctacagttctctacttaggataaaatgggtgctcgtggactatccgggctgaaggagaccaagctggggtattacctgctgagcttacctgacctggcctgagttcagcagggctgcgctgagctggacagacctgagccaagcttagctggttgggctgagtaagctgggctgagctaaatgggattgagctgaggagggctaggctgggggagagacctgacgacggacagggttaaaagctggagtgagcaggccttaaattattgaactaaattgggctggggtgatctgaatttagctgggatgagctgggctgggctgaactgtgcccacgtgaactgggctaaactaggctcgcctgagtggactcagctgggttggtctcaactgggttcagctgagctgggctcggctagactacactgggttcagctgacactacactgggttcaacccgagaggggtgagcgcctacctaagccggcccagcccgttcgacctgttcatccgcaagtcgcccacgatcacctgtctggtggtggacctggcacccagcaagtggaccgtgaacctgacctggtcccgggccagtgggaagcctgtgaaccactccaccagaaaggaggagaagcagcgcaatggcacgttaaccgtcacgtccaccctgccggtgggcacccgagactggatcgaaggggagacctaccagtgcagggtgacccacccccacctgcccagggccctcgtgcggtccacgaccaagaccagcggtgagccacgggcaggccggggtcgtggggggagggagggagcgagtgagcggggcctgggctgaccccacgtctggccacaggcccgcgtgctgccccggaagtctatgcgtttgcgacgccggagtggctggggagccgggacaagcgcaccctcacctgcctgatccagaacttcatgcctgaggacatctcggtgcagtggctgcacaacgaggtgcagctcccggacgcccggcacagcacgacgcagccccgcaagaccaagggctccggcttcttcatcttcagccgcctggaggtgaccagggccgagtgggagcagaaagatgagttcatctgccgtgcagtccatgaggcagcgagcccctcacagaccgtccagcgagcggtgtctgtaaatcccggtaaatgacgtactcctgcctccctccctcccagggctccgtccagctgtgcagtggggagggctggccagaccttctgtccactgttgcaacgaccccaggaagctacccccaataaacagtgcctgctcagagcccagggtacacccgttcttgggagcgggcagggctgtgggcaggtgcatcttggcacagaggaatgggccccccaggaggggcagtgggaggaggtgggcagggctgagtccccccaggagaggtggtgggaggaggtgggcagggctgaggtgccactcatccatctgccttcgtgtcagggttatttgtcaaacagcgtatctgcagggactcatcacagctaccccgggccctctctgcccccactctcggtctaccccctccaaggagtccaaagacccaggggaggtcctcagggaaggggcaagggagccccgacagccctctctcttgggggcttggcttctacccccctggacaggagcccctgcacccccaggtatagatgggcacacaggcccctccaggtagaaaaacagccctaagtgaaacccccacacagacacacacgacccgacagccctcgcccaagtctgtgccactggcgttcgcctctctgccctgtcccaccttgccgagtcctggccccagcaccggggccagtggagccgagcccactcacaccccgcagcctccgccaccccgccctgtgggcacaccaggcccaggtcagcagccaggccccctctcctactgccccccaccgccccttggtccatcctgaatcggcctccaggggatcgccagcctcacacacccagtctcgcccactcacgcctcactcaaggcacagctgtgcacacactaggccccatagcaactccacagcaccctgtaccaccaccagggcgccatagacaccccacacgtggtcacacgtggcccacactccgcctcccaccctgcctccagcgaggctactgccaagcccttcctctgagccatacctgggccgctggatcccagagagaaatggagaggccctcacgtggtgtcctccagtccaaccctccctgtcaccctgtcagcagcaccccacagccaaacacaggatggatgcgtgggctccatcccccactcacccacaccggaaccccagagcaggctacgtgcccctcacagacctcaaacccacatgtgcatctgacaccccagatccaaacgctccccccggtcatgcacaccaagggcacagcacccaccaaatccacacggaaacacgggcaccgggcaccccatgagcacaaagcccctccatgtctgaagacagtccctgcacaccgtcacagccatacattcagcttcactctcacgtcccagcccacctgcacccagctctgggcctggagcagcagaaagaggtgtgagggcccgaggccggacctgcacctgctgatgacccgggaccagcaggcagctcacggtgttggggaagggagtggaggggactcagggcaggagccagagggaccaggctggtgggcggggccgggccggggtagggccaggaggcagctctggacacccacaggcctgggctcatagtccacaccaggacagcccctcagagcacccatgcagtgagtcccaggtcttgggagccaggccgcagagctcacgcatccttccgagggccctgagtgaggcggccactcctgtgccgaggggttgggtccttctctggggagggcgtggggtctagagaggcggagtggaggtaaccagaggtcaggagagaagccgtaaggaacagagggaaaatggggccagagtgggggcccagggacgagaggtcaggagtggtcggcctggctctgggccgttgactgactcgggacctgggtgcccaccctcagggctggctggcggctccgcgcagtcccagagggccccggatagggtgctctgccactccggacagcagcagggactgccgagagcagcagggggctctgtcccccacccccgctgccactgtggagccgggagggctgactggccaggtcccccagagctggacgtgtgcgtggaggaggccgagggcgaggcgccgtggacgtggaccggcctctgcatcttcgccgcactcttcctgctcagcgtgagctacagcgccgccatcacgctcctcatggtgggcacccacctccaggggcccggccagggcagggggttgggcagagccagcagagcgccctgacccacgccctcccctcaggtgcagcggttcctctcagccacgcggcaggggaggccccagacctccctcgactacaccaacgtcctccagccccacgcctaggccgcgggccactcacgctccaccaggcccagctttttctctgccagcgcctgagcctccctcgggctgcgccctgccctgggtgggaaaagggaagcagacaagaaaagggggcacaaggtcactactgtgggctgatggccagtgaacctgagcccagagggggccggctcagccgcaaggttaaaggcgccgagagaaccaccagtcgcagcccccacccgaaaaccgtgtctgtcccttcaacagagtcatcgaggaggggtggctgctagccgttctgagctcatcccaggcccctgggtctccgggtcactcccattctgactgtacaatcaccaaaagccaaggagggcccagcacccagcccaggacacagctgagtctgcgtccagcccaacaccagcccacggcctcactccccagcctcggtctgacccttctagccctgagatccaagtgcctggcatccccgtcccccaagcctcacccagaccttctttcccttcacccacccctcctgccacccatccacagcccccatcccttcacccacccctcctgccatctatcctcagcccccatcccttcacccacccctcctgccatccatccacagcccccatcccttcacccacccctcctgccatctatcctcagcccccatcccttcacccacccctcctgccatccatccacagcccccatcccttcacccacccctcctgccatctatcctcagcccccatcccttcacccacccctcctgccatccatccacagcccccatcccttcacccacccctcctgccatctatcctcagcccccatcccttcacccacccctcctgccatccatccacagcccccatcccttcacccacccctcctgccatctatcctcagcccccatcccttcacccacccctcctgccatccatccacagcccccatcccttcacccacccctcctgccatctatcctcagcccccatcccttcacccacccctcctgccatccatccacagcccccatcccttcacccacccctcctgccatctatcctcagcccccatcccttcacccacccctcctgccatccatccacagcccccatcccttcacccacccctcctgccatctatcctcagcccccatcccttcacccacccctcctgccacccatccaaagcccccatcccttcacccacccctcctgccatccacctcagcccccatcccttcacccacccctcctgccatctatcctcagcccccatcccttcacccacccctcctgccatctatcctcagcccccatcccttcacccacccctcctgccatctatcctcagcccccatcccttcacccacccctcctgccatctatccacagcccccatcccttcacccacccctcctgccatccacctcagcccccatcccttcacccacccctcctgccatctatcctcagcccccatcccttcacccacccctcctgccatctatcctcagcccccatcccttcacccacccctcctgccatctatcctcagcccccatttctgcagcctgaaggcacagggaagccctctgaggccaggccacaggacggttgagggcttcgggcccctggagtgggtagaggggctcccacagccagagaaggggtttcctgcagggacagcagctgccgacctcgtccctatgacctcgtccagtgtctggcttcagcagtcatacttctttctctctgagtttcttagtaaagatccttttcacaaaccccacgtctccggagggctctgtaggaggtgtgtgtggccctggagtggctggtgggaggcaggacccctgaggacgtgcaggaggagccagaggggaaggaagggcaggggccattctggggtcctgagagccaaagtgcccaagcagtggttcccatcaatcacccctcagcaccccagagactccccagctcagcgctgtcatacctggtctgctggtctccagcccagactcatgcctccttctcaggtaaagtcaaagcaacaatcaacatcgacccctttgtgggcaaaaccagaagaggcccatgctgtggtcagcacaggaggccccaagaatgcagctgcacagtcaccaaggtggaggctggtgggggcccccaggaccactggccacacaccctgatccagcacccactgagcacagacaaagctgactccccagcccacagccgcccaccagcctggacctcctgaagagctgagaggtgacccaggagcaggctggggccccagagccatcggggccacaggtgggcttgacccacaccagtcctcagggcaaatgtgcagcctccctggctggagaggcctgcttacaagggtctccacaacatcctaaaaatgggagagaacgcatgataggcatgacaaagggcagggttccctcatatacaaagagcactcagagatcactaagaagaaaggtgagcaataggttcttcatggaaaggaaaaacccagtggccgataatataaagaaaccattttaacaatgagaaaagtgaaaggaaggaggaggggatgaagggggtggaggtgcttcttggccctgactgagggcacgtaaatcattaagaccactttttagggccagttggcaaaatgccccaatgcaggagagtcctctcacagtgatggccccacagggagagcctcgctctgtgccaggagagccacgtcacatggagtctggcacaaagcggaatgaagcaagcctgcctcagtctgacagcggcacctgggccctccgccctgtcctctgctgcgacctcggagcagccgggcacgggggagaaggtgaggagcgacggctccctacggggtagaaaaccccaaagcgggcagcgctgaggctgactgggtccaaacaacatcagaggagggggcgtcgcaggacagggccaaggccacagccgctgcccagctcccctcacacactccctcattcacagacacacacgcgggcacacactcgcacatgcaaaaacacacaggttcacacacacagactcaacctctcatacacatttgcactcacacacaccaatcatgcactcacacaggctgacacgctcgggcacgctcataccaacacacacacagtctcaggaagccaggccctccatccaccccatcaccagcccagggtgtcgcaaacccacatctcctacaacagaccggccctccgcagccaaggtgccccggaccgggagcccccccgggggacagagctcagtgactttctctgccccgcaccctagatcatgagacctccatggccccagagcaagggcaaggagtcagctcactgccccactgtgtggcaggcgtcctcacgcacagaaaattccatcgcctcaaaggcctgagaggaagaccagatgagcacccacgtagaggagacagacggggcccgtggggaggggcagaggcccggattcacacccaggctcggaacagcgcccctgccttccacatggcctggcctcccgggagcaagaggatgccgtctcagggcctctccatccccctcttcattcccctattaacccacccgtgggtacaaccatggcccccaaaagatagagccacatcctagcccctggggccattgagtgcggcgttatttgtcaaaagggcctttgcagatcccatcaagataaggatttcgaggtgagggcaccctggattgtcaaggatttcgaggtgaaggaaccctggattgtcaaggatttcgaggtgaaggaaccctggattgtcaaggatttcgaggtgagggcgccctggattgtcaaggatttcgaggtgaaggaaccctggattgtcaaggatttcgaggtgagggcaccctggattgtcaaggatttcgaggtgaaggaaccctggattgtcaaggatttcgaggtgaaggaaccctggattgtcaaggatttcaaggtgagggcaccctggattgtcaaggatttcgaggtgagggaaacctggattgtcaaggatttcgaggtgagggaaccctggattgtcaaggatttcgagatgagggaaccctggattgtcaaggatttcgaggtgagggcaccctggattgtcaaggatttcgaggtgaaggaaccctggattgtcaaggatttcgaggtgagggcgccctggattgtcaaggatttcgaggtgaaggaaccctggattgtcaaggatttcgaggtgagggcaccctggattgtcaaggatttcgaggtgaaggaaccctggattgtcaaggatttcgaggtgaaggaaccctggattgtcaaggatttcgaggtgagggcaccctggattgtcaaggatttcgaggtgagggaaacctggattgtcaaggatttcgaggtgagggaaacctggattgtcaaggatttcgagatgagggaaccctggattgtcaaggatttcgaggtgagggcaccctggattgtcaaggatttcgaggtgagggcaccctggattgtcaaggatttcgaggtgagggaaccctggattgtcaaggatttcgaggtgaaggaaccctggattgtcaaggatttcgaggtgagggcaccctggattgtcaaggatttcgaggtgagggaaacctggattgtcaaggatttcgaggtgagggaaacctggattgtcaaggatttcgagatgagggaaccctggattgtcaaggatttcgaggtgagggcaccctggattgtcaaggatttcgaggtgagggcaccctggattgtcaaggatttcgaggtgagggaaccctggattgtcaaggatttcgaggtgagggaaccctggattgtcaaggatttcgaggtgagggcaccctggattgtcaaggatttcgaggtgagggcaccctggattgtcaaggatttcgaggtgagggaaccctggattgtcaaggatttcgaggtgagggcaccctggattgtcaaggatttcaaggtgagggcgccctggattgtcaaggatttcaaggtgaaggacaccctggattatcgagggggctaggtccaaggacaagtgtcctagctggagacagacgaggagacacagggatggggagaggcagaggcagacaggggtggtgctatggtctgagggtctgtgtctgcccgaaactcctgtgtgacagccgtcatcccagagtgagagcatgcagagctggggcctcagggaggtggttagggcctgagggggaaccctcaaaaatgtgattcggtccctaatctcactagagaccctaaagaaaagggaccccagagagcagccctgccctctttccaccacgtgaggacgcagtgaaaagatgggggtctgtgaaccaggaatcgacccttcctggaacttgaccctgctgccatcctgaccttgaacttccagcttcgagaaccgtgagaaatgaatgttgctgctgaacccaccagtctatggtatttttgttattgcagccagaaatgactaagatgcagcagccacgtccccctggcgagggccgggggcatcccaaggttcataacaaaagctccagagcttccctgaaccgccaggtgtgtcttcccaggaccctggggcagccccaggctacctccctcctcctctgaccccacctgccctgatccggcctcactgtcactccctggatttcacccgacagcctccgccggggtggcccggccccatggccagggcatcttccattcacgcccacgctttccaggactccgctgcagcagctcctctgtgaagcgcctctggcctcccattgccggtgccacccgagcccccagacatagctggcctcccccgactccagggccagcatcgctggcgggatctctccaacgcaacggccagctctctggtgacccacagtaggagtgccacctgggcagcgctggacagggtagagcaggcaccttggccaccctgacccgcagggctgcaggctaggagacggggtgcccccatgcccccaccctgggctgcagtctggggcccccagcggcccatggggcagaccgagggaggccaggccggagtggctccaacccagcagcgcaagactcactctccccagcctgatgcccgccctgtggccccaaggccccctcaacgggagtccactcacaggcacccttcccctgcgggtggtcggggaccctctctggccctgtgtctcccctttgccatctctgtctcggggtctctgagcctctaactgtgtctgttcctgtttccctgcatcgtggcccccaccccgccctgtggagccatgtggagccatgaggctccacggccggtggggtcacagagccctggccacacacacctggccccaccacagccagaccacaggccagacatgacgtggagccgcgcggccgtgtctgctggggcaggaagtgggcgagtgaccctgtctgtaggccagacgtacgggcatgcaggccctcccctccagcccctcagcatccagccacatctgtggacacagccagcgaggcagagcagggctctgctaaggacagacggccatcaaggcagggcctgggccgggccagggctccctccccacagcagccctcttggcaggcagccagacgcccgtgagggtggacctgccatgagggcctgcacgccggaggccgcccactcagcactgcgggccctccagcagcctgaccaggtgggtcttggaggtctccaggcctccgtctcctcctctgcacattgaggagtccagccaggctggtcctggccccttctggaagcaaaaggtggagaacaggcaccaagacaagagggaaggacaaaagaggtcaccacagggactccggaaccacagggcagggcttcctaaccaggcaggaaggatctgggcactgggggctgagccaggctggccaggcctaaccagggatgacccggcccttcctgggatacaaggtgaacaggtttcatggctgagctgaggcctaggctgagccgagccagagggcaaagaagatgacgtggagccagctgatacacgtccatgtgggctgccctgagctgccctgggctgggctgggctgagcaaggctaggctgaactgggctgagctgaactggtctgggctgagctgggctgagctaggctgggctgagctgggctgggctgagctagtctgggctgagctggactgggctgggctgagctggactgggctgggctgagctggactgggctgggctgagctgggctgagctaggctgggctgagctagtctgggctgagctggactgggctgggctgagctgggctgggctgggcttggacgagctgggctgggctgggttgagctgagctgagctgagctgggctgagctgggctgggctgggctgggctgggctgagctgggctgagctgggctgggctaagctggactgggctgggctgagctggactgggctgggctgagctagacttggctgagctgggctgggctgggctgggctgagctgggctaagctggactgggctgagctgtgctgggctgagctgggctaagctggactgggctgtgctgtgctgagctgggctgggctgagctgagctgggctgggctgagctgagctgggctggactgggctgggatgagctggactgggctgggatgagctgggctgggctgggctgagctgggctgagctgggctgggctgagctgagctgagctgggctgggctgggatgagctgggctgggctgggctgggctgggctgggctgggctgggttgggctgagctagactgggctgagctgagctgggctgagctggactgggccgggctgagctgggccgggccggattgggccgggccgggccggactgggccgggccgagccgggccgggccgggctgagcgggtctgagctgggctgagctgagctgggctgagctagaccaggctcgggtgagctaggccaggctgggctgggctgggctgggctgggctgagctgtgctgggctgggctgggctgggctgagctgtgctgggctgggctgggacaagctgggctgggctgggctgggacgagctgggctgggctgggctgggatgagctgggctgggctgagctgagctagggtgggctgagctgagctgggttgagctagaccaggctggggtgagctaggctgggctgggctgggccgggttgggctgggccgggctgggccgggatgggatgggctgggctgggctgggctgggctgggctgggacgggctgggctgggctgggctgggacgagctgggctggcctgggttgagctgagctgagctgagctgagctgggctggcctgagctgggctgggctaggctgggctgggctgggctgggcttggacgagctgggctgccctgggttgagctgagctgagctgagctgggctggggtgagctgggctgggctgggttgggctgagctagactgggctgggctgggctgggctgagctgggctaagctggactgggctgggctgggttgggctgaactgggctgggctgagttgggctgagctgggctgagctgagttgggctgagctgggctgagctgagttgggctgggctgagctgggctaagctggacctggctggggtgagctaggctgggctgcgctgagctgggctgggctgggctgggctgagctgggctgggctgagctgagctgggctgacctgggctgggctgacctgggctgggctaagctggactgatctgggctaggctgggctgggctgacctaagctgagccagactgggctgagctgggtgagcttaggtggattgagctggactgggctgagctgagctgggctgagctggactgggctaggctgagctgagcttggttgggttgacctgggctgagctgagctgaattgggttgacctgggctgagctgggttcggctgggctaggctgacctgggctgggctgagctgagctaggcttggatgagctgagctgggctgggttggactgcgctgggctgggttggactggtctgggctgacctgagctgtactgagctggtctgacctgtgctgagctgggctgggctaggctgagctgggctgacctgtgttgggctgggctgggctaagctgggctaggctgggctgagctggacggagctgacctgggtgagcttaagtggactgagctgagctggactgacctgggctaagctaagctgggctgacctgtgctgggctgggctggactaggctgggctgagctggactgagctgagctagactgagctgagctgggtgagcttaggtggactgagctgggctgggctgagctgagctggactgggctgggccgaactgagctagactgggctgagctgggctgagctggggtgggctgagctaggctgagctggggtgggctgagctgggctgagctaggctgagctgagctgggtttggttgacatggactgagctgtgttgagctgggctaggctaagctaggctgggcggagctgagctgggttgggctgagctgaactgggctggactgggctggactgggctgggctgggctgggctgggctgagctgagctgagctgtactgagctggcctgggccaggctgagctgggctgggctgagctgtactaagctggcctgggctgggctgagctgtactgagctggcctgggctgggttgacctgggctgagctggactaagctgggctgacctgggctgggatgggatgggctaggatgacttgggctggactgggcgggactgagctggactggcctgggctgagctgggctgggctggactgagctggactggcctgggctgggctgggcgggatgggctgaggtggctgctaatgtgggaaagaggccgtgggttgagtgtgattccacctgcagagccctgagcccagctgtgttcttaggggttctgagggccacgcagctctgttgcaccatgattctgtcttctctcttgcccactgcctgaaggaaatttggagtgggctgggcccagagctcccctgtatagcaggccctgtcctggagggcctggcagggacatggcttagcctgttggcctctagtcccgagacctcataggccacaggggtccactgtggcttgtttgggcctggggtggggctcatggagtggtgggtgttggactgagactctgaccagggacagggggatggggtcacagccaagccactccacccctaccccatgcacacagcactcagagcccagaccctctcctaagagcccccaccaaaatcctctctaggggcaggggatagagcaagacatgtcccccacccagagcaggggctgcggtcagggagctcaggggactcagccactccatggcagagccctgtttaatacaacttgtgtctgggatggcctgaatcagagaccctatctaaggagcatgttcagaaaccatgttgctgggatcagacagcagggtccaactgcaggcctgtggtgcaggagctgtgtgaccatggggctgtcaccaggcctctctgtgctgggttcctccagtatagaggagaggcagtatagaggagagggccgcgtcctcacagtgcattctgtgttccagcatccccgaccagccccaaggtcttcccgctgagcctctgcagcacccagccagatgggaacgtggtcatcgcctgcctggtccagggcttcttcccccaggagccactcagtgtgacctggagcgaaagcggacagggcgtgaccgccagaaacttcccacccagccaggatgcctccggggacctgtacaccacgagcagccagctgaccctgccggccacacagtgcctagccggcaagtccgtgacatgccacgtgaagcactacacgaatcccagccaggatgtgactgtgccctgcccaggtcagagggcaggctggggagtggggcggggccaccccgtcgtgccctgacactgcgcctgcacccgtgttccccacagggagccgccccttcactcacaccagagtggaccgcgggccgagccccaggaggtggtggtggacaggccaggaggggcgaggcgggggcatggggaagtatgtgctgaccagctcaggccatctctccactccagttccctcaactccacctaccccatctccctcaactccacctaccccatctccctcatgctgccacccccgactgtcactgcaccgaccggccctcgaggacctgctcttaggttcagaagcgaacctcacgtgcacactgaccggcctgagagatgcctcaggtgtcaccttcacctggacgccctcaagtgggaagagcgctgttcaaggaccacctgagcgtgacctctgtggctgctacagcgtgtccagtgtcctgccgggctgtgccgagccatggaaccatgggaagaccttcacttgcactgctgcctaccccgagtccaagaccccgctaaccgccaccctctcaaaatccggtgggtccagaccctgctcggggccctgctcagtgctctggtttgcaaagcatattcctggcctgcctcctccctcccaatcctgggctccagtgctcatgccaagtacagagggaaactgaggcaggctgaggggccaggacacagcccagggtgcccaccagagcagaggggctctctcatcccctgcccagccccctgacctggctctctaccctccaggaaacacattccggcccgaggtccacctgctgccgccgccgtcggaggagctggccctgaacgagctggtgacgctgacgtgcctggcacgcggcttcagccccaaggatgtgctggttcgctggctgcaggggtcacaggagctgccccgcgagaagtacctgacttgggcatcccggcaggagcccagccagggcaccaccaccttcgctgtgaccagcatactgcgcgtggcagccgaggactggaagaagggggacaccttctcctgcatggtgggccacgaggccctgccgctggccttcacacagaagaccatcgaccgcttggcgggtaaacccacccatgtcaatgtgtctgttgtcatggcggaggtggacggcacctgctactgagccgcccgcctgtccccacccctgaataaactccatgctcccccaagc

SEQ ID NO: 31 - DNA, 17253 bp, Homo sapiens
ttcactcctgaagccagcaaggccatgaacccaccaggaggaacaaacaactctggacgtgccatgtttaagagctgtaacactcactgtgaaggtctgcagcttcactcctgaagtcagtgagaccatgaagccactgggaggaatgaacaactctggacatgtcacctttaagagctctgacactcactgcgaaggtctgcagcttctggacacaatactattcattctcaccttaaagacgaggaaactaaggcaaagaacagtcaactaataagtccaagtatacagagctgctaaggaatagtctgtctgatcccaaaggctgtgtcataaccgcttccctatactgcctctcagcagaggtaagagtcaagttttatttatcactgccaccccatcagccccagcttagtgcctgacacagggagatgctcaatcaatgctgattgttattgagtggactagaaatgcaaggcacagtgagcccctttgctgtgactgatggggtgtctgattttctgctataaagaggagagtgctgtatcaaacacactcctctggctcctagctctctctgttccactttgtttatccaatttccctactcctccttcgtaactgcaccatgtggattcaaaattgcagcttagtgcagacaaagggaaaacggaattctgaatgaccccaaagggaaaactgaactctgaatgacccctgtgggtttgagagaagagaagcaggaacttgagagaggaggaagagagaaagtaattaaaatgtatcgttttaacttaatatttaaccgaatgatagcaaaatcttatctgaaattggaaaagtcaaggttttgagtgctggttcggtgcccatttctttatgatttgatagtctgagaagaatacgacgggtgtggcttaaaaacctagatcacgtgtgtagttggaattgggtgttatatgagcaaacaaaataaatacctgtgcaacatacctgctttatgcactcaagcagagaagaaatccacaagtactcaccagcctcctggtctgcagagaagacagaatcaatatgagcacagcaggaaaagtaagcaaaaaatatattactgttgataatatattctcttcaatataacaaataaaggaatacagtattaataatgaataatttaaaatttaaaattcatatctaaattagatgatgaataatttaaaattcatatctaaattagaaatgatacactggaatatgatatgcaatatatgctataatatgtaatgtatactgaactacagtggaaataagctattcctaaataccttcaaaaagaatatatagaatctgtatctattgtctttatttcctacattaaataaatttgccgtaaagtgatagtttattccaagctaatcatgactgatttgtaaacctaaagttagaaaagtctttaatcagaagctatctttatattaagaaagcataatttaaatgtgttattatttgtattcatattttttgtgaacacaagaagtctgacaaaacttttatgagagggatttgagaagattttgaaatatacttttaatcttactataaaatatcttacaaaatactcattgatctcacagcattagaatcatcaaggttaagcaagacatcacattcaaattccgtttaaagggggcccattatgacacaattcaggcaatttccacagaaatcttatggaacagtatctcccctatataaaagtcaatatgatcttacagaaaaataataatgcaatttgaatcacttattagcactcagaacacaaatatttgttttttcttctataaatttatacttatttttcaatgtgtttacaggtgcacagaaatgcatgtggtcattcaatataatcaattgatattattaattgcctaatttaaaaaaatctgtgcaactatttccagccatttgttgtgctaggagtgtatcacacaataaaacacctcactatgataattcagtttaaaggttctgaggcttacctttatgctgtgcgacaaaacaggctcatgtcaataagactggttggaaatcacatgagtggcccattggtactgttcttacaccacttcactttactttactttcattcattattgattaatatttacattcctcatagaaaataattagaaaaaagaaaatttaaatttaccatttactaaactcgacttaaaagaaataatgagttcatagagcaaaagtataaaccaatcattaatgaaaataataactgatgaaatagataatcctcccctcttgagtgcaacatcaataacttagctttttgacagcatttcatttatgtttacccgtcctgcattttattttcctcaatcctaaattgtgacaatactaatgtctatttcataaggtagttgtgagaattcagtaaattaatagtgaaaagcacttagaatagtacctggtaaataaaaataagtcaataaatattagccactgttattattgttgctttataactttttgatatttactaccacggagtacagaaaacgtgaggctacattaattttttcattcgtttttttgtttggagatggagtatctttctattgcccaggttggagtgcaatggtgatctcggctcactgcaacctctgcctcccgggttcaagtgattctcctgcctcagcctcacaagtagctgagtttacaggtacacgccaccatgcttggctaattttagcatttttagtagagacagggtttcaccatgttggtcaggctggtctccaactcttgacttcaggtgatccgcccacctcggcctcccaaagtgctgggattaaagggatgggcaactgcacccggcctgatctttattctctggacagccagctttgagacttcaggaaaattattcaatcactgagtcagttgatcctcaattatttcagatgtagtaagaccaataattcaatagtactgtcctggtagcatccgttttaggtttaaaagtaattcatattgtttacagcagcacaatttgcaattgcaaaaatatggaaacttcctaaatgcccatcaaccaacgagtggataaagagaatgtggtatatgtacaccatgagatactactcagccataaaatggaacaaaataatggcctttgcagccacttggatgaagctgaaggccattattttaagtgaagtaactcaggaatggaaaaccaaataccatatggtctcacttataagtgggagctaagctatgaggatacaaaggcataagaatgatatagaggactttggttagggataaaagactacacgttggatacagtgtacactgctcgggtgacacatgcagcaaatctcaaaaaccaccactaaagaacttatccatgtaatcaaaaacaacctgcaccccaaaaactattgaaattaaaaataaataaattttaaaaataaaaataatgcatgtaactcactcagcacaagccacagtgcacctgtcacatcataggcacctgacaatcagaaactcctactattagaactttatttccaagtattctgatatttattttggcatggaccacattgaaaatcctgcaaagttgaaggatttgacaaatgaataatgaaaattaattggcagaagatgaaatttcaattgaatttttattatatttgcaattatgttgattctgtaaagaaagagctcagtgaattgtacatgctttaccacaataaagatgggttttacagtacactgccaagcactggaaatatgtgatcagcttttatttttaaggacatctgtggataagcttgctagctagaaactcaaatacacagtttctccagtttttaaatacatgtgtgtggtctgaatgcacacacacacacacacacacagaaacacacatacacaacaccaactctaacctctgtaattttgggctcaaatctaagctggaaggagtctctgcacataaattagatgaacaaaacaggctgccaaagctaagtttcaaatgggtgtttgagacaagtaacacagaagtggagagagaaaattaaaagaggacaataggcaaatagagaaagagacatcatcctaagcaggaaggtaaatgtataactgtttttatggagtcagatccttttggcctaagcagaaaattgagcaagaaagcagtgtattttggacagacactgactctgtcagcaaagtaaaggtgacttagaacatgtaccagccaatagttgtgggtaaacagttgtcttcaggacagtgttagaaaatatcaggattaaacatctttggagaaaaaaaaatcaaaagaataaatggtgctgggaaaactggctagccatatgtagaaagctgaaactggatcccttccttacaccttatacaaaaattaattcaagatggattaaagacttaaacgttagacctaaaaccataaaaaccctagaagaaaacctaggcattaccattcaggacataggcatgggcaaggacttcatgtctaaaacaccaaaagcaatggcaacaaaagccaaaattgacaaatgggatctaattaaactcaagagcttctgcacagcaaaagaaactaccatcagagtgaaaaggcaacctacaaaatgggagaaaattttcgcaacctactcatctgacaaagggctaatatccagaatctacaatgaactcaaacaaatttacaagaaaaaaacaaacaaccccatcaaaaagtgggcgaaggacatgaacagacacttctcaaaagaagacatttatgcagccaaaaaacacatgaaaaaatgttcatcatcactggccatcagagaaatgcaaatcaaaatcacaatgagataccatctcacaccagttagaatggcagtcattaaaaagtcaggaaacaacaggtgctggagaggatgtggagaaataggaacgcttttacactgttggtgggactgtaaactagttcaaccattgtggaagtcagtgtggcgattcctcagggatctagaactggaaataccatttgacccagccatcccattactgggtatatacccaaaggactataaatcatgctgctataaagacacatgcacacgtatgtttattgccgcattattcacaatagcaaagacttggaaccaacccaaatgtccaacaatgatagactggattaagaaaatgtggcacatatacaccatggaatactatgcagccataaaaaatgatgagttcatgtcctttgtagggacatggatgaagctggaaatcatcattctcagtaaactatcgcaagaacaaaaaaccaaacaccgcatattctcactcataggtggaaattgaacaatgagatcacatggacacaggaaggggaatatcacactctggggactattgtggggtggggggaggggggagggatagcattgggagatatacctaatgctagatgacgagttagtgggtgcagcgcaccagcatggcacatatatacatatgtaactaacctgcacaatgtgcacatgtaccctaaaacttaaagtataattaaaaaaacattcaaaaaaaataaaataaaataaaaaagaataacctaaatgaatatattccattttatctaagtgccttattgtacttaactctgtttatctttccttatgttattgcttttttaaaagatactcttattctctttataaaccagaggacttcatttctatgcaacacttgttaggtgccagacatgggactcaatgttgcatgtacaaagatgaaaagacacaatttctgactgcaagcgtgggaaaacactggtaccatctctctgtctgatgttctaggtaatcaaatgcaaagcagctgtgctatgggagttaaagaaacccttttccattgaggaggtagaggttgcacctcctaaggctcatgaagttcgcattaaggtgaaatactttttccatttgtatttaattttaagtttaaagaattcagaaaatattaaaaatagaaacatccaaaatccactagaggtattttttatataattatccagaaaataaaattacatttgttgtcaaggaaagtataaattgttaaatttttttaaagtgggcaaacagtatatgaaggataactccagtgaaatacaaaagaatttataggtttgtacagaaaaaaatgcaaagggatatatatcaagagttcacaatcaatttgcattagatattttcttggtgttaatttgcaatttctacttctttttcttttaactatgcattcttctatattatacaagacaaaaattttaggatcaattatctcacagattattctaaattgttaaattcaagggaaaaagaggaaggttttagactggataaccttggagataaactgaatctttcatatttgggaatagtagggattatcagcaaaacccttgagaatatttttgaataacaattttagaaaattgggtttgttaagtccatctgacagtcataatcttttctgaatctaaacatcttctctttattctgtagatggtggctgcaggaatctgtcgttcagatgagcatgtggttagtggcaacctggtgaccccccttcctgtgattttaggccatgaggcagccggcatcgtggaaagtgtttgagaaggggtgactacagtcaaaccaggtacaggattcacactcagggaacatgccttggttcaccatcacaagattagtcagcctggatgaggaaaccgaggcaatgaaagacgaaaggacttgcacaaggtcacagggaagctgggacttcaggggtttcctccttccctctctgcttgcctgactcaagcatgtatgacttcaggcaggcatgcgtgtattctacccttcaaccattatgtactactagatgccaggcactaggttagagcctggagatatatgaggatcaaaagagacacagtgcctaccagtgtggaattcataatctagtaacttccacgttagtgttagctgaacactgtcttctgtaagtgcccaaaaaactataaatgggaggggagaaaaaaaaacataagtatggacactgttctgtgctgagttcacaaaatggaggctgcatggttatggctgaagaaacatgacctttccttaggtgacctatgcagctcctttaccgatttcctcttccaacatggtctctcttcctgagcatggaatcaatgaaactgactaggtgaaagaaaatgaaagaaacatagcaggagccatccaccatcaacaatgtctgccttattacctttggccatgcttaaatgtgactgattatggattactaattattttatcttcaatatttattttacctaatcttattatgtattaatataaatattactatattaattaaggatgaataactaggacatttccataccatcgttttcatatgaactttacccataaaatgttatgcaccaatcatttttcttggtcttgtgaaatagatagcataggtgattaaaaataaaatttgtctttaaagaatcactttagccaatggattcgacctgtccacttaccaagtactaatttagactgtgaaaagaaaataataaaataaactgtccaatttgagttttagctctatttcctttactcagaaaaaaattaatatcaaaacgactgccttatttctcacccctcctccttccaccataacagtaaaaatagataattcacaaattaccagctaaaaacacttgaaagtcaattcttatcctaaaagaaagtgtctaacttgttgtggaaggtagaaattttcagacgaatttctgtaattcttctttgtcctatttttgttagttttcctcaaaaaagaactaagatctttttgaaaacattcattttataattaagataaacctagtctctttgaaaagccaagacctatgttaaaaatctcatttttgttgtaaatcaaattcttacaaaataccagatcttcccaacatctactaggactaaaataggctactttcaactaaaatttatatgtatacttacagcaaaaatatttagttaagatttaattagacaaggattacataaattatatctgcaaagcctccaggataaattagtgcactgcgtaaaattttattaacacagttgatggaatttttttaatccatcttgtttcccacacttgtattttctctttaggattcttcaggcacttataaacccaaactaaaaaacaatgccttggcaggcaatgacaaatgacatagttgtgactagaccctatttcttagaaacttttcagacacataattctaatctatacatgtgagcgttaagtttttgctctattaattcctgcatagaaatttaagaagaatttgttttattcctctgcaggtgataaagtcatcccgctctttactcctcagtgtggaaaatgcagaatttgtaaaaacccagaaagcaactactgcttgaaaaatgagtaagtttctgatgctttctttgcacagactttgagtttgcacattagttatggtcctgtctcatgcctttgtgtgtctttgtattgcactgcccagtctaggcaatcctcgggggaccctgcaggatggcaccaggaggttcacctgcagcgggaagcccatccaccacttcgtcggcgtcagcaccttctcccagtacacagtggtggatgagaatgcagtggccaaaattgatgcagcctcgcccctggagaaagtctgcctcattggctgtggattttcgactggttatgggtctgcagtcaaagttgccaaggtagaaatgacaatggatgataaaaccggttacacgcagactgtcaggaaccaaaagggaagcaatttcttgcaagaatcagaaattatttttgtagatttgaagtgtcgattaagagtagaaaaatgacccagaaagaactgagagcacaggctagaaatttcaccaatttattgcagataaaaacttgttaagaaaatgtaaagatgtcattttcaataatttttcttctgaatttgctgtttatgggatcatgaaattttagatctgtgaactaattcatgttgtaattcaatcaacaattagagagcacctatacatacctcaggcaccataggttctgctaggctctgacagcaaaagtaaatgaaatgaagcgtttgcccttgaggaccatctagtctgtggatcctctcctcccagaattaggatcaacagtagagtccaaaaccttacctgatgcacctcgaaaccaaggctcacccactctgtggattcttagacggaaagtaataaagactcagtgatgcataattcactcattatgacatttcactgctaaaactaactcccctggcatgaacacacatatgtattcagaagtggtaaatttcaagcagaaattctttaaaggctcctcatctgagtagactgaaaatctagtagtatgttttattttatgaaacctagatcgagagatataaagatatttgcccaaaatctgacttctgcttaatatgagcactaagactaaaatatcttttacaaatctcctgctgaatgtcaaatcacaatccataattattagcacttttaaaccacagtcacaaacaagccttgtatttttctaagtaaggtagaaagtggtgttgtcccccatagtattgaataacacttggtgaatgaatgagtgaaatagacacccttaagggaatataagaatgagattatttggaacaggaacagcatgttacccaaaacgaaggctgactatgggagactaggtttagtaaataaccgctagccaatttacacaatttagaggacatcttttccaaatttcggtgactttagcacttactcccttgttcaattgcctcatctattttaatgggtagtctaagtgagcctacccaagaacagaagctgaggatactcataacaacagattttatttattattaaaatatagactaatgtttcattgctgtgttgttcacaagtgtattttttaaaggagggatatactggtcacgactactgaacaaaaatgaagaaaggagttaattattgagagttaaagtggaatatttttcagtctcctggagtagccttttccacttattttattttccgaatattgccttggtgtatgtatgagatactgaagctggctatcaagggatttcagcaattgagagtccctacaagattgtaatcactgtcatctggatctcaaagatcatccagtcccctggttcccagcctgacccattggagtcccttgaggacttagttccacctgcagagattctcatttaattggcatgggctatgacctggactgtgggatgtttttaaagctccccagatgaatctaatatgcagcagtttcagaactactcaactaattcaaccccttgaatttaaacatgaagcatttcaagccaaaacaggtttcgataacagattggacagaagagtctgagtagttcttgataacacacaagacatggcactttataaagcttaagcaatttctaacaaacattatttaattcatttttgcattttctgaaaacataggtcaccccagggtctacctgtgctgtgtttggcctgggaggggtcggcctatctgttgttatgggctgtaaagcagctggagcagccagaatcattgctgtggacatcaacaaggacaaatttgcaaaggctaaagagttgggtgccactgaatgcatcaaccctcaagactacaagaaacccattcaggaagtgctaaaggaaatgactgatggaggtgtggatttttcgtttgaagtcatcggtcggcttgacaccatggtatgatccgtgacatgccctgaaatttctgcctctgcaacctggaggatgcatttaggcagtagaatatacgtattatgtataaaggatatttttaatgatgaatggaaatttcccgtcatctttttgttacctggcttgtttaatttattgttatgagaagtcttccattcaatcagctaagcaaacctgtctcaagtcatatttcctcgagaaaagaaaaagggcttgttttttttaacacagccactacaaatatgctttattaatttttagtttaaaatgcaaacttaaatatatataaataatacaaatcattttctcaaattaaaaagttttatttttcttttacattcttaacaaaaatattttaacaattttatgtatgctcttaacgaattccaaactttttgacatagtattcttcggtcaaaagaaatgagcaattttagaccaactattattttattaacagaaaatatgccctaaggaaagtgactgctttaatacattgctatattttatcacagcaactggacagtgcctgacacaaaactagtacccagtattacttggactgaatgctttaaataaagtcaacagattttaccacccgcaaaagttaagagctacatatctcatggcattgtttatgaaacgcatgagacaatgcatgtaaaatactttgtgcaacacaactcatcatgtggttagcttccaataaatgtcagcagcccccttttttattttattttatttatttatttattttttttttttttttgagacagggtctcactctgtcaccaggctggagtgcagtgatatgattatggctcactgcagccttaacctcctgggcttaagtgagtttcctacctcagcctccgaaagtgctgagtacagacatgagcaaccatgctgagcctcagttggcattattgatatgaaatactatttccaatcttgcagtgcttatgtcatctttgaattattacatgatattactttcaaacagttacaaatatcaaaggcaacggaaacatatctctagctatattttacctatccagaattatctagactcctactgaaaaagtctccagaaacaaaaaagtttccattgctgaggttttctagaaggtccagcagtgtgggtaacagggagcagcaccctgagatcaaagttcccagcagccttgacctgggacaaatgccacagaggaataaagtatcaagagaatccaattttttccagggctatagcttttctccttatgctctttttctatatcttcctccattttctcatgtggaactggagtgtacattatctcaagacaccaaatgtctgacagccacatgttctgaggatgtcagtctcccaaagatcagaatccaaaatcaaagaactaatcattatatacctagagggatcctaaaccattttctaactacagaacatgttccaaaagctgactggaaaagattttctgaactgtcttttgaggttcccaaataatcagtgtaatttaatgtaaaaccaatatacatttggggaggtaaaaacaatgtttaaaacatgtccacttgagaaatggacataggaatctgttaaaaagggaggctatcaagtggacaagagactaattttggtgatatactcatttatcttgttcatcatcaaaatatctgattcaaagtattgggttcaaaatacctatgtaataaatcaatgaaaaaggaaccaactcacacattgcctaagaatgatgtacacttgtacaaggaacaggactttatatatgtttgtaatgatgtttgcctctttattcctttattaggaagaactaagggcacacaaatttattcgtccatgctttcattcaaaaaccattttctgggcatttgctacatccacagcattatcctatgcaaagaaagggggaatgaaggagcaaaagacatgatctcttccctctacacactcacaatccagctaagcctattacatgatattgtgcattatgagtatgaactatgccactccacgttaaggatactaaatgttcactttattccagatggcttccctgttatgttgtcatgaggcatgtggcacaagtgtcattgtaggggtacctcctgattcccagaacctctcaataaaccctatgctgctactgactggacgcacgtggaaaggagctatttttggaggtatgtagttaggcttcagagccaaattctcattaacctaagaatttctctccttttatgagtgacaaggcaagtttttgaaaagcaatgaaattaaaaataaattaaaatttcttttctatagtctccaataatgcagaacttttcttttttattttttggagatgaagtcttgctctgtcacacaaggtagagtgcagtggcgcaatcttgactcactgcaacctccacctcacaggttcaagtgattctcctatctcaacctccagagtagctgggattacaggcatgcaccactgtgcccagctaatttttttgggtagagatgagggttcactatgttggccaaggtggtctcgaactcctgacctcaaatgatctgcctgcctcggcctcccaacgtgctcgtgctgggattacaggcatgagccatcatgcccagccccaagatagacttttctgatgtcactattaaccaggactttcatctccacctctttttgtacttgtgactgcgtaaggcaaggaaatttctagtaggccatggaaatatataacaataaatcatatctacacaaaaatctagacaactaataaatttgctccttaactttgggcataacatctgtactataatttctctgtgagagagagaataactaaggacccttgtttatctgtgattttttttgtgaaagcactgtaaaagcatattgaagtactctatctcttattatcctcagttatagcagtctggaatgcagcactttttctaaactttcatttatttggaaaatcttctcttcaattctcctacttaccctggttgaatctatcaatgatattttcttcttttcaggctttaagagtaaagaatctgtccccaaacttgtggctgactttatggctaagaagttttcactggatgcattaataacaaatattttaccttttgaaaaaataaatgaaggatttgacctgcttcgctctggaaagaggtagattttaagttgtttttttgttttgctttgtattctacagtagcggcggggggggggggggcgttgtctagcagagaatgaaaaggtggaaggatgagaaaaaattacagtgccttggttttccattgccagttcaatctttgcatggagcacatgtaaggtaatactgtgagaagctaaaaacagttgctttgcatttcctattctgctgaaggcaaattatgttgattatagcataactgaatgatcagagtcattcagccttctttaaaagagaacactcactttggcccccatccccctccaaaaaaagtttaagcaaccagaattataacatggaatcactgacacctctgcctgtcatataagtaagtgtgacatctaatgattgtatattaaaattattttcaggacatcctcagcatattcattatgggagtaggtggaactacattgagattgatttctaagtagatattactagattttcctttttcttttcttttctttgcagtttagaaaaaaaaatttactaagaaaagttgttgtaaaagagaagggtactaaaccctattttaaatatttgtcttacattttctccaagtcttagaaaaataagccaattctatttcctacctctaacacttacacttacaatcacctaatataatgaactttgtcacttgcatttatatgagacataactggaaataggcagttatatctaatctctgccttctagctccagagtctgagatttttctgctatcccacacttattttcatgaggttttcaacttcaaatagtgtttctttgaaactcacaaaactatcatactagatactttatccgacaaatattcttgaggaaggaaagacactagcacccacagagcaccagctgttctactaagtgtcttacatgcattttctcatgtgattcccaaacaacgctcagtgtcagtctcaatctcattatcttagagaagagaaaactaagaagcagagaaggcatgacttggtcaaaatcatcaggtggtaggaaggagagccagaattcgaaggaagatcttgttattagcaaatctattcactttctattaaaccacaccacccctcaagagtgtgtatatatatatatatatatatatatatatatatatatatatatatatatagaaaacagtattcatcaaaggttaattatcattgtcattattattatcattgacatcatcatagaattgataagatgatggcaaatagagatgaccaaaaccagaagacactattgagcaacaaaagaaggcatggagcatgcctaaattcactttacaagaatgtcatatagtaatacgcatatgtaaataaaatcttatcaataagcaaagaataaaaattgtgatatcaatattggtaagagtaaggtgacttggatgctttcatatactttcatagtaattgatacatccttttgggaaagcaatttggtaatttgtatcagaaacctccaaaaaaaacctagatcctttgttccagcaataccatttctagaaatctattctatagaaataatcaactcaaacatacatatatgtttaagcatgtttatttactatcagtaatatcaatatttagaaacattagaaaagtccaacattaagaatatgatttaataaattctaagcaactgttagaaatgaaaaagacttcattggcaaattcttaaaatgtaattttaaactcataaaataaatcatataaattgtatttataagatgatcccaaattttcaaaaaggacaatagaaagtgtatctgtatctagaaaaagctgatagaattcaagaaaacattgaccatgattactccgaggtcgtaagattacagattttttttagcggcttcttctgtcctgtattctctaaattatgtgcatatatttttcttatctgtgtatatatatacacacaccacacacacactatatataaaattctcagtcgcaaatatcttcttttcttaaaagtgttcatcaaaagttggtttatagaaaaggcattaattctagtgtaaatgttacatttctaatcttcacaagaatgaagtagcttagaattaatacaaatcagctttattctctacttctaagaatccttaaacatctctgtatcaaaggtctattaaacctccagcatggtcctaactttattaaattatcagttctttcaggcaaggtatctatcattatataatttgtgcaaatttgtatttgggtttgaatcccaacaccctatactagatgtgcgaccagagcaaattacaaatctttctaagtctcagtttttataatctctaaatggaaataatatggaaaccaacttcctatcgtcattgtttaggttgagatttaagtgaaaaaaatgcatgaagcatgtgacaaatagcaaaaacttattgcatgttattatctattgttattttatattccttattataccaggaacttgggcacgccaaaatgattttttgaagatgctaatgtagatctgaagtctaaatgacaggcatactcaggaggttttgagtgagcttaagattgaagaaaacacaagagaaaaccaaaaaacatgaacttcccttcacttgacttgacccaaatgcatagggatgggaagggagtggctgagaacacagagagattttcactaagtcacctcaaatactccttggactatcacatggaagcatgtgggttgtctaaatgttaacacaatgtctcttctttcctattgcagtatccgtaccgtcctgacgttttgaaacaatacagatgccttcccttgtagcagttttcagcctcctctaccctacatgatctggagcaacagctaggaaatatcattaattctgctcttcagagatgttaaaaataaattacacgtgggagctttccaaagaaatggaaattgatgggaaattatttgtcaagcaaatgtttaaaatccaaatgagaactaaataaagtgttgaacatcaactggggaattgaagccaataaaccttccttcttaaccattc

SEQ ID NO: 32 - DNA, 16030 bp, Homo sapiens
ccttcattctgaatagcaactctgtctctgttcccaaagcattaactgacccctgtgatagggcacttcccagccaggctgatatgtagacttggtttcctgcgtgtcttttcactataaactgtgagctttctttcatgaataataattgtagctaacatttaggagggtgctcctatctgcaaaactccatgatgagtgctttacaaggattatttcatttattcacaaacagtcctttaaaatgacgccattattcatcttcatctcacagataaggaaattaaggcaaaaaaaattcagtgaaataataagtccaagtacacagaacaagtaaggaactgggttggcctggtcccacaagccatgccatcaccgctgccccatactgcctcttggcacaggcagaggtcatgtcttattcatcactgctactccactggacccagcttagtgcctgacacagggaggtgttcagtccatacatactagttttgagtggagcagaattgccaggcacagtgatcccctttgctgtgactaattgggtgtctgattctctgctgtaaagacaaagaggctgctctctctatcctacttcgtttttcctgttttcttactcttcttccttcctcgccaccccatgtgcattcaaagttgcagcttagtgcagacaaagggaatacaaggcagaacgacctatgtgggattgaaagaagagaaacaaggaattccagaggccgggggggggtgggaagtgaggaaaagagaaagtgattacaatttatcactttaacttaatatttaaactaatgaaaacaaaatcttatctagaatttggaagtcaatattttgattgctggttcagtacccttttatctgttttgacagtctgggaataatccagtgggtgtggcttaaagacatagatcacgtgtggaattggaattggatgttacacaagcaaacaaaataaatatctgtgcaatatatctgctttatgcactcaagcagagaagaaatccacaaagactcacagtctgctggtgggcagagaagacagaaacgacatgagcacagcaggaaaagtaagcaaaaaatatattactgttggtaatatattctcatcaatataacaaagaaaggaatacagtatttgatgaataatttaaaattcatatctaaattagaaatgatatgctgaaatatgatatgcaatatacacctcaatatgtaatgtatactgaactgcagtggaaataagctattcttaagtacctttaacaggaatgtatagaacctgtgtctattagtctttatttcctacattaaataaatttacagtaaaatgatagtttattccaagctaatcatgactgatttgtaaatctaaagttagaaaagtctttaatggcaagttatctttataataagaaaccataattcaaatgtgttattatttttattcaaattttttatgaacacaggaaagttgtctgacagaagtttgatgagaggaatttgactcagaagactgaaatatcctttaaccttactataaaatatcttacaaaatactcattgatttcacagcattagaatcatcaaggttaagcaagacatcaacatgcaaattctgattaaaaggggtccattatgatacaattcagggaatttccacaaaaatcctatggaacagtatcttccccatttaaaagttaatatggttttacagaaaatcaatgatacaatttgaataataatacaatttgaatcacttagcactaggaatacagatatttggttttttcttctataaatttgtacttatttgctcaatgtgtttacaggtgcatgtggtcattcaatataatcaattgatttttttaattgtttaattacataaacctgtgcaactatgtccagtcctttttttgtgttaggagtgtaccacactgtaaaatatctcactatgataattcaatttaaaggttctgaggcttctctctgcattgtgtgacaaacaggctcatatcaataagactggttgatggagctagaggacgttattctaagtaaagtaactcatgaatggaacaccaaatatccaatgttctcacttaaaagtggtagctaaactatgaggacacaaaggatgagaatgatataatggactttggggactgagggaaaagggcagtaggaggaataagacataaaagactacatattgggttcagtctacactgcttgtgtgaggggtgcaccaaaatatcagaaatcaccactaaagaacttatccgtgtaaccaaaaaccatctgcaccccaaaaactattgaaattaaaaattaatcaatgaataaattttaagataaaaataatgcatgtaatttacccagcacaggtcacaatgtgcctgtcacatcataagcacctcataataagaatcttcctactattagtaccttctgtctaagtattctggtatttattttggcattgaccatgttgaacatcctacaaagttgaaaattttgacaaataaataatgaaaatgaattggcagaaaaataaatctcaattgaatttttaaattatatttgcaattatgttggttctttctagaaagggctctgcgaattatacatgctttaccacaacgaagatgggttttacagtacactgccaagcactagaaatatatgctgaactttatttttaagaacatctatggataagctctgctaaacagaaatccaagcacactgtttctccagttttaaaatatacatgcgtgggtctgagtgtatacacacacacacacgtgcacacacacacaccaccaactctaatctctataatatttggctcaaatctaagctgaaagaagtctctacacataaattagattacaaaacaggctgccaaagctaagtttcaaatgagtaggaaacaagtagcacacagaagtagtggagagagaaaattaaaagaggacaataagcaaatagggagagaaagaaatgtcattgtgcgcaggaaggtaaatgtataattgctcttatagagtcagatccttttggcctaagcagaaaattgagcaataaagcagtgtattttatgtagacagacactgactctgtcagcaaaataaaggtgacttctaacttcatatatcagctaatagttgtgggtagacgagcattttcaggacggcattaggaaataccaggaataaacaccttcagagaaaaaacaacaacataagaatggcctaaataaatatattccatttttctcaatgtcttattatactttgtttatctttccttatgttattgctttttaaaagatacttttattctctttataaaccagagtacttcatttccatggagcacttgttaggtaccagacatgggacgcaatattacatgtacaaagatgaaaagacacaacttatgacttcaagagtgggaaaacactgtcaccatctctctgtttgattttctaggtaatcaaatgcaaagcagctgtgctatgggaggtaaagaaacccttttccattgaggatgtggaggttgcacctcctaaggcttatgaagttcgcattaaggtgaaatatttttccatttatatttcattttacatttaaaaaactcagagaacattaaaaatggaaacatccaaaaatccactaagaggcatatcttatatgatcacccagaagataaaattacatttgttgtcaaggaaaggtataaatataaattttaaatttttaaaaaatgatcaaagagtacatacagtataattccagtaaaatacaaaagaatttatgtttgtacagaaaaaaattccaaaggatatatatcaagacttcaaaatcaattaatattagatattttccatgtgttactttgctatttctacttctattttttaaagcgtgcattcttacataagacttaaatatttcagaatcaattatttcacagattattctaaattgtttaattcaagaagggaaggtagagaagggctttagactgaataaccttggggataaactgaatctttcatatttaggaatagtagggattagtagcaaaaccctcaaatacattttagaaacacaatttcaggaatttgggtatgttaaattcatctagttacaatcttttctgaatctgaacagcttctctttattctgtagatggtggctgtaggaatctgtcacacagatgaccacgtggttagtggcaacctggtgaccccccttcctgtgattttaggccatgaggcagccggcatcgtggagagtgttggagaaggggtgactacagtcaaaccaggtacaggattcacactcagggaacacgtgtggttcaccatccaggatttcccagcctggataaggaaaccaaggcaatgagagacgaaagtgcttgcacaaggtcaccgcgcagccaggacttcaggagtttcctctttccctctctgcctgcctgacccaagcatgtatgcattcaggcactcatgtattgtacccttcaaccattatgtaccgagtatctactagaagccaggcaccaggttagagcctggagatatgtgaggatcaaaagagacacagtgcctaccagtgtggcattcatagtccagtaattctgtgttagtgttggctgaacactgtcttctgtcagggcccagatagaagtagaaacgggaggagggaaaaaaagtaaatgtggaaactgttctgtgctgagttcacaaaatggaggctacatggctacggatgaataaacatgaccttttcttaggtgacctatgcagctccttcaccaatttcctcttccaacatggtgtctcttcctgagcatggaatcaatgaaacaggctaggtgaaaggaaatgaaagaaacgtagaaggaaccatcccaccatcaacaatgtctgccttgttaccttcagccatgcttaaatgcaactggttacagattactaattatttcatcttcaatatttattttaccctaaacttatgtattaatgtaaatacttttagaagtaaagggttaataactaggacattgccataccatcattttcacataaactttacctataaaatgttaatgcaccaacaatttttcttgatcatgtggaatgtatagcataggtgattagaaataaaaattatgtttaattttaaaaagttgctttagcctgtagattcaccctgcccccttaccaaataccaatttaaactgtgaacagaaaataataaaataaactatccaaagtatgttttagctctattttctttagttagaaataaattaacaacaaaatgacagccttactttttacccctactccctccaccataacaggaaaagtagataattcgcaaattatcagctaaaaatatttgttaagtccattcttatcctaaaagaaagtgcctaacttgttgtgaagagctgaagttttcagagaaatttctggaattcttctttgtcccatttttgtttttctcaaaaaaaaaagacctaggattttttaaagcattcatttcataaaaaaagataagcatagtcactttgaaaagtcaagaattggttaaaaattctcatatttattgtaaatcaatcttttacaaaataccagatcatcccaatatctacaggcactataatagatcactttcaactaaaatttatatttatacttatagtaagaatatttaagatttaattagttaaagtttaaataaaaagatgtttgcaaagcctccaggagaaatcagtacactgtgtaaaagttaactattagtacagtggaagtaatttttttaatctgtgtggtctcccacatttgcgatttctcagtaggaatcctcaggcacttataaactcaaactgaaaacaatgctgtggcaggcattgaaagatgacatagttattattgaactctattccttaaagacttttaaagaaacatgcttctaatcaatacatgtgagctttaagtctttgctctattaattactgcatagaaatttaagaagaacttgttttattcctctccaggtgataaagtcatcccgctctttactcctcagtgtggaaaatgcagagtttgtaaaaacccggagagcaactactgcttgaaaaatgagtaggtttctgatgctctctttgcacagactttgagtttgcacattacttatgctcctgtctcatgcctttgtgtgtctgtgtattgcactgcccagtctaggcaatcctcgggggaccctgcaggatggcaccaggaggttcacctgcagggggaagcccattcaccacttccttggcaccagcaccttctcccagtacacggtggtggatgagaatgcagtggccaaaattgatgcagcctcgcccctggagaaagtctgcctcattggctgtggattctcgactggttatgggtctgcagttaacgttgccaaggtgagaatgacaatgggtgataaaactgcttacatgcagactgtcggaaaccaaaagggaagcaatttcttgcaagaatcagaaattatttttgtagatttaaagtgtcgattatgagtagaaaaatggcccagaaagaattgagtacacatgctagaaatttcaccaatttattgcagataaaaagttgttacgaataaagatgtcatttacaataatttttcttctgaatttgctgtttatgggatcatgaaattttagacctaagaattcatttagtaattcattcaacgattagagagcacctataaatgcctcaggcaccataggttctgctaggctctgacagcaaaagtaaatgaaatgaagcgtttgcccttgaggaccatctagtctgtggatcctctcctcccagaaataggatcaacagtagagtccaaaaccttacctgatgcacctccaaaccaaggctcacccactctgtggattcttagacggaaagtaataaagactcagtgatgcataattcactcattatgggatttcactgctaaaactaactcccctggcatgaacacacacatatacttcagaagtggtaaatttcaagcagaaattctttaaaggctcctcatctgagtaggctgaaaatctagtagtatgctttattttatgaaaccgaggttcagatatataaagatatttgcccaaagcctcagtgctgagactaaaatatatttttaatatgagagctgagactaaaatatctttttcaaatctcctgctgaatcttagctcgcaatacataattattagtgtttttaaatcacagtcacaagtcttgtgtttttctaagtaaggtagaaaatggtgttgtcccccatagtatgaataatatttggtgaatgaatgagtgaatagacacccttaagggaatataaggatgagattacttgggacaggaaagcatgttacccacaatgaagactgactatgggagactaggtttaataaatagcccctagccaaccacaaagaaaaaattcagaaggcatcttttccaaatttctgtgactttagcacttagccccttgttcagttgcctcatacgtgttagcagatggtcaaagtgatcctacccaagaacagaagatgaggatactcataacaatagattgtatttgttattgaaatatagacaaacatttcattgctgtgttgttcgctagtgtatttttaaagcagggatatactggtcacaactaccgaacataaatgaaccaatgagttaattactgagggcttaagtggaatatttttcagtctcctggagtagccttttccacttattttgttttccaaatattgccgttgtgtatgtatgagttactgaagctggctatcaagggatttcagcaattgacagtcccttcaagattgtaatcactgccatctggatctcaaagatcatccagtcccctggttcccagcctgaccttcccattggagtcacctggggactgagtccacctgcagagattcctcatttaattgacatgggctgtgacctggactgtgggatattttgtaaagctccccagatgaatctaatatgcatcagtttgaaaaccactcaactagttcatccccttgaatttaaaaataaagcaactgaagccaaaagaggttttgataaacggttggacaaaagagtctgagtagttcttgataaacacctacgcatggcactttatgaagcttaggcactttctaacaatcatcacttaatctatttttgcattttctgaaaacacaggtcaccccaggctctacctgtgctgtgtttggcctgggaggggtcggcctatctgctgttatgggctgtaaagcagctggagcagccagaatcattgcggtggacatcaacaaggacaaatttgcaaaggccaaagagttgggtgccactgaatgcatcaaccctcaagactacaagaaacccattcaggaagtgctaaaggaaatgactgatggaggtgtggatttttcgtttgaagtcatcggtcggcttgacaccatggtatgtaccatgacatgccctgagatttctgcctctgcaacctggaagatgcatttaggcagcaaaatatatgttttatgtataaaggatatttttaatgatgaatggaaatttcccatcatctgtttgttatgtggcttgtttaatttttgttatgagaaatcttctcttccatcaattacccaaacctgtctcaagtcatatttcctctagaggaaaagaaaagggtttgtttttcttaactgagcaattatagatttactttattaatttttagttaaaaaatataagttcaagtaaacataaataatataaattctgttctcaaattggaatgttttatttttctcctacattcttaacaaaaatggtttaacaattttgcctatgttcttaataaatttcagatttttaacatgttagtatttggccaaaggaaatgagcaattttaggccaactgctgttttattaacaaaaatatgccctaaggaaattgactgctttaagacatcactgtattttatcacagaaactggacagtgcctggcacatagctagtacccaatattagttggactgaatactttgaaaagtcagcagtctctactaaaaatacaaaaattagccaggtatggtggtgtagtgcatacctgtaatcccagctactccggaggctgaggcaagagaatcacttgaacccaggaggcggaggttgcagtgagccaagatcgcgccattgcactccagcctgggtgacatagtgaaactctgtctcaaaaaaaaaaaagaaaaaagaaaaaaaagaaaagtcaacagactttaccaacccccagaatttaaaagctacgtatctcatagcattgcttatagattacatgagacaacgcatgtgatatacttagcacagtgccgcctgtcatatggtaagctcccaataaatgtcagctgacttttttttcttttttttgagacagggtctcactctgtcaccaaggctgaagtgaagtggcataattataactcgctgcagcctcaacctcctgggctcaagtgattctcctacctcagcctccaaaaatgctgagagtataggcacaagccaccacactcagcctcagttggcattattgatatgaaatactatttccaatcttgcagtgcttacatcatctttggcttattacatggtatttcttccaaacagttacaaatatcaattgcaatgggaaacacatctctagctatatttcacctacccagaattctctagaatcctactgaaaatgtctccagaaaccaacaagtttccattgctgaggttttctagaaggtccagcagtgtgggtaacagggagtggcaccctaagatcaaagctctcggcagccttgacctaggacagatgccacagaggaataaaatgtcaagagaattcaactttttccagggctacagcttttctctttatgctccttttctatattttcatccattttctcatgtggaactggagtgtaccttatcttaagataccaagtgtctgacagccacatgttctgaggatgtctggtctcccaaaggtcagaatccaaaatcaaagaactaatcattatattcctacggggatctttaaccattttctaactacagaacatgttccaagaactgactggaaaacattttctgaactgtttcttgaggttcccaaatgatcagtgtattttaatgtaaaatcaatatatatttggggaggtaaaaaaacaatgtttaaaacatgtccgtttgagaaatggacagtagaataggaatccacttaagagggagaccgtcaagtggacaggagacaaatttcggtgatataattgtttatcttgttcaccgtcaaaatatctggttgaaagtactgggttcaaaatacctttattaggaagaattaagcacactccaatttattcatccattctttcattaaaaaaccattttctgggcatttcctgaatccacagcactatcccgtgcaaaaaaggggaatgaaggatcaaaagacatgatctcttccctctacacactcacaatccagttaagcctattacatgatattgtgcattatgagtaggaactatgcgactccacgttaaggatgctaaatattcactttattccagatggcttccctgttatgttgtcatgaggcatgtggcacaagcgtcatcgtaggggtacctcctgcttcccagaacctctcaataaaccctatgctgctactgactggacgcacctggaagggggctgtttatggtggtatgtagttgggctcaagtgccaaattctcattaatctcaatatatctcattaatctcaatataatctcaatatatatgcccttttacaattgacaaggcaagattttgaaaacaaatcaaaaataaatttaaattccttttctatctacagtctccaaatcaactagatatggaactaatgcagacagaaggtcccaatatagacttttttctgttgtcaccataacccaggacctttaatctccatctgtttttgtacttgtgactgtgtaaggcatggaaatttttagtagaacatgcaaatctacaacaatatttcatatctacacccaaatttagacaactgataaatttgctcctctaccttgggcataaacttctgtactattatttctatgggagagacaaaataactaagaaccttcgtttatctgtgattttttttaagtcaagacactgtaaaagcatattgaagtactgtatctcttcttatcctcagttatagcagtctggaatggagcaccttttctaaactttgatttatttggaaaatcttctcttcaattctcctacttaccctagctgaatccaacaatgatactgtcttcttttcaggctttaagagtaaagaaggtatcccaaaacttgtggctgattttatggctaagaagttttcactggatgcgttaataacccatgttttaccttttgaaaaaataaatgaaggatttgacctgcttcactctgggaaaaggtagattttaagttagttttctgttttgcttttttttctaccataggggattgtctagcagagaatgaaaaaggtggaaagatgagaaaatatagagtcccttggttttccattaccagttcagtctttgcatggagcgtatgtaggatcatactgtgagaagttgaaaacagttgctttgcatttcctattctgctggagtcaaattacgttgattactgcaaatctgaatgatcagagccactcagccttcctgaaaagagaacactcacatttgcccaaaaaaaaccccacaaaaaaacaaaagtctatttaaacagccataattataacatggtgtctttgaagcctcttccttctacctatataaagctgacactaagtgtctgcatatttaaataattttcaggacatcctcaacattttcattacaggagtaggtggaactacattgggattgttttctaggtagatattactagtttttctctttttctttttcttttgtagtttaagaaaaaattttttaccactgaaagttatcataaaagagtagtaaatactattttaaatgtttgtcttacattttctctgaagcttagaaaaataagccaattctatttcctacctctaacatttaacacttacaaccagctattaaaatgaattttgtcacctgcatttacatgaggcacaactggaaacaggcagttatatctaacctttgccttctagctccagagtcttagattcttctgctatcccacacttactttcatgaggttttcaactttaaatagtgtttctttggcactcacaaaatcattatactaggtactttaaccgacaacattcttgaggaaggaaagaaactagcacccaccgagcaccagctgttctattaagtgtcttacctgcattatctcctgtgattcccaaacaatgctcagtgtcagtctcaatctcactatcttagagaacagaaactgagactcggagaagacatgactttgccaaaatcatcaagtggtaggaaggggaggcagaattcaaaagtagatcttgtttttagcaaatcgattcactttctattaaaccacaccgcccctcaagagtgcatgtacatatggaaaacagtagtcatcaaaggttagttatcagtcattattattaccattgacatcatcattgggatcatcatcatcataggattgaaaagatgatggcaaatatagagatgaacaaaaccagaggacagtgttgagcaacataagaagtcatgaagcatgcctaaattcactttatgagaatgtcatatagtaatatgcatatgtaaatataattaatcctatcaataagcaaagattaaaaattataatattcaatattggtaagaataaggtgagttgggcactttcatgtactttcagtagtaattgatacatacttttggaaaagcaatttggtaatatatatcagaaacctttaaaaaataactgaatcctttgccccagcaattccatttctagaaatctattctacagaaataatcaactagtcaaacatgcatatatgtttacttgttagaactttagaaacattctaaagttcaacacaaggaaaataatttcataaattccagtcatctattagaaataaatgaaaccatcaaaaagaaatgacttcattgggatattctcatgatgtaattttagactcatttaatgaagaatataaattgtatatgttgtatatgcaatgtctcaaattttctttttttatatttattttattattattatactttaagttttagggtacatgtgcacaatgtgcaggttagttacatatgtatacatgtgccatgctggtgtgctgcacccattaactcgtcatcaaaaacagtaaaacatgcacagatttctagaaaaaagttcatagaaattcaagaaaacattgagaatgattatttctaggttgtgggattatggatttcttttactttcttcttcctgctgtcttgtattctctgaattatgtgcatatatatttctcatatatgcatatgcatatacatatatatgttaaaaattattaaagagtcacaaagaccatcattttctaaaaatatgtattcatgagaagttggtttatagaaagggcattagttctagtgtaaatgttccatttgtaatcttcacaagaatgaactatcttagaattaatacaaatcaactttattctctacttctacaaatccttaaacatccgtatcaaaggtcttttaaacttccagcatagtcttaactttgttaaattatcaattctttcaggcaagttatccatcatcttataatttttgcaaatttgtatttgggtttgaatcccaacactccatactagatgtgctaccagagcaagttacaaatctttctaagtctcagtttttataatctctaaaatggacataatatgggaacctacctcttagtgttgatgtttaggttgaagtttaagaaaatgcacgaagaatgtgacaaatagtaagaacttactgcaagttattatccactgttgttttatattccttattataccaggaacgtgggcacacaaaaatgattttttgaagatgctaatgtagaattaatgtagaattgaaatgacaggcatactcaggatgttgtgagtgagattaagattggagaaaaaaagaaaagaaaagaaaaccaaaaaagatgaacttcctttttcttgaaccaaatgtatggggatggaaatagggtagctgggatcacagacagattttcactaagacacctcagatgctccttggactctcacaacaagcatgtgggttgtctaaatgttaacacaatgtctcttctttcctattgcagtatccgtaccgtcctgacgttttgaggcaatagagatgccttcccctgtagcagtcttcagcctcctctaccctacaagatctggagcaacagctaggaaatatcattaattcagctcttcagagatgttatcaataaattacacatgggggctttccaaagaaatggaaattgatgggaaattatttttcaggaaaatttaaaattcaagtgagaagtaaataaagtgttgaacatcagctggggaattgaagccaacaaaccttccttcttaaccattctactgtgtcacctttgccattgaggaaaaatattcctgtgacttcttgcatttttggtatcttcataatctttagtcatcgaatcccagtggaggggacccttttacttgccctgaacatacacatgctgggccattgtgattgaagtcttctaactctgtctcagttttcactgtcgacattttcctttttctaataaaaatgtaccaaatccctggggtaaaagctagggtaaggtaaaggatagactcacatttacaagtagtgaaggtccaagagttctaaatacaggaaatttcttaggaactcaaataaaatgccccacattttactacagtaaatggcagtgtttttatgacttttatactatttctttatggtcgatatacaattgattttttaaaataatagcagatttcttgcttcatatgacaaagcctcaattactaattgtaaaaactgaactattcccagaatcatgttcaaaaaatctgtaatttttgctgatgaaagtgcttcattgactaaacagtattagtttgtggctataaatgattatttagatgatgactgaaaatgtgtataaagtaattaaaagtaatatggtggctttaagtgtagagatgggatggcaaatgctgtgaatgcagaatgtaaaattggtaactaagaaatggcacaaacaccttaagcaatatattttcctagtagatatatatatacacatacatatatacacatatacaaatgtatatttttgcaaaattgttttcaatctagaacttttctattaactaccatgtcttaaaatcaagtctataatcctagcattagtttaatattttgaatatgtaaagacctgtgttaatgctttgttaatgcttttcccactctcatttgttaatgctttcccactctcaggggaaggatttgcattttgagctttatctctaaatgtgacatgcaaagattattcctggtaaaggaggtagctgtctccaaaaatgctattgttgcaatatctacattctatttcatattatgaaagaccttagacataaagtaaaatagtttatcatttactgtgtgatcttcagtaagtctctcaggctctctgagcttgttcatcctttgttttgaaaaaattactcaaccaatccattacagcttaaccaagattaaatgggatgatgttaatgaaagagcttcgcc

SEQ ID NO: 33 - DNA, 122673 bp, Homo sapiens
cagcacccagacacttaacagatggaaagcggtggcttggaactcacttccaacgaaacaatagcacatgctccggctggctttgacacttgcttccaaaggcgacctgcacccagggccaggaccacggcatctgagcctcctcccccagccgccaaccccattcccaatggaggagcccaggagaactgggggcggccaaggcagcccttccctgctccgcagatccagaggatgcccacagcccccttcccctcccgcctttcccacactccctgtagcaattcacacaagcggggaggggacgaaactgctgaatccagcagatagcttgtggcggggtaatcctcggtccggccccatacaggacagaaataaaatcgccatttcagctccgggcgcagctggaggaggctgacgccccctagttaggggaaggctgtgggtgaccgagaaggaacttttcccgttttctattcaaatgaaatgagggtggcggtcgcagcagggagagaggagcgaggggagttttcccggcggggctggggggtccacagcggcgcggccacgctcagcccagcgctggcttaggagggacgggctgcgtggggaggcgacggctccgggccgaaggggtcgctcagggctctgcacagctgtccagggggcatcgggagataggcagccgaccgggggctggagtcaagggaagaagaaagagggggaagggaggtgcagggagtgaagaggaggggagagaggagagacgggggagggaggggggaggggggagggggaggggcgggcgggcggccgggaggaggagcgcgcgagccggagtcggagcccgagcccgagcgcgagccgagcggaggagaccctgcggcgcgcggcggcggctcccgggcgtcccgggcccggtggcggcgcggctgtggttggctgagcgccgcgggccgccccccgcccgccccctcccctgctcccctcccccgcctcccgcggcggctggcgtcgggaaagtacagtaaaaagtccgagtgcagccgccgggcgcaggatgggatccggctcctccagctaccggcccaaggccatctacctggacatcgatggacgcattcagaaggtagcccctcccccacccagacaccccctcctccccccgggtgacagcgccggggccgggcgcggcggggcgggactgtccgtgcgtctgccggtccaggctgcggcctccgtgcgctccgccagctctggtcgggggcgggggtccccacgcgccggctccccggggaaaggggcgactcgccctggggggtggggggtgggggggcgggctagtgtttccgtttcacaggcagagcttttctttttgaaaatctgattaggctgagtttttacattcaagggctggcacatgaagcctttaatttccggtggatcggcccgccgggcagccccggggtcgtggtccgcggagggggcgagcagccgccgcttcctgtcgcgcgggggcaggtgcggggggcgccggcggggacactgctcccccgcaggtgagtagctccgactgcagagggggactcgggccgctgcacctccggggccccgcggagagcctggggggcagcgggtccggctctcccctgctgtgcggagataggaagtccctcgaatgtccagcgttcctagcggacttgagttacacgggagaggggttcagaatagaccccctttgttcgtggccccctctgacgggcagggagggacaatgagcgcgccggcttggaaggggctctcatgagctccccctaaagtccccagggaaaagccattgtgaggaaatccctcaaacctcagctgggcgtttcaggaagcccttgcagctgcttctcacctttctgcccacggagtactccactgaaggaggccagggagagatgccccagccaggcacagagcaggtgccggccaggcttgagtctttcctgttcccagaggtgcatttggccagtttaatcagtagatttaagccaacaagcctccctcaccctgtgcccggcttgatccccgtgaaatggaaagtacagccctctcccaccgtagcccgctttgagagactcagataaccgggaggaggaagcatcttcaaggacaggtggtcacccccttatttaatcagtgctgggcagctgggcagctgggcagcggcagacgcacaactagacccaggtccctgactccaggactaggcgtctgcaattgcatgggactgtaacagcctcctttctccccaaaggaaggagtggccctcccttgaatatgtcactgcaccagcatgcacactcacacacacacacacatgctccaatgctcacacatccactcacaaacacacacacgcacacacgtgcatacacacacgtgcacatgagcacacagacatgcacaccacataggcacatgcacacacactttttctgcccgatagatgagaatgtatcaaagacctgcctttaaaagcaaaagtctttttaaagtgagttgtcaccagatcaacagtagcaggtccgtcctaagaacttcctaaagatgtcccgggagcagctctcttggaagcaggtgaaaagtggaggagagcttcaggaggggtgggaggaggacgctgggcatggcaggccaggctgttattgtgggcagggtagcttttcacagtggacacgctgaggttggggtgatctccagaaaagcagcctgcaggtgggccctggggaagacatggcatgtggcacctttgcgggggagaggcggattgactgccagctctaccacttcctgtaccacgagcaagcccctgggctccccaagctggcatccccgtccataaagaagggataataaaatctgctttatagactggaatgagaagggaatgagtgaatgtaaacactgcctggaacactgcagaacacgatgagcattattcttccctcagttccttccataaacgtccttttgtggtgcaaacagggaggcgccagacgggtctccaacccccaccccgccccccatctccacgaggtctgttgcttgctcctgagctgcccccgccctctgccccttgctgtgaaccccgttggaagctcctagctggactgtgagtcctggttgaagctgaatcgtttgcccaagccatgtgccgggcaaagcatgataacttctcgctcacctcccaggctgcacacccagcagtgctgtcacggatgggttgcaccgggctcagctgagagcactttcagtgccgctgccatcagccgccattccttctcttaaagtaccaggcactgggtaaatcctggaatttccagcgtgaatctgtctccctgccatccgccccatctcctctccatcaaaggtcatggaaacaaacccatgttgcttcctaggagggagccctgggggtcactgggtgcaggagataagggatgtgttgctttccgtcactgtgttcgtcggcaccacctggccatgagtcctggcgatgggcacacccgccccttcgttatctctgctctttgtccctctggttacctgacccctggccatctcagtttccccctgagaccgcagagacggggaggaaggagggaacattagaaactgggggttctgccgagttctgtgctccggcaaagctccaggttgacaatctgaagttgtctgagggaggccccgggcagcaagtgccggtgtctcctggcttggccttacctgtgcaggtaaccctgcagacatgcccagtgattcagaggagccgctgcagccacttggcgccaggccaatgctttatttatatgaagaaaactccagacacgcacaggtgtcacatcaccagagtgacacagtgggagtcagcaacaggaatttgggggattgtcttccctcctcaggagcttttccttcagaggttgtgcagaggaagctgggcgtgtgaagtgagtcggaggttgcctcctgagccctacacgaaggcaggactctgtgccctggagtccaactgaggctccgttttcagtgctcccctctcatctcgagaaccttgggtcagttacttcactctgtgcccctgtgctgctgtgctaataattaaatgggataaggcagattgcctggtcaatgagcccgccgtgtttattgagcatctactatgtgctgagtgctggggtccatgggaagctgagtgctggcggaatgggaaggcaactacaaatgataaacagcagcagacgttgcaggctgggtgggccagccccgtgtggggcctgatgaacaggtttttttccctgacgatcggctttgcaggctttgtgggctttgtggggaaggagccctttgtgcagaactggtagccatgaggatggcctggtgagaagctgctgaagggctggggacagcctccacccagccagcagcatctgcaccggcctgttcccgtcatctgttccttggcttgccagggtgcacagatcaggacttggcacttccccagcaccaggtgaagccctcctgtcacccccaaccccgtgtctagaccctcaggtgggctgttaaagaaggggagaggtggaagccaggtccccaaacctagggtgctgaggtccttgcttcagagagactgtgtcctctaggagctgaagcgcttcgtctttccccagaggattcgttttttcctttcctcagctgcccctaccctggggggccctggctgcagcacctgctcctttctcttgcctatggagaaagggtttgctcagctgagctgcccatggagtgacagggacgacgcactcagcactggggagctggagggggtcccacctggtggcacatccaggcttgggtttgccaatcttccgaatcggggaagagagaggcctttgggacccctgggccaggctgtgggctcgggtgtggtgaggagccacatctgggcaagactgaatgctccggggcctctgtggtgccactgccctgacctggcggccccctcgggacactcgcactgtgcgcggcctccctggcgcctctgggctgtggtgttctggtcttggccttgctctgcagctggaacccaggtctgaacacatcggtggccgcttgagtttgcggggctgtttctactgtaaaccagagcagtgaatgcgcacagcccaaagggaggagccgcgctagaaagtgttcaagcgtccgcagaagtcggctcccagttcttaatagtttgccacccaccgtggctacgccacacctacgcttgcctccacccgacctatgcctgcccccttcacatgcgggagcccagggctccgtgccctgggcagctggtggggtctgcccaggccttctcgtgatgcttccacccagcctggtcctggcacccaaggccaacctctgcgggccccagagctgtgcctttttggctcaggtcctccccgcagtgcttggagtccaggcctctgcaccctgctggggtggtctgtggtcctggcccaagggaatgtcgctccctgctgcctggttctactgatctgtcctgttcaggcccctctgccttcatttcttgctttggcacaagcatgagctgctgtttcccccagctcctcaggggagaggagtgcactgccccaaccttgtctggtgtggttagcatggtggggccttaagccctacccggctcctgcgtgcctttcccctctcctgcccacgacatggtcaaatgcaaacctcctttcattttagaaggcatgggctgctcagcccacacgcgcagtgccctttcctgtggctgcaggcatctctgctcaattgtgcagggctgcgtcccccggccacactgactcctctccaggtttctcggctccagcaccactgtctgcgccctccttcccaggtggacggcggctctcctcgccatcctctccacttccagcctatcatctgtctgcctgttacatgtttgtaacttttgacctttaaattggtataaaaatggtactgtaagttcactgaaccaagaaaatctgctgaaggaagggggtcagtcacacccttttggggtttccagtgtatgaatggagggggtggcggtggtggagggacagggagcaatgagagttgccagccttattgctgtcctgacccctggctggggacgactcccctgtctccacctgaattgaagctgggctgtgaaaagtagtaagaaccctcggtttttggttcctttttcaaccagcaatcagccatgaagtgcctgaccacttgagagctacagcaggtgctgtctcggagagggcacaggaaactgggcccttcccaattttagcccaagggtgccgaaaagtcagggagctgctggcctccacactccttcccattggtgtggtccgaattcccctttagccagacatttccaatgtccagaggcccaggaggggacagctggaagccagaagcccacctgacgccatcaggaatttccatgaatgacctggaaacctctcagactaaaccaatgccgcccaatctgggaatccaggagggctggtcccatagagtggtggggacatggtgctgagacggacagcctcgcctcatccgcctttcccacttgccagccgggaggcctgggcaaaatcactttctccccagggaagtggaggctcactgtgcagtccacgcggagcaatggggtgaagtttccagagcagggcagggcatgtggggaggctcaggaatgccacccttgccctcaggcctgggcacagcatagcccccatgacgcttctctcatcctggacccatcagcccggaagactctggaagcagcagtggcagcaccttcctgtcacttgtcttgtcactccccgagtccactgtgagctagaaccacaggctcccatgaagaaggagccagaaccacaggccccatgagcccaggtcccacagcccgcaccttcgtcttccagccagcctctccggagctcagtgtgggtggaggggctgtctggcctcagaaatgggcaaaagacagctctcgttgtcagcgaggtaaatctagcgcagaggaagggcacactgtccccgtcagacgcctcagatgaactgacatgcaaatgagagatgaaacggggacgagccgggcagctgatctcagtgcagcaactgggacacctcggggcataagccgggcagggaggcggcaggaactgggccccagggggccaagacttcctgagaggctgggcccggtagcccagtcctgggcttgcttcccagggggtggtgggcaaccctgaaccctctctcacccaatcacctgctcccctgggtgcaggtgacccagcaagccgcactcctgggaaatttcagaaggttttgggcaagaagggcccagagagcccccagagaccagacggcacagcccgatagctgggcctgccccagacaaagcgtgtctgcactccttggctttctccccagacaaacccaccctgagctcaggatccctccagcttccaggagcaggtgcggggcctgcagggacggctcgcagagaaggcagtttgcgagtcagtgcctggcttgtggaggttgagaccaaggccagttgggtgcttgcatttccaggggtccaaatatttttgagaagaaaatgttctaagaaagtgcacagggtggtggatgaaagaccacgctctgggtaccgtgtacaccgctcgggtgacagtgcaccagaatctcagaaatcaccactaaagaacttacccatgtaaccaaacaccaccccttccccaaacactattggaattaaaaaaaaaaaaaaagattaaaatggttaaaaatagaaagtgcacaagcaagggtccatctgcaggagttggaggagcgcatgcctgtattcctggcactgcgggcacagtcatgccatgggcaccagggacgcccagtgcactcagccacccaggggtggctcccaacattttcaagctcaaaaagaaatattttcacttgagggtgcaacttatttgtcttgaacccatccctgactgcctgtctcccccctcaccctgaccacatctccccaaatcccgaagctggtcacgcaacgggagcattggccctgaacagaaacccgcagtacccctgaaaactcggtctagaaacaactaaaagaagaaccacagcattttattccgtttgctttagattctctgccaatttttttttttttttgagatggagtctcgctctgtcgcccaggctagagtgcagtggcgtgatctcggctcactgcaacctccgcctcccaggttcaaggaattctcctgcctcagcctccggagtagctgggactacaggcgcctgccaccaggcccggctaattttttatttttagtagagacggggtttcagcaccttgaccaggctggtctcgaactcctgaccatgtgatccgcccgcctcagcctcccaaagtgctgggattataggcgtgagccaccacgcccagccttttttttttttttaattttaaattgtggtaaaatatatgaacaataaaccctccctccccatccccctcccccagcccctgacccccactgtacattccgctttctatctccatgaaactgctgagtgcggggacctcacagaagtggaatcacacaggatcgccctgctgtgcctggcctccttcactcggatcatgccctcaggtgcatccatgttgtagcacgtgtccgaatttcctgcctttttaaggccgagcggtattccattgtgtgcgtggaccacattttgtgtttccattcaaaacggatgaatcgatgaaactgcctgatatttttaaagcctcagtcattttcattcttagttcttcagtttgcaaagggccggcctgttgtgatgggtttattgttgcatcttctgaaaaactttgtgagttcccgaaggcctctccacgtcttgagtcatggctgtgctgctttgcgaagctgtgtgcatgtctgtggtgtagcctgtgtacagcctgtgatgcgtcgcagcggaagggtagggggctgcccagggaagacagatgcgccaggttccgctccacggagctcagctaccagccctggtggagagcgcagatggggccgatttgtcatttgtctgcgcttgagcccagcagctgtgtggcctccctggggcaagtcattcaccctctctgtgcctcagtgtctctgtgaagtggggggaagtttttggaagattaagtgggctaatacgcgtcaaatgctagaacacactggcacttggtaaatgctatataagtgttatcatttttgtttgtttattatttatttatccatgtcatggatttaaggcagtctaatctcagtgcctggtggagacccgggcgccacccccccaggttgtcaagtggtccctgtgcctcccactatcgtccccagcacggtgccgtgtccgggcgtgcgtgaagggccagctcacctcacagctctgcttcccaggttagctcccatccaccctccccctacctgtttcctcaccgaaggaaggggcagaaagatgccctccatgccccttccgactgttgcagagggatggaggactatggtacatacacacatatacacgcacacacccaccacacacacacaccatgcacatgcacatcacacacacgcacacaccatgcacacacaccacacacgtacacaccatgcacatcacacacaagcacaccacacacaccaagcacacgcacatcatacacatgcacacacaccacacacaccacacaccacacacacgcacatcccacaccatgcacacacacaccacgcacacgcactgcacacacatgcacacaccatgcacacgcacatcacacacttgtacacaccaggcacatcacacacaagaacgcacaccacacacaaggacacacaccacacacacacaccaagcacacacacaccacacacacgcacacacacgcacacacccaccacacaccacacacatgcacatcacacacgtacacaccacacacagcacacacaaaaacacaccacacacaccatgcacatgcacatcacacacatgcacaccacgcacacgcacatcacatgcacacgccacgcgcctcacacacaagaacacacaccacacacacgcacaccacacacacgcacatatcacacacatgcacatcacatacatgcacacaccacacttacacacatgcacatcacacacaagaatgcacaccacatacacgcacatcacacacatgcacacaccacacatgcacatcacacacctgcatatacatcacacacacatcacacacatccacatgcaccacacccaccacacacatgcacgcacctaccacacatgcatatcacacacatgcacacacaccacacacaagcacatcacaaacaccacacaggcacatcacacacatacatacacaccgcgcacacatcacacacatgcacacacaccacacacgcacagtatgaagatgacagagaagtcagcagagcccctgggggtttcaggagttgagtggggacgaggcaggtggccacacagctcggagggagggcagaaggcacccgtcttcgcagagtcacagtggggcttgcctcctatacgtgccggaagggtgaagccccttatctcattgcccgatgtgatgaggtttgaagtggttgagcttggagggtatgggctgagcccacagcagacaggcctggcagtgccccccgtcttcccaccctgcggtcatgcagcccgactcttgggggcggggtgccaccgtgatgtgccgtcacttgcagcagtatgtcctcatgccaggctgagaccagcactgtgtgaccagcctgccccatgtccctcagcgctgtgtcacactccacactgaggccccactgaagcatgccaggccccatcctatttcttccaggtagtcgtctgcccagcacctcccctcccaggccttgccctaaagcccaggcctctcagcatccaggactctggaatctcccaggtgttgatggctgaggtcatcagctggatgccaggacacccaggatgctccaggtccttgctggggtctggagtttgtgattcagcctcagtccctgtggtgagtccaccatgtgtcctcagacaatggatcagagagcccccagaggacggcccggggccgagtcgggtccagatgccaaaggggcttctcgaggcatctccagctcccacctgcccctcggagtgccaggcttggcttctggaagagaaagctgggggtttagtgactccagccaactgctgtgagcccaaggcatcaaactaaaaatagcgaggccaagagggagtctttgtgttcggctcagtgggcaatggtgcctcacctcgcagcatgacacagggctgatgacacggggcacgttggtcacaaagtgccagtctcagcctggcacagggacgtgccacctgcaggtgatgacacatcacagtggcagccgctcctgatggtgctgctgcattgagtaggagcccagatccagggagacagttgcagcagatgaggcaggaggccagcgaggggttctacctgctttccgggctggcctctgcatggacacaaagcagaaagggcataaaggtgaccctggccaccaaagcagacctggagcaaactggaccagcgcaaggccccggtgccagcactcagagacatttcttttctggcaggaaatttgtgcttcattttctaatgaaattccaaggcaatcaaaaggcaaggaaagaggagggaaaggaagggagggagggagggggttccattcccatccgaatggaagcccccaaggcttctgtagctccccccatcaccaacttcactcaccactcttatctgatgcctcctatttgggtacacacggccgggtcggccttgcgagagactcagtttcctctcgacttccgcccgcctgcactgtcaccacgtcctgccattgacctctgttcatccactcatggtcactgctgtgagttgaattgtgtctcccaaaaaagtggatttctgtgctaacctgtgaatgtcccgttagttggaaatagggtatttgcagacataatcacatcaagatgaggtcatactgcattgggatgggcctcaagcccatatgcccgccatccttctaaggagagggaaaggcagacacacatttgtccatggaaatgagaacggaagacgtagagacagaatcaggccatgtaaagacagactcagagaccagagtgatgcatgtacaagccaggctctgcgggcagcccctagaagctggaagaggcaagcctcctccctggagtcctgggaaggagccagccccgcccatgcctcgagctcaggcttcaggcctccggagccaagagagataaacctctgtggtttcatgtcacccagtttgtggtctttgttatagcagccccaggacactcagggggttgccttgtccacccccatcctggccctctgagggactggttggctcttagaagaccgttcaacctgccctctggtcctcctcccccacccagagacccctggctacaccctgcccaagggagctcaccaaagcccacagggtccctgtgatcttgtcacctgggctcccacaggccagcagtgttggaacctggacatctggctccagccttggtggccacccccgaccttgctctgctcctacagctcccggccttccctgccctggccggcccttgctgaatgtccccgctcctaggaagccggatgtgtcgcgtgcaggtgcctctctgcactgtaataactcctcaccaggcacccttggagcccaggatcaagtcactcaccttccaaccctgcccctgcccagagactggcacgagaaccagtaacagttgttgaataatgaacaatggatgcatgcagctcacccgtgagagggcgttgctcggctgggccagggatgaagcttctcccgcgtggctccaccgtctatccctcaagctcctgatgctcccctgggcacctctgcgccatgaggccccgttgaagtcagttggggaggcagtgtggaccgtgagaagggagtcctaagcacaggaaacgctgccttcctggggccctaaagaacaggctcaccttccccaagggccttcaggccctgacatctaaaaagatgttctttatcaaaggggaaagcagccctggggtgggggcgtggccaccagtgcagtgggcgtggccacaaccgagagggcgtggtcattcgtgcagtgggcgtggtcatcaagaaagggcgtggctgcagccggaagggcgtggctatcagctccagaaggcccttcttgctgtccttggacttgggttctccttgtcgacgaggatctcagctggagctgccaggggcagggctggcaccaaagcacttctgaagtctccccgcctcccaagtgtgaggctgtggggaaggagggagggcagctggcttgtttctggatgagcccatctgactcagcagctgggacccagcaggagcgcagagcaggtcctgaaggtgccgaggccccacccgcagctccgtctcagctttgtgagggctgcactcccccgtgtgcatccggcgtcacaaaggaccacaggcccggcggcctccacagcagacaccaaggccctcgcggtctgaaggccgaattcccaggtcaggctgcagcagggctggttcctgaggcctctcctgggctggcacctcctccccgtgtccatgcagggccgagcctctgcatgtctgtgtcctcggcgcctcgttttacaaggacatctcattttaaaggcccggtctccaaataaggtcatatcgtgaagtgctggggtcagaactacagcatgaattttgacgggacacagttcagtccatagcacccgctttgggaagtgggaatgacctctcccttccccatcttctggcctttgtaaccctaatgtgggaaagcaggagggatccagaacgacattgggtcaccaaagagagcatcgcagcccaaaaggttgaaaggcggcaccaaggtcccgcgcctggtgaccgccgactcgccctcccgggctccaggctgtccccactcccccccgccccaaccccagcatgttgaggcgcctggtcccaactgcccattcactccctgtacacagactgcttctttgtcctccagccaggggtgaagggccatgctggcgaaacagcaaacaaccccaacatgctttgcagcctggccaaccacatgaccagtttgaggaggttggctggagatcacaatgaggaagttggatgagggggtccaacttctagcagcccataagcctatccattcagacaccaaatccatggaaaacagagagacaatatactgattttcaaaagggagacataccccagcaagtacagaccagggaacagggtgctgacgtggccacagttcttaaactactcgacttcatggatggggcacagttttttttaaaggaggatttagaattctatttggcaggtggcatgaaaaagagttttgaatagaaacacacccctccctcccagttgcctgcccagtatgtttgttttgttctcttgaaacaaaggaagagagtggtgaggagggagggaagatgaaccaggaagaatgaaagcacttggcctgcttctcagatggtcttggactgtctccgctcacaggagttgcaggtttttgggttttatgcaagttcggatcacaacaggcctcttgcaagaaccaggcattacctttattccaaaagccttgctgggccttcttgaaaggactggcagccaccacttccctagaaacccgtggcaagttccctcctcccgaccccctgctgtttggtccaggaccccctgcagtcctgactgggacccacttggcccttctcaagggacccagcacaggacgtgtgtttctgctttgatgaaccgccctttcccccctgcagttctagtggaatctcccctcccttatcccattcccacttggaaatgatgatgatggaatgggcgatgccggcttaccaagacatccaagctctctgggtcgaagttggagagaggggtgcacaaaaaggattccactcctgtctgccttcccctgcctccccgctggggtgtccctttcccatggtttcctctaaatcttttcacccatgtccagccacaccattctcacatactgccttgaaactgggctcgaaggggctgcgtgctgagagaaggtcctctcccccagtgatcctccagaggggctgccgcctgggtcccccgagcacctcctaccccaccctccccattcctgccatccccagggtccagggagcccagattccagggaagggttgcattagctcccactcggagtcctgatgcagcagagacagacagaggccctgggagaagtgagcatgaattattaagacaagacaagggtgaggccccagagagggggtggcggaagggtcatgttcatgcagcgagagttgcttcgagcttgaaccgcgtatccaggagtcaagcagattgcaactggcgagaggccttcagaaatgccccgtgagagtcctgtgtgcagagctccatctcagcacacttcctgttcttttggttcgtcgatttttgcattttcagtcccctgtgatccattatttataacagtggagattggcctcagacactagcagtgaggaaaacaaaagcgaagctacgcagaaaaatgacaagagtgatgagcacagcagtcatgacaaatgagccctgtgcggaggcccgggatccgcgcagatgccggcgcgggggaaatgggccctgaaatcccaccgtcaggccaggcagctctgagcgtgacctggagggctgttcagacggtctgggtagccgtgtcctgcgcatgaacatcctccgtcgggagaggaattccccacggattatcagagctgctccctccaccccccgccacgtcccacgcgggccacatcaactccctctgcagcctctggccagcggctgagccctccgtgtctcccctcgttaatgcctccttcaccatcccctcctgaagtttcccccattgcatacacgcgctgaggcccacccggtatcaaggactcccattgcttgcgaaaaagattccacccctcttagaacagagaccagggccgctgtagcaaatggccataaatgccacagcttaaaacaacagaaacggattatctcgcagctctggaggatggagtccaaaatctgaatcgctgggctgaaatccaggtgtgggcagggccgcgctccctctagaggctcccccggagattcccttccttgcctcttccagctgctggtggctgccagcagtttgggaattgcggccgcatcacaccacctttctgtttgttgttgacatccccgcctcccctgcctgcggggtcttagatgtctctctccttcccactgagtttcactccacatttgaattggattaactcatgccatgttaggcaaacgtgcccctcaaatccttccacttaacagacatttattgaaggttcctgtgtgcggggcccaagagaagggacattaaattaggagatgaaccttgggaggccatggcatgcttcggagcctcggcgtcaaaatgacaacccacaccccacttggcggttcatctggggccctggaatcagcagactgaggctggaacccagcaatggcacatgctggctgtatgttctcgggcctcagtttcaacatcagtgacatggggatagaatctgcccagcggagttaagtcaccgcatcccggagagccgagtgtctcatagaggctcctggtgtggtctccatgctgctgctcagcacggaatgaagaggttcaggaacttgcccacagccacggataatgagggacagagctggaattgagcccgggaacctgcacacacagcccagtgtgaccgtgccttctagagagaggccagccctggcaccaggtgggcatgccagcatcaccttcaaggtgtgctttaaggatccaagataatgtgggtgcttcaacagatgcatggcaataaaaggaaagcaccatgtttcaccttcacacacacacacttacacattcacacactcacatacttacacacattctcatacactcacacatatgcttacacacattcacaggctcacacatgcttacacacacattcacacgcacacacattcacacgcacacatacacttacacacattcacacacatacacttacattcacacacatacacttacattcacactcatacacatacatacattcacacacatattcacacattcacacatacacattcacacacatacacttagacaccacactcacattcacacacattcacatacatttacacacacatccacacacacattcacacacattcacatttacattcacaaacattcacacatacattcacacgcacttacagtcacacatacacttatacacagtcacacagacttgcacatagacttacacacatacacttacacacgcactcacaccttcacacacacaggcaatcacacattcacactcacgtacacttacccacacattcacacatacacacaccacatacacgcatacacttacacatgcactcacacactatcacattcacacacacatacacttacaaactatcattcacacacatacacacatacacatgcattcacacacatgctcacacactcacacatacacttacactcacagtcacatacacccacattcacacacatacactcacattcacacgcacatacactctgacacacatatacatacattcactcacacatacattcacacacacacggatgcattagttttcaagtcaggatcctagcacagcccacaccctgcatttgcttggtgtctcctgaggtctctagttatacttcccatcccttttcttgccatgtatttcctgaacacatgttatctttgatccttaaaccatgacttagagatacagatgtatgacaagctgagagatgatgtgagactgttgttaattttttctccatgtactaattacattgtggttatcttaaccacaaaggaagcgttctactccagagaaccgcgtggaaacagtgcagatggactagcacgatacctgagaggagctttaggataactccggtgctggggaggttggggcccagttcaagcaggaggggaggcgtggggacaggtgttgaagctgtgggtgtgcagcggaggcttcatgacgctttcctcctgctcttgtgtacgtctgagcatttccataacagggaagtgttttgttttgttttttaaataacattttaaatgcctctggcacatgggaatccatggtaatttctgtcgttgttgtatattctttttcaaatgcaaggacctgaaaaatatctcctaaactggaaaaggaaatgaggctgaatacagattttattttagcaaatagagaagcagtgattgtctggcggttaactgtaatccattctgagtgtgactttactgttaagtattctaaaaacaagagaccaaacaaaatgaacaatatgtccaaatgtgtatatatataatttgtaactagaggtaaattgcagatgaattgcagatgtacacagacagatggatggacagatgattgatatagattgattgacagatgattcatagataacttgcaatgtttcttcagtgaacgcatatttatttcttgggtaataagaaaaaacaatagaatgtggaatttggggcttggcctcttttagctcatttaaaaaaatattaaacacttggaattatcgagcgctgaaaaaggcaatagaaaattcaccttttaactccctcaaagatagaaatgtgtgaatctgctagtgggttgcgtttggctggtcctgcaggctgatttggtctgttctctctcccagagagatccccaagcccggctgagatgtgcctgtttgtcttgagggcagacaaagcctagcaaaatcttatggaagctgatataaaagcttaatagcttataaaagctctaaaaatgattcacagtctaggatagagaaaataaaaggaatttgaattggtttattttcctttagaggagcctaaatcaatatttattctgagtatgcaatcagaaatatcagtaatttgagaacaaggcaaacagagctgcacatcccgttatggccacgagcccacctcgccttcgttcagaccacagctgaaggtctgacttaggtgcagcacgcacccctggagctgagggcctggagcagggccaggccgggctcttctctctcttgtctgtcctcgtctgtgggggaatgaagatgacacagcactcaggaggtccttttcaggacccagagtcactgggcttttagggcgtttggctctggttctagcccgagtgtggtctcagtccccattggtggttgtggttgtggcatgggcatcattagtcacacaacataaaaccacagaacgcagaatttgctcaccctggttcacacaggagcaagcttgggcaccagcaccccctgaacgcatgccaaagggcaggtccagctcagtgctggggtgtggaggaacccacctggggcctgcctgcaaagacagatgccctgccgtgtttagaaaaagagaaaactggcctaaaccacagtgaggtcaaatggatcatttaacccgtcgagtttggtttcttgttcatccgacgcggttgatcttattaacgcatatgtgtttgtgttgatgtggcctccagcttctgtcgcactgtggacacagttggatgtggctgctaatcaatgcggggctccgtaggtcagtgagagcaatcagagcctgctgtgcggtggcatccccgagttaagacaggcttttgtcccatactctattgaaacacccagaaatgctgacatgttgaagttaaggccatgtgccttggtgctacttgcttgcgaaacagcctttgaaggaaaaaggaggaggaggatccatgagtttcaagggtcccctcctgtaatcacggctgccactcaacggagtaagtaatgtgtagcgggccctctatctgcatgacgaatcctcctaacattcctgtgggcgaggtaggatttgtctcgctttgcagccgaagaatcagagcctcagaaaagttaagaaatcttccctgggtcaagctggtaggaggagggactggaactgaactcacatctccacctcctctcttcctactcctctgcctttcttgcacctagagcagtgtacaacatcaacaactgaccagggcgatcctagaggtaagagacagccgaatggcacggacccagccaagcccaggcctgcccaggtggaacagagccagctaggagcattcggtagcagaggtcagtccgctgattgactgttctcacttccaggcccacagcctcctccaccctgatggtctatgagtctagtgcggccctttgcacaattttagcaactgaacccttttcctcacagaattgtgataccgtcctaacatatgaagcatatataaacagttgggcaaatcataatagtttccattatttcataaatttgcatttgtggcaccaaggagagaattaatgggaacaagagggttcttgtgtgagttccgcatttggatttgggggttcgaggtggcagctataggctcacattagtgtctgcatcactttgcttcagtttgtcacggtggccccccaaatccagaaccgccctcctcgctgtgtgaggagggtcctgcctgcaccgctttgcagacatgggccagcctggatgcctgggcgacgctgccctgcgactcgctggcctgcaggacatctgcaaaacattcaggtctcacggcagtggccatgaacggcctcacagacactgagtggacctgaccccaaagagaatgcgtcgtccttgaacgtgtcgatatttaggttattacacaatgagtgtgttgctttgcaattagtgtctgaaagagttagagcagatgtacatatagaaacgaagaaacgaaatctgaatccatgctgacagattccccctccccaaaccttgctcaaggtaacacaggcgaccaggagcaagtcccggccggccccctgctagcgtggtctgagtggcccaagcaggacccctgcccaggctcactggactctcctggagcccccagacacgacacccttcctcatcactgaaaatccacttccacagtgtaggagatgcatggatctgagggccagtaggaagtgctggagctttaggctttagacattctttttttttttttttttgagacagggtctccatttgtggcccaggctggggtacagtggcgtgagaaattctttaacactctgccgagtcctggcccttggggagtgaggcctggctatgaggcttcttgtcagaactccgtgtgactctcaggatggaagaacagggtgggggctgctcctcccctccctccctccagcccctggcctttgtaaaacggctccgcctacgcgcctgtagccagtgcagaaccagggaggcctctccccttcccttcccaggaggggccccgccttgtcctccatgccggattctgttcgtcctcccccaggtcctctctgctgcctcccactgccccatttcctccaggaaccttcctctctcctaccaccagcctctctcctacccccagacacacactctttacatgccgatttctgtcctctggttaactggcgtttaattttctcagctgcttggcttaatgccaaagagtgttcttccaaataaaaatggtaaagaccttttttctcccatgagaattttatgtaaacgcagtgcagcatgctcgtaggctggttctgttatcaatttctaagctcagcttccagagctagagaacttttttattggttataaaaaccctacatattcagtgcagaaattctgaaaaatgcagaacagtatcagggagaaaataactcatcccccactacccagagaaaaccgctgttaacaccgaagtgccacagttgctggcgttctcacacaggtgtgcgtttaggagtgtgtaagtgcgtgtaagtgtgtgtctggctttctttcacataattttgtgtcctgatcattttcactcagcattacatcagcagcggtttccaatatagcattaaattgtcttcaaaaacatgattttaatgcctctataaagttccatcatggaggctcactaaaatgtaatcacttcattgtttatgagatactcagcttaattccatttctctgcagtgaataatccagaggaacacgctcagtgtgcatctttgcttgcagcagggcagcgcagggcattggttggggtataaatccgggggtgcagtggagattagattagatcgtccgtggaaagcaccagaatggtgcctggcacttaataaatgctcttattagtatgtttatcttcattatgtccctaagagccattcctggaaatgagactgtgagtcaaagggcacaaataccgccaacctgctttccgacagcgctgtgtggatacacgggcccgaacggcgccagcctcactgcctctgcgttagtgccgccacttcatctcagatactctcctgaagataagaggagagtcccatgcagccataagaaagacaacggagagatctgtgtaccctccacccagtctcccctactgggactgtcgtgcaaaattatggcccagtcttacaaccagggtattgacagcgagacaagcccccatctgatccagattctccagttgtacttgctgatgtcgtttagatatttgtccccgccaaatctcatgttgaattggtatcctcagtgttggagtggggcctggtgggaggtgactggatcgtggggtgggtttctcacaaatggtttagtgccatccccttggtgctatccttgagatagtgaattcttgcaagatctggttgtttatgtgtgaaggtagaaggcatctcctctctctccctcacgggtgtgcacgcctcccttcatcatgtgatatgcctgctcctgtttcaccttccatcctgagtgaaagctccctgaggcctccccagaagcccagtgatgtcggtgccatgcttatacagcctgcagaactgtgagccaattagaaattggctttataaatgacccagtctcagatatttctttatagcaatgcaagaacagcctcatgcacttgtactcacttgagcatgtgcacttacttctgcacgatgttcttgcctgtgtagactcttacatccacaaccacagtcacagtctagaacattccatcgccgcaaggctgcctcttataaccaaccacatcccctacctgcacccatttccaacaccccatgcctaactcgatttccagcaccccgtcctggtgaacatgaatctgttctctatctcttcaattccgtcatttcaagaatattatataaatgggattacacagtatgtaacctcttgagactggctttttccaactggcatcattcccttgagatccatccaagtggttgtgtgcaccttttccttgctgagccgtgttccatgttgtgggccgaccccagtttagcactcgcccattggagggttggagggcatccgactcatctctagtgtggggcagtgcgtcaccttctcacaattgtcaacgggattgtcactagtatttgccttccatgtcttggaggccaatgtggctgctcttagaaatcagtcctccttattttggttggggagatttctgatgtcagtttgacgtttataattaataagcatcatcatcaagttacaagagtaaataaaaatatgaggcagggtgaaatgtaagatgctcgagaggctgagatcagtagctgtgtgaatacagcagggcgggcaccagcagtgagctccacggggcccagcgtccggcctcattaaccagctgcccttggggaggagcagagcccgctcttccctcctggggaagggtagtgtgatggaaagacaggctgcccttctctcctgcaggagctcagcatcatgctgtgtacatgcctgggctctcttcttcagccctagccacttaaaaccacttggagggaaagattgtagaataattataatgaggaaaatttcgctccagattcgttactccaagttcagagaagctctgtaaaaattgttgctaaggcaattgaataaagaatgtcagccgatgtaagcgataacagcaagacaatgaacataattgcatgttttacaacaaccaacctcaaagcatgacttccctgacatagatatgttttttaatgattttgaaaggtaacacagacattttcagggatttggagaggaaactaatgccatcctggtttaccagctttatggggtcatctctccggtgaaaaagactgcagccagccttgcagagagggcgctgtcttagggaggcacctccaactgtccccgcgacccagcccctaagtgcttcacatcaacactgttcttttgtgacggtgctgctgtctttcattcgccagcctgtcatgctcaactcaaacctcagttgccatccagttatcttttttttttttcttgagatggagtcttgctctgttgcccaggctggaatgcagtggcacaatcttggctcaccgcagtctccacatcccgggttcaagtgattctcctgcctcggcctcctgaggagctgggactacaggcacatgcccccacgcccagctaatttttgtatttttagtagagatgggatttcgccacactggccaggctgggctcaaactcctaaccttgggtgatccacccacctcagtctcccaaagagctaggatcacaggcgtgagccactgagcccagcctagttatcttgtttgtccaggaattggagcatttctaggtagcaccacaaatgtctgtgcaagaaacccacaatttccagtggtcattggctttgtgccaatccaaactagagtctgacaaacccagcaagaaatattcgcggcagctgcaaggaagctcctcaaatagaaatagaaaaatgaaccagggtctgctcttcccttccgggtgtggaatcaacggaagccgactcaacacagagccctgggggcgtgaggggtttggcgggatctctgccggctgcagatctctgctctgttattaccagcccttctgcccagctcctaattgctctgaagagggaataattttctcagcagccattgccagccacatttggactgaatagatgctgaaatggcaagggtaaatggggcagagacagtgaaaagccattttctatctggagcccaaataaaatcttcctcccacactcctgcctggctcctccgcagcctcaatgcccttctgagagctgcctgccccagtaggaggccaggctgggaccaaggacacccagttctgggtaaccatcttcccatggctccttggacaaccaccttaaagaagggaaaggcaagaagcagaaggaaagcagaggctggacattggaatcagcctttctttaaactaaaaaaaagttttcacatatgtgaatgcgtgtgtgaatttgaagtcgtatgtggaaggggccatatatccgtcaatgcatgctccaaaaatcagaactgatggacggcaaacagcatcggatgtgcagccagcattcttccggcggccacctcccgggggaaataggtgcagcagacaggaccgtctgtgggacggggacaggcaagcatgacagcaggtaccacagatcagggtgcacagacagggctgggggaggcagcgtggcacggcacccacttcccctcggcgtgtctgggctgaagcccagtggactcccgctgatcagaaggatcctccactagaaggatctcactggacgagtcccctccaaactggaacatgcaggtgccttgggcttcatgctgcacctttcagataaaaacacacaggtgagctgggagagctggagtcccatggaccccagagatccaggtcacgaggaggggatcgcgctgcaccaggacacattcaccaaggtgagccctggttcctccccacaggctgtgggcaaggaagtgtcgatgccaggctggctcagtaggtggaagaaccttccggaatgcctgcccgcaggctgctgctggcatcgagtctgtgtcctattttccattcactgcatgcatcctccaagtatgatttccactcggaaccctgagctgcctcatccctcgctccgtctcccctccctcccgcccagctcacactgaaatcacgcctcgcgttcagcggctggagtcctggtggattgctgcttcggggctctcagaaatccctttacttgagtcttggttttacaggaagaccatgaagcaccccccaggagctggagctcctccttctggacccagtgtctcttctcagcctcacgacgaggagacctgctcatggagctgctgcgccggcctgagctctgatccctcctccgacccagcctcaccctgcaagcagcaccatgtggggctcagaatggggatcttaagggacccttcccacaacctcccgataagcctttccacggagggcccaagcggagacaggagaacactgtatttgataaaatagagtcaaatccaggaaaatgcctctggacccggaaaggaaacgactcaccccccacccatgagagacccttctgtcctgtcccttaacccagaggccctgggcatgggtttcgcagccccctggaggccagaccctcaaactccagccttgtttcttctaagtgtgccagtcaagatgcttctcactgcaagaaacagactctttctcaagccagttcaagaagatctgcgttgctgcagaggccgatgggtgtggggagcaggctcagtgagagactgtcgtaaggaggctgagaggtcttcagaaaaatccccaggacctggggtgccaggagcctgggcgggcctgggctctcgcagcctgcagcccctcccctccctctcacagcctccgctgcccccgggctcagggcccctgcctgtgccttctcctgaggcttctcctttttacctctcagggtcccagtgtggccagcccggcactaaacccatgcgaccctggctcactgacagtcgccaccagctccacatctctcagtaaaagttcccccaaaagagtgtgattgggagctagccagcggggcttaaggcagccccctgctccagtccccttggccatggagacagggcagggttagcaggaggcaaggcatgcgcaggacagctggccggcagaggtcccgtgtgctgtcatgggtgcagggtggacactgtgaccctgggtcccccacttggaaggggtgatctagagggacttttgtcagaaagacccccacccagccaatctgactgatggggccatcaccttgacaacaggcttggtggcaaagcaagagggtacaaccgaccagagccccgggtcccctgtgccctcctgcactgcctgacagggctgggccatggcccgtaccaaccgtgagctgagccaggaatccagtcaaaccgtgtgcctgagtgacacgtagctctcttccttctctggattcactgctgatcaaccccaacaagcagcaggactgtcttgctgtgaacccaccgcttgcggacccctccccaggcctccattcccgcctttctgaaggtcaaggcagcgccctccccaagaaacggtgggaacagaggagccaggtgttcgttcttcccagctccggaaacgctgcagattgcgcactcgagttcctgctgacataacagtggctgccagacaaaatgtggcgaaaagtttttctaggtgcctttgttcactcagagacttcctagagacttgtgtgaaaatcacaggatttgcaaccagtggggacgttgagattcgtggcaactgaaatgatacaaacttgaactttgtgtcaaaccagtagtgttttgtgtaattcttttcaaacctgtcatttcacttactgcttctcacagccccaaggggcaggtggagttgatgccatcaaccctatttacagaatggtaaactgaggctcccactggttatgcgcttgcccacagggttgaaagagaagccatggacaaaaggagtcactggttacccaaagggcttcctgttctcaaatccactgctccttccattacgtggtgtctagaaggaggctcttttggatatagacattaaataatctgggagtcagtgtatgctgtgatcaagcatgtgcggtccgcagccgatggcccaggatgcagtcctgatgtacacttctggctgggtgcgtgggagccacacacatctctgtgtgccttggtttccgtgtgtaaacatcttagactagtgcttgcctgtggttggcacctggtaagtgtcagccttctctaatgtaggcagcttgagggctcccagacagtgatgttcccgctgacattcccaggtctcagctgattatgaagaggcatcaatttccagtgggggagccgccctctgtctcatcatttgtttctctcatcttgctttaatatcacagcactgccagtcaaaccacacaaaagggtttgtgatgacctgccgtgcattctcgtaagctccagccctgactcgcctgcaagccagaagccaacataaaactttcgtttttcccttaatcttgctgcctctgcatctcattttcaaatttcattttatcaactttttttgcactatttgtttctggataaaggatttgcaaaattcttcagcatgtggtcaggaagccctatggcctcctgacgaggcagcctaggggtcctcccgtggtctgaagctgcagccgggctggcctcccacagtcaggagcagcatcaggctgggtgcttctgacaccagcgaagagcgcggctgtccaagcccccatccctagggctcacgcctcatgcccaaactcgcacccactttggcgccgctggagactaatgaacagcaaaagctgaagtcatgactctcatccagatctaaaatgaccgtgtgtcaaacatttttactgaactgatgaatcgaatgggaactggtaagaaggtacgaccagttcaaaagagaaatccaagaaccctaaatgtataaggagtgaagcaatgttgaaatggacttacaaacggatgcagctatattctccagtggagacagccagtgccaacttttgtgcttattccaaatttcctgacagcctccccaccttttttccaacataatctcaaagagagattattctggatggcagaataaggctggtccccctaggtgtggcatccttgcttgcatagaggtggcaagagtgccaccataccaaacaggcctttttcagtttgttttgctggaagacctcagaagatatcagaagcaaaagcctctgttgtttgctatcctaaggttaggaagccaagcataaaaagctctcctccagatttcaccggcagtacttataaatttgatgaacccctctcttctcaaggcccccacgatattccaaaaccctggcctgccagagtagagccttttttcccatcttggaggctgtgaccctgagagcccctaccctcccccaggggactttgtgggcatggacgttgcacagtcaccctcggcccctcaagagcggtcacagcccagcaaatgagcgtcgttctcacgcacgtctctcaggcttaggctcggttgcataaaccttccccaattttatcctggcaaggaggaggacagatccttccggaacctttgcagatattgccaccaaaagtaaagccttcataaaagtttgcatttggggaggaaggagagcagatggtgaaaatcagatatcacttaagaattactcatttcagtttacaaaaaatctaggtcgttaaaggtgactgatagcttaagaagacagggaaagggcttcataacagagccggaaagtccaacagtacaacgacacgcatgatgccaaaaagtaaagcgttcctcactcattccactcagtgctccgtaactgattctccactggctcctgggctgcagcctcatgaagccagctgttcctcaactgaaaagagccctggaagccctgggcagcccactggcagggtctgaatatcatctgagcgaggccatcagaagctgtccccaggagtctgtgcttgggggtcagtcatcggaggtgcttactgcggtccttttccatggggctcgaagcttctgcattgaatcacgagctctggcctccagcctggtgcagaaccttccagggggcattggagtaaaagcttctgtagatgacagctaccccttttttggtccattttatagcagaggaaatttaggttcaaagaagttgagttgagagtcccaggagtaagaagcagtcaaggatccccccaggcctccggggccgcctgggctgcctggcctcacgacctggccccatgctcctgagatggagaagccccaggcccatgagcctgttgcccttggcaaagccacttcccttctgagtaaagtcagacgagcctgcccagtcccaagagactgcgattccgtaatcgccctcccctcgccttttgaggtcttgctggtaggtgcacccccttcaagccagcccaaggagccatgatttgagtcggtcttgccagatgtgtctggagagaatttaactccaagatcatcccccgtgcactctgaggggctgggacaggatgtggtgccctttgtgcccaggaggagaagcacccagtggggcggggtggggcgaggactttataaaggcgtcatttgctgcggccacccaggttggaacacagggaccacagggccccccgccttctgcaggaccaccccgctcatctgagggagacactgtagaaacacatctttgagcagtggcttctaatccaagaaacccaatagaagtcaaacgcagattcctagggcccaacccggacccactgcgtgggaatccctcagccggggccagaagcacgctttgaagacaccaacctcctcagcaagcctcttgcaaaccacatcctgcttctccagaagctgcagatccagaatgttcaaagaaagagccctccttgccttcctcttcttccacccctgccctctgcagactggggttctgtagacccccaaagtaagtccgccacaccggaaggaagtgagttacacaggggcccacatgggaaccgctttttgtcctgtcttggtgggaaaatggccacgaccccagcccaggctctgccacgccacaactccacgggcatagcctgggaggccgcagcgtgaactgtgactagggctgaggatggtgccatggtagaagtgagggcctggcacccggccaagtgcaggactcctcggcagtggggttgggagaagcagcctctgcaggcgaggccaggaaccaggacacaggaggagaagcacatctcagaggagggagctctgggaggagccagcagagtcctgcaaaggaggatgtgggggaaatggggtgaggccaaagtgggggctgctgaaggggctactgcacccgtgcgagcagggccaggaccaagctgcataggcagccagggacacagccgatgccacagacgtcaggaaccacgcaatgacacaggccacctttgaccgaccgttacccctggggcaaataccagtggggataacgggcaaggagaggtgctgtttactgtcttattgttgccagttcagcagcccacaggaaatggtgttagtcacagaaaaaaaaaatctgttttctatatttcactgtttccaagtaaagaaaaaagaaaactaatcttagcttaaaaaaaaaaaaaatggtgcgctgggcaccgaaaaataaccatcttcctaggcctgcgtttcccccacaccggggacttgtgctggaaagaaaagctgcgttggcagccaggagccggggaaactgtccagggaggcatcctctgcgatgaaggcggggcctcggcgtggcccgttccgcgctctgtccagccctggagaagccccaccctcaccgagctcgaaataccccctccctgagagccgagactcatggccgggaccccttggacagaagatgcggatgctaacccggcgcttccaccacagccccggcggcactggggagcgagcgcggccatcccgcgcgtaggtggtgtttctctgcaggcgccagtttcaccgcgggcgcccaggatcctcaacggttctgttgtgatgtgattcccctcttcgacttcgtcattcagcctcagtccctcagtccccaaataccgaaaggcagtcttttttttttttttttgagacggagtttcactcttgttgcccaggctggagtgcaatggtgcgatctcggttcactgcaacctccgtctccctggctcaagcgattctcccggctcagcctcccgagtagctgggattacaggcacctgccaccacgcccggctaattttttgtatttttagtagagacggggtttcaccatgttggccaggatggtctggaactcctgatctcaggtgatccacccgcctctgcctcccaaagtgctgggattacaggcgtgagccaccgcgcccggcctttttttcttttttcttttgaagttaatgaacttgaattttattttatttacagaatagcccccatgagatacttgaagacccggtgccaagcgacagtgttgaccccaggtggtcagtcctgcctggccccttccgagggatgcgccttcaccataaccatgtcacggacaggcgtgtgggcaagggggcatcgctgtatttttcacaactctttccactgaacacgacaatgacatttttcaccacccgtatgcatcaaccaaatgaaaagatgagcctgtgacattcccgtgcgtagagttacagcttttcttttcaaaacgaaccttcagtttggagccgaagcggaagcacgtggcgtctgacgtctccagggagacccgccgccctcgctgccgcctcaccgcgcttctgttttgcaggtaatcttcagcaagtactgcaactccagcgacatcatggacctgttctgcatcgccaccggcctgcctcggtgagtgcgcgctgcgggctctgcccggtgacgccacgcggcctcctcgccttttcgggatggctgggaggggcgggaagaggcgctgaagggcccgaggcaccggccttctacaaggggctcttcgaaatcaatcaatgcgcagaatcccgagggaggctcagccgccctccgggcctctctgcctccacaggtgatggctgtgtccacaaggaggaaaccgtcgggctgaattaaacagaaccgccctcctaagagtgtgggtttttctgccgggcgtggtgtctcacacctgtaatcccaacactttgagaggccgaggtgggcagatcacctgaggtcaggagttcgagaccagcctggccaacatggtgaaatcttgtctctactaaaaatacaaaaattagccgggcgtggtggcgagcacctgtcatcccagctgcttgggaggctgaggcaggagaatggcttgaaccctggaggcagaggttgtagtgagctgagatcatgccattgcactccagcctgggcaacagagcgagactccgcctcaaaataaataaataaataaaaaagagtgtgggttttttcctctcacttcttcattcacttttggagaaagcggggtggttgtgtgtgtttggtccccagccccacatcaccccataggtgccttttctacccagggggcttgacccagatcaacactgggtgaaaggctgacttcagaaatgggttgaaaagaccagtgatctgccttatcgagtcctcagagtcccacaggagttaatgtcctaaatcaacagtgtgttcgagccagtgaattttctaattatcagcaaactttccaaatgtaaagggtgagcaggagtagctttggctcaaggattaactttaaagttaggacggaggtggagaagggcaattgaagtttctcacagacaggtgagaaaagggagatgaaagtacacgtctgaaagtgcagcaaatggcagttttagccgcaaaaatagcccatggtctggggcatctttgggcaccatatatgaagcaatgtgccaataaataaatatatatacacagtattccgtatagcagccctgggatttgagtatcacctctatttcacagattttaacaatttacaactgaagatcagagattaacttggtcgaggtaacacatcttgcaagaggccccaaaacatgtgaggttggaggaagactcatcctaagcatttaaaactattttgtaggagagacttgcgcagttcagacggactcccaaaggcactggaagcggaaagacaaactatgagttcgtcatctgctgatataaatgttagttcctattttaccacagttttttaaaaaaaatctcccaactcaataaagtagacttgctccaattcccattttaaagtatttcagcatctacacgcacttaggattatacgcagctgtttaatttcatttacaatcggagtctcaatgccctggggacggcctcccacccttcccatcccaccacaccttggtcaggctggtcctgggactgtcctggttgtctcagggctctggccccatgtgtacattcaagtgtacatcccagagcacactatgggcgaaaacacgggcttgggtgtgttttccaggaacacgaccatctccctgctgaccaccgacgacgccatggtctccatcgaccccaccatgcccgcgaattcagaacggtaagaggctccggccgcgctcctcggggtgtgcctggcacttctctccatgacatgggaggctttctgtgattttgtaaatgtgctactgcagaaaggtgtgaattgacagcagagatggagagcgagggtaggagccagtgtgaaggaagcttgactcgtcgtgttcccctgcagaggagctgggcacgttccaagataacaattgcagccgtggctctgcacctgcttctcaacgggaggaggcattgtacagaggggaaactgaggcccaggagggtgagccaagagctgcagagccaggccccgggatccccacattaaccccaggaaggacctcgggagattccctacagagcccctggggacatttcgtgtttacccacttagggccggtctctgtgttcataaagtgatgcctgtgggagattctaagcacagaagggccagggacaagggaggcccaggaagtcaagaggagaggccggtgaaagcctccgtgaatgtctgtgaactaggtcaagccagcggtgtatggcccaggaaggacgcggagcaggggccctcaggtcagtgacctgcccctgttcctggtgacctggggagaccccagcagcctccactgctctttgtggttgggcaaagtggaacttagatttcctcatgaggcgagggagcaggtgagctgggggcggggcgtgcgacctcaggacccctctctggcgtcctctgttcctcccagagtggggctcactgtgcctccaagggactcagtagatgcgatggtacacttgtcaatctggtcatcagggtgtcctgcccaactgacccatggccagctctgagcccacaggagaaagtgcatgtcaggcagacccttgtgtcagtgaggtcccagtgggcgtggccagcaccgtccccctcagtgaggccccccagtggacgtggccagtgctgcctccctcagtgaggtctcagtggacatggccagagccgtccccctcagtgagcgctcagtagacatggccagtgccgtcctcagcgaggtccccgtgggtgtggccagcgccatccccctcagcgaggtcctcgtgggtgtggccagcaccatcccactcagcgaggtcccagtggacatggccagcgccgcccccctcagtgaggcttcagtgggcatggccagtgccgtccccctcagcgaggtcccagtggacgtgtccagagctgtcctggtcagccgtcctccctgtcaccttgaggcctcagccgagctcctctcatctggctgtgcccgtcagtctcccctcctgccctagccaggatgcccgtctcctgccccacacagtctggctctgactcttggcttccagactccccggaaggtgcagtgctaattggctccccagagactccagtaagcatcttgtcagcctcagcaccagctccagcctggggggtctcgctcagaagcaaagtcactgagtgacctgtcctcctgacacccacaagactaaaatgatctctcagaggggacctcacagaaaccagcaccttgtccatgccagctgggtatctgagagaaactgctttgttttcctgaagtcatttgaaacagcgtgcagagacatttaaactcggcgggaaataggagaagcccaccttgacccttctaattctctggccccaggtgccttattaacaagagacagtatcagacacaccagacaaaagccctcctgagcccaaagagcccaaatgtctggaagctctctgctgagatgccaaaatgcatgcctttctgataaagagacagagacagatgaggtaccatgatatggacatggcagtggacgtggacaggggagcagtggagatggagaagatggagacacacgcagttgaggatacaggcgaagaagatggagacacacgcggatgaggatacaggcgaagaagatggagacacacgcggatgaggatacaggtgaagaagatggagacacacgcggatgaggatacaggtgaagaaggtggagacagacgcggatgaggatacagatggagaagatggaggtagacgcgggtgaggatacaggtggagaagatggaggtagacgcgggtgaggatacaggtggagaagatggaggtagacgcggatgaggatacaggtggagaagatggaggtagacgcggatgaggacacaggtggagaagatggaggtagacgcggatgaggatacaggtggagaagatggggttagacgcggatgaggacacaggtggagaagaggaagttagacgcggatgaggatatagatagatgcatagggtgtggatctaaccgggtacaggtgatgcggaaacggatctagacagcgatgtggaaatggatctagacagcgatgtggatgtgatctagataatgtggctctggacgtagaaagagcttcagatgctctatctatgatcgtgggtgtggatataggcatagacatggtgaagaggagagaatagactctcctctctcatgacaaactgatcgtggctgggggcggcacgtgctgagatgtggctgtatttgtcccccaggctggtgcctgcgcctcctgcacccccgtctcctttgtgccttcttccattccctctgccactgttaggtccaggcctcactgagctctgacctccctgcctccagcctgcctctcccacacggctgccaggttcaacctggtaagacaccttcttctccatggtggcctcccaatctgggccctgccaacttatgcctcaccaacttctccaacttacccctgtacccacgcccgcaccatgcccagcccacaggatcctgccttcccagctctgcagaaccagcttctgcttatccgctaggtgccagcccagccacctgccttaagcaccatccacagtcacccagcccatcaccatcactagcaaagtcacccagacccatcaccatcaccatccagagtcacccagcccttcactatcaccatccaaagtcaccagccccatcaccatcactatccagagtcaccagccccatcaccatcaccattcaaagtcacccaccccgataccatcaccatccaaagtcacccagacctatcaccatcatcatccagagtcaccagccccttcaccatcaccatccaaagtcaccagcccctttaccatcaccatccagagtcacccagtcccatcgccatcaccatccagattcacccagacccatcaccatctccatctaaagtcacccagacccatcaccatcactatccaaagtcacgcatcctgtcactatcaccatccaaagtcaccaagccccttcaccatcaccatccaaagtcacccagtcctatcaccatcaccatcctaagttaccagcctttcaccatcaccatcaaagtcaccagccccatcatcgtcaccatcctatccaaagtcatccagtaccaccaccatccaaaatcacccagacacatcaccatcaccatccaaagccacctagcccatcaccatcactatccaaagtcatctagcaccatcaccatccaaagtcacccagacacatcaccatcaccatccaaagttaccagccccatcaccatcatcatccagagtcacccagatccatcaccatcaccatccaaagtcactcagcccatcaccatcactatccaaagtcaccagcctcttcaccatcactatcaccaggcccttcaccatcatccgaagtcacccagacccatgaccatcaccatccaaagtcttccagacccatcatcatcaccatttgaggtcacccagacccatcaccatcaccatccaaagtcacccagcccatcaccatcactatccaaagtgaccagcccctttaccatcactatccaaagtcacccagacccatcaccatcaccacccaaagtcacccagccccttcaccatctccatccaaagtcacccaacctgtcaccatcagcacatcactggcttcctcccctcagtgtgcgcctcagtctgaagtgatctcacttacttgtttgaggttctcactgctgctggccccgctggacggtcttctctcataggaaggaaatttcaccttgctctctgctggatttccagcccctaaacgaggcggggcatgctgggtgcaggatggaatgagttggggacggagtgaaccagtccagctcgtgcgtgcctccccctctgcactgcccagagcagttttttcttctggggacgcagggcaacgtctggagacatttctggatgtcaccaggggtaagggcctgctacttgtatctgatgggtggagacccgggatgccaatggcatcctacagcgcacaggacaggcccacaacaatgacacacgtggccggagacatcagcggtgctgaggcggagcacctggtgtctgaggtctcccctgtgctctgtcgctgtcctctcaccctcccccaatcttccaacctagtagttctcagacaactgcgtcagaatccgcagggggcttggtggagcacagagctcccctcagtctctggtttgtgacggaggtgggccccgagaatctttctgcagcagaaagccaggctttctgcaggttcccagtgaggaggacgaggctggcccgggacacgccactgatgctcttctgacccaggggcttttctctcccgcttccgtccctcttccctcgccggcaggtgacgttactggccttttcttttttggccctgcctcccccttggcttctcccctcttcctctcctccactcggtgcctggtgacatgcggccatcctcagagatgtgcttcggggcccgcacgccttgctcctcgcactcttcctgcaccggagccgcggtgcgaggcctcgggaatgctcaccgtttctctcccgccccccggccgcatgctgcagccattccctcaccacatgtccaggagggagccggcatcctttgctgactttcttgctgtgactatggtgctgcgtggaaaaggggccgtgggaaggctgggcaggtggctgctcagagccccacctgacacggtgacccacggggcctggaaattcactgccccgatttccacacaggtgcctgagctcctgcagagaatgcctgagagcgagacgcatgcccgtcaatttgtgctttcaggcgtcctaagcacacacgcctgctcttatttgaaccactccctgtaagctagttccactaaagagtggctttccaccctggctgcagattgcaaccacccaggaatctttttttttttttttttgagacggagtctggctctgtcgcccaggctggagtgcagtggcgcgatctcggctcactgcaagctctgccttccgggttcacgccattctcctgcctcagcctcccgagtagctgggactacaggcgcccgccaccacgcccagctaattttttgtgtttttagtagagacgggatgttagccaggatgatcacgatctcctgacctcgtgatccacctgcctcggccccccagagtgctgcgattacaggcgtgagccaccgcgtcctactttttttttttttttttttttgagacagagtttcactcttattgcccaggctgcagtgcaatggtgtgatctcagctcactgcaacctctgcctcccaggttccagggattctcctgcctcagcctcccaagtagctgggatcacaggcatgcacgaccacacctggctaattttgtatttttagtaaagatggggtttctccatgttggtcaggctggtctcaaactcctgacctcaggtgatccgcccacctcagcctcccaaagtgctgagattacaggcgtgagccaccatgcccagcccacccaggaatcttttaaaaggtaccagttgatgcccagacccctcaattaagtccagatttttaagagattttttttttttaaagctctgcaagtgattccagcacacagtctggggactaaccgctgatataaggtctggaaaatctaagaaaccactctaccccaccctctggtgaccagaagcttatgtctaccagacccagggccttcccttgctgaaacatgctgggtaaactctttgtttcttcctagcagacagcagccctctccctctagctcagaagctacgtcagcagttggttggttggttggttggtgggttggttgggttgtgtctctctttaacttcctccacttctgaagtcacctgcagtgacttggtgtggacttggtcacctcactgtccccccagcctcaggcccaggaaccatgtctttggaggaggctctcctgctggcagctggttgcatctggcatgcttggattcctgcaggtggctggttgcacctagcttgcttggattcttcccagattcacagccatagggtgggcgtttcatgaaatctccaaattccaagggctcttgacagaccacctccatcctgatcagaaggggtgatgccggttgcacggtctcttagagcttaaaactctagcttcttctctgctcctcattccaaactaaacaaattgttgcattggattattctttcaaaatactccttgccttaatgccatcctttagattttggtggctggctcctgttgtggaccgcatctcacaggtggacttcctggtttctgcctcctgttacccctcacagttatctctcccttgagtcctgctaccttccagaaaaataggctccaaacacactttcatcccatcactcccagcatggagttctccagtggcctgttggctacaggacactctccagccccccgcattgggatgtctggccccaatccaccataatgtacttgtctccaatctgctgagctgcatgaatgcccaccccagcccagcgggcactccccttctgcaaacctccaagcacattccccctctgcacactgccaatcttcctgtccccgccccaaatccaaaggcccctcctatggctggggatccactggcagctgcctaacccttcctatgctcctggacgtttggtgcaatctggagcacgctcaagccggcatttgaaataacctggaacacgtttacatcatggaaaatatggaaaataggctgattggcttccactcccttttagagctggcaagaaaaataattgatgactaaacaacctaacgaccaacaaatataaaaagtcatagcccaaccatgatcaaataaggctccagcattcctccttggagggactctgagccatctggtgtcattttcctttccaatccgggaacattctggagatcctgacatccagctaacatgggcgttgcttcctgacaaccctaccccttccattccccagtcactactgcttcaagatgcagtggaaggagataaatcagacacctcagtagcgtgagtgaaagtggggtgtgtggtgagacacatacagaggggagagggccagaggacggcgccgtgcgacacacaccattgctccttttgttcccggtttcggccaagttgtgccgcaggtgactctccaccggctgagctctgtgcatgcagggccagtattctcggccattctggcttagagaaaagctttctatattccagaatggctccaggcctcctcctcctcctattaaatgtgttttaaaagaggtcttagagcccaggcagttagatcttagaaaaagacaaatacagtagaagctggaggcaagcttatcctttccaaagagggagtgcttcctgtgttaatttgttattgagcatgatgaagattcagctccattgagactgagccaagagttgactcattcatgggagcaacataacgggttgtgagaagccaaaggattaagcatctgggagccaagactgatcttgagtggcccagaaatgcaacccaaggatcttgggcccaagggccaggaaggtttctgcagcctcctggagcattcacagaggctccctgtccgtccacttttccctctgttgctgatgtgatggctcctgccctcagcttaccagactcctcggagaggctggcctctgaattggttgaatgggcttgaagggggctggactccatttgggtggatgagcaggcccagtgcccctgtatgaggggaagttgtcttggtaagcctgtttttgtgtcaggtccccaggacaccttcctctgagtctcttgcgtgggagaagttgctggacacgcctctctggctctgtccccgccggcactgtgtgggatccatgctgttctccctccagcccttgccccacctcctggagcccttctctgcgcctggtcactacccgccccccacctccagcattaattttctagggacaaggggcaggggaaggaggagaagaaagagtccttgctgctcctcagagaagacacaggagaagaaagtcggagaggagtggggagccagggtggcaaagccccttcctgctgcccacgcaggtcctggctttctctccacccactgcaccatttccagggctgctctcatggtgggagccggagagacactgagaagaggaaggaaggaggatccaagaggagcccagcacacccggcttctctgctgcccaccctccactctgtcctcccagcccaggcccttcctaggcaaccctggcacgggtcctcactggccacactgaggccatcagcaaagcacctggcctcttcacgccttgggctctgggtctgtaaggcagtgaggctgaggttcctgggacagctgggcactgtggacttgcccagctgagcacaggcatcaggggctagaggggccctagtcccgatgacgaccgagtgccctctccacctggggagcttggaggactttgctctgcacttagggccacgcttcaagcccagtgcctcttatgaccaagtctctggggagaaatgagccctccagtgccaaatgacccaccactaaaaggccttttgaggcagggcctctcctgagcccacgcaggcacgtggtgggagatgagagggtgtgggctcacttcttgacattctgtgtgagtgaggtcattcatagggtgaggggagaatcaaggggacagagggccctctagtccccagcacttgggctcagctggcaagtccacagtgcccggctctcccgagaacctcagcctcaccgccctacagacaaagggcccaaagtgcagggaggtcagtgccacacaggttttattttttcacattattggtgtttaaaattgtaaagattttccacgttacctgtaaccatcaaaccacatgtattgcccccagttaatcaccatgaacagcttggtgtgtatacccctccatattcactgtgtttcttcttccaggaatgagctcattctctatacatcactccgtaacttgttgtttttacctagtaaggagtcatgggcgtcccaccaggtgaatacttgcatgtttgtcttcatcttcttaacaactacctgacactgcagtgtctcagtctgtctgaacttaaacagctagacattgagttctcagagtctggaggctgaaatccaagatgagggtgtgggcaggttctgttcctggggaggcctctcttcctggcttgcatacagctgccttctggctgtgccctcatgaggcagagcaagagacagctctggtgtctttggcccttgtaaggacaccaaccccatcccatgggccccaccctcaggaactcctccaaacccaatcacctcccaaggccctacctcctaatcttacccactggggatgagggcttcattatatgaatttggggtgggggtgcctcaacattcagaccccagcaccatgggaccactaatgtggcatcctgcctgtggagagatgcacagactgacccatccagacagcacagtggagcacgctctttcaacccacctgcacctgaccacagtgggcactcaggaagaaatgggtagagcgagtgaatgaatgaatgagcaagtcaaagacatgaacacatgacatctgactgtctccctgtgtgcttgtgtttcattctgatacatccctccctaaattcatctgctgagacaaaggattttaactggtgtttctacactgctttccccaagatgtggcaacccacaccccaccagcaacacctgtgatgtctgccgccctgtgtccttgtagcacctctcttaccaggtttccaaatgttgctaaactgctgggtcaaggaatagcatctgcctggggttagcctcacttgtgtggattttttcttactcctcttggccactgactgctcctggtctatgcctgttccattggctgcactgtccttccctgcctcttggccagaggctgtcgtgtgtcagcgacagaaacgttttggctgtcgtctgcacagccagtattctctccccatcacgctgggcctcgtgatgatggggggaggggggttgacatcacagagatcccagtgcattttcgacttcatcactgtcaccatcctctcttgttcatttgggggatacagccgccatcagctcaacagagcaaaagagagggaggccacctgcatccgccaggtgctgaaatgggtccaggcagctgccagagtctgacatttccaacttgatacagcacctgtgatcggcagtagtacccatgacaacatttatttaattgaccaaacacgaacattatagaggaaggtgatcatttaaatgatatacttgaaattcatctgagtaaggaagctgagaacagtcaaagaagctaatttaaaaaataaaaataaataaaaagaaccacctaatccgctgatttctaatcatgccgagtgcttatctctcctgccaggcatacagcgagcgccttgcagagtctcacagcggcactgtcttctcttttgcagcactccgtacaaagtgagacctgtggccatcaagcaactctccggtaaggccctgctgtcgttttttaaactaaaagaaggaaaaagaaatcttgagcttgcccctgtgataaaatatatactagttaagcatttgaatctaagcatttgaaatatatatgagttacctttgaagcatttaactatatgttagttaagcatttgaatctgcatttgaagccgatacaactgcagaatctgaaaccttgtactactgtaagggctctgcctttctaaccccagggagaatagcatctgcctggggttagcctcccttgtgtggattttttcttactccttttggccactgcctgttcctggtctatggccgttccattggctgcactgtctgtccctgcccctcggccagaggccatcccaaggactttgcagttgcagggcggcatccactctggtcttcctggcccagcacctgtcctccccgctccactgtgagttgccaaggcaggcatttgtggcccctgggatgccttggggtgcctcatacagttacttgggccgctgtgttacaatcctttttctttttctttttttttttttaaaaaaaaacggagtctggtcctgtcacccagggctggaatgcagtggcacgatctcggctcactgcaacctctgcctcccaagttcaagtgattctcctgcctcaccctcccaggtagctgggattacaggcgtgcaccaccaagcctgggtaattttttttgtatttttggtagagacgggattttgccatgttagccaggctggtctcgaactcctgacctcaggtgatccacctgtcttagcctcccaaagtgctaggattacaggcgtgagccacagcacccagcctagaatgccttttccatttgatttttatcacttttatttatgtgtgatttatacatcataaaatgccatttaagtgcctattttgatgacttttgaaaaatgtgtacacccttgtaaccatcaccaaaatcaagacatttgcaccacctagaaaagctctctcttgccccctccagtgtgtctcagtccacaacggacctgctttctgacatcatccatgagatttctttttgagagtttcatatataagaaattacatggtatatgtactctttttgactcaacataatgtttttgagatccatccatgtgctgtgtgtagagacagttcatgctttgtattgctaagtggtatcccatggtgtaggttgtaccacagggcgtcttccattcactgtggatggacatttgggttgttaccagtctgggggcttttaagaataaggctgctgtgagcattaaagtacaagtattggtggaaacgtatatttttatatatttcatttcacttggctaaatacctatgatacctataaccttgccaacttttttatacagttaaacatatacttaaccgtcttccctaagagtggatataagagtctgtagagtgttccccagtctgggtttgtctgacgtttctctcacgaccagcctgggtgtggtgggttttggaaggaatacgtggggcgcatgacagccaggtaggaccacgagcttctccactgcagagttactgttgatctccttccctgctcttctttgaaagcaagtcacgaagtccagcccacccaaacacaggagagaaaaaccgaggttcgttttctctacacagatattcatttctccagcaccatttgttgaaaagatgatcttttctcccactgaattaccatgacacctttgtggaaaatcgatgggccatgtatgtgtgagtctttttctggactccagatcctgtcgtgtgaatttacatgtcttaaaacaacagcacaccatcttgactaccgtagataaatagtaggtcttgaaatcaggtactctaagttatctctggtttcttttttctttttcaaaaatgttattgcttttattttcaaataaattttagaatcagtctatgaattgcttccaaaaaaacagtctgctaggattttgactgaagttgcattaaatatacagaccaatgtgggaagaattaatatcttaagaatgttgagtcttctggttcataaatatggtctatctccccattcatttgggtttcctttaatgtttctcaataatgtgttaccattgttaatatgaagtacttaataaatactgataaatacatcactatttcatgtatttaatggtactgcaaatggacttttttttcatttcaatttccggtagtttttagtttataggaattggcttctgtatgggaccttgctaaactcatttattaggtctagtacctttttgcagatttcctgtgattctatagatgattttcttatagtgctggtcttctgacaacaaattccttctgcttttgtctgaaaaagcttttctttgctgttttgcttttttttttttcaaagagagagagagataaagtctttgtctgttgcccaggctggagtgcagtgatgcggtcatagctcacgacagccttgacctcctaggctgaagcaatcctccctcctcagcctcccaagtagctgggactataggcacacaccaccatgcccggcgaattttttaagtttttatagggacaaggtcttacagtattgcccaggctggtctcaaactcctaaactcaagtaatcctccctccctgagattacagacgtgagccaccatgcccgactgacagtgtttttatttcatcttcattttgaaagggtattttcttgccatagagaattttagtttcacagttttccagcactgtgaatatgtcttctcattgtgttttagctagtacagcttctaatgagaagtctgtgatgtcttatctttgttcctctgtgtgcaatgtgtctttttccctctggcaacttaagatgttttctttatcactggtttgcaggaatttgattatgatggccttggtgtggttttcttttggtttaacctgcttggtgttcattgatcttcttggaactttgggatcatatttttcatgaaatttggaattttttctgctctcctctgtctctctcctttcccctgggaccctaactacctgaatgatagacagcctgagagcgtcccctgactcactcacactgtttctttctttccagacctttttttctgtttgctttatttttcttagacttttccgtgacgtcttccattgcactggtcttccctcctgcagtatctagtctgctgttaatctcgttcagtgaaattttcatttcagatattgcattcttcatccctaggaattatgtttccctcctttttcgtatctcccatttttacatctcccatttatgcctcattatgtttatatttcctgtaaatgcttatacctcattataattctgtttcatgccattgtctgctggtttcctcctctctgccatatccgagtctgtctctgttgattgatttatctcctgggtatgggtcatatttttctgattctcgtgaatctagtagatcttgatggaatgctgatcacaggaatgcacgctggttcatcatctggttttgtttctcccagttaagagtgttgggctttgccttggcaagcagttaagttacttgcacatcagtttgatgcctttgagccccacctttaagctttgtgagaatggctctagagggcccttaccccagggatagctcagtcctactaagacttgatccctttggggtctcccccaaactcctggctgatcaccaaattccactctggctgtttagagtgcaaatgtttggagatgagaatgaaagcgccagggccttgaaggtcgttgcaaggatgctggcttttatgctgagtggcgtgggcagctattagaaggctttcaggagaggagtgacatcatcacatttgtgttttaaatcttgctcagggcgctgggtcgagatcacgaaagggaagtggcagcaaaggtggaggcagagaaatccaagaggaagctatttttttgggaggaggcggaggcctaggccggggtgggggccatggaggtgatgaggagcgcaggttccagcaggttctaaaggaagagacaagctttttcctaagtggaagcgggatatagagacccatccggggcttctttgacctgagcactgagcgccacggcccagggagggggttgctgcgggtgggcttggtctgctcatcagacatcaggtgcatgaggagcaggcagagtcagggcaggcggcctctcggctgtcggctcccaatggatggtgttgaagtctgggacttggtgaggccagcagggagtgagtgagcaccagcaggaggggccaggcctgagccggacggagaccgaacccatccgtgggagaaggacgctggtgacaggacaccatcgggagcagaggggaagccataaagccctggaggcaggaagaggcaaaggctggccgggtgtgggtgaggtgctgcagggctctcgcaggccagcgaagacaggcgagatggctgtgctcagagttagaagagcatcgctgggagcagaggaaagagggatttctgtgtcacctggggacccatccaggaccagtgggagatggagttgggctcattgagggaaagaggtgaatggaaggaagttggaaccagctgtcctaaggccggagctgctcctccctggaggactccggcaaaggctgctggccttgggctgtgcgggcacccagtggctgagagatcgttgccctctgcagccctcctgcaacttggatcctaggagccacaaagaggcttgaaaaataatccatcctgagaaacacaaaggctcacattaaacttcgcatcgtaaagttttgagtaaaagaacaataaggggcatttctgctaaaggtgccaggatgagaaaaagcaggaaacagtgctgcaccgccaggctctgcaccgtctctacagagggctggggttggttcaggagcattcggcccaggctgtgatctcgagaaggtggtcagggcccaggctcccgccagccctcacggcagcacgaggctggtacgagacaggtgcttcaggtgtttgttgagagctgcacacacttctgctgggctgggcaagacttccctcttcagagaggatgagcggccacacggaaggccaggctgggtgtccctccgggccagccgaggagcgctgcgcttattccgcagtgaggagtcgctggctgtccaggggagctgcattttcctagcagcgacaacccctcccacatctccatagtcacatcctggctgggctaacaccacctttccccgcctctgggtgcgtggggaccccgctctccaaataggccagtgttccaggcttttctttaggagacaaagtcggtgtcaggtagaccccccccaccccaccaaacacacacacacacacacacacacacacacacacacagctttcctgagaaatgtgtttacagaacattttttccatttggggtttgtccttaggaattcttcactctctctatggcaacaaccttccctctcccgtccatcggccttgggtcccagagccactgagccgtggcccaaggtcaggagttagctctagcgacgccgccctgagttctggcctgtaagcaaccccaggtgcccttgtgaatcaacagaccacatttccagtggcagaaaaggaaatgggagctgtttctagactagcacaaggctcagggggtggggggtgggggcagggtgcagggaggccaacgccacacagccccacacccagcctttcccaaggccctgggttcctcactgattctcagcaggtttcagtaaatgcctctaacgggcccggtggaactgtgcaatgcagaaacaccccagggttttgctgttttgctacttaaatattcaggaaatagtaaagagaagagtattatcaaaaacgtgacttttcatagaaaagggagaataggccagccctggcctgggtccacaaccccagtgtgagctgcagagacttctctggagcggtgaacagctcctgccaggaaagagcatggcacagcctcgttctccagcgtagagtagaaggaatggccccgtccacgcgaaggtctgtgttcaccaagcatcttctgtagaaaaatgctctcttcgcctgatcatgggagggaatcaaatggatagagcatttatcccttttgtgactaaaataaaggtaatagcaactacaaaaaccacgacacaggcttctcagcatctttttataacgatagtgctgattttttggaaaatccttgagcctcaatcacttttatttgatgtaagccgctcaaactcaaagagtgttgttttccagattataaaacacagatctcagctgatggcggttgacgggtgtcccccgagtgccctcggctgccaggagctggcaggggagatgcctgtgatgaggattgggtgctgtgatcacagcacgcgggaaaaggacagggcctccctcagcgtggcagatcgcgtgggtccatgggtccgtgtgatctcatgaccgtatcaaggggattgtgtctttttgaccagagcgttagggaaagcgtgctgcagtcacacgccaggacggccccccacggcccaagtcctataggagagccaggggccatcacgattttcttaggcacagcagcagttgaaccgtgctgtcacacttaacccaagtgatgacagcctcttcaactaggacagtgctgtaggggtctggttctgcttgttctcccccacattcctgcctgccctaggacccaggacctgtctctagtcacacacaccctgttcagcctctgcatctggcccccgcggagacccacaccacattctactcccctggccagagaccgagggtgactcggaggcttccagttcccagcagctttattggcgttgctgtttccatagaaggacaataaaagggggccataaggaggcgcatccgcagagtgcgtgcttgagcttctgcaagccagaggaggccggcggccggcagggtgggcaggctggctggctgtgccccacaacatgcatgtggagaggttttgggggcagccatggaaccccggagctgcccccacatgagagttcccccaggtggtgaccaaatgcatttacagtccagccgcagtccagatgcagatgcgctgtaactgtagaacacacagcaaattctgaaggcttagtatgaaaaagaatataaaaatctcagtcatttttatattgatttcatgtttcctggttgagatgtcattgatataacataaagcccaccattttaaagtgtacaacctcagccaggcatggtggctcacgcctgtaatcccagcactctgggaggctgaggcgggcagatcacctgaggtcaggagtttgagaccagactggccaacatggtgaaaccctgtctctactaaaaatacaaaaattagccgggtgtggtggtgcacatctgtaatcctagctacttggaaggctgaggcaggagaatcgcttgaacctgggggtagaggttgcagcaagccgagatcacaccactgcactctagcctgggtgacacagtgagactctatctcaaaaaaaaaaaaattgtacaacctcagtcttttttagtgtcttcattttgttgtgcaaccatcaccactatttaattccagaacatttccatcaacccaaaaagaatccctgtacctgtgagcagtcccccctccatccccttcaccccccagcccctggcaggccctgttctctgtcctgtgcattctgacctttcacataacagaatccgtggcctttccagcctggcttcttccactttgcacacggtgttgcaggctccccgcgttgtggcatatgacagctctttgttcctttatggctggatgacgttccgttgcgtggctgcgtcctgtggctgcattgtgtggctgtgtcacgtggctacgtcacgtttggttgatccgttcatcagctgatggacatttgggctgtttccacaaaggctcttgtgaatgatgctgctgcaaacgtttgtgtgcaaatttttgtatgaaagatacatggtgaaatgaggtattttgaggtacattggattaaatgagatattaaaaatttttttaaagtctagccgtcttgaaggggagggcctgagagaagtgctgaaagttcacagcagaggataccggatgctgcgggtgtgccaggctggcctgtccaggaggtccctgcagcctgggtgggaggtcccttacccactaatgggtgcctcctccaacccctgagtccccctacctgaggacttcctctgtgtgtggcatacgcggctgccccgaggtcagtcctccccagtgaaagggagctgaaggacaggtgcccagcttctttgctccacagtgggaccaatctctgacatcatcaatgcagttgctcaaagggagctcagagcgaggagtcacctgtacatcaactcaccctctgggagctctcttcccttccatgcctcaatcccccactccctcccagggcttcctgggctggcctccaaatgcaccactagcccccagctccttgtctccggtgggcttttgaggatttccaactaagaaccttagactccaagacaggtcaagccccctggcatactcatttgtcatttggatgaaatagccttaggagagctacttaaccccactgaacttccatttccctgacaaaataggaattctaatgcataccttgcatggttcttggaggataaatgaagtaatttatgcaaaatgctgagcacagtgcctgccacttggtaagcgcccagtaaatggttgttatcattgaaaatgacttagggggcatttttgaatggctaaagttatgtctctctggaattgctgaattttaatagaacaggaatgcttcctaaggtctaaaacaaaaggcggaggactggctgtgtctgccctggaagccaagttaatgctggatgtctgcgcatagacatgttgctcatgagaaataataatgctccttaataatattgtctatttcagtgcaatttcagtctagaaggctttataagcaaagccacagtcatccttacttgcatttttttgaaacaaaaagactgcagtgtataaatgaaaaataaccatttctggaatggtgtgttcagacggattccccttagagtagcctagccaacaaagacagcagcagcccttagcgtgccactgtcagagatattgatggcaaacagtaatacggaagcctgcggaatggaagtgtcctgacggcagatttgagtaaaatggagatgatgacagctgaacattgctgcacggacctcaagactgcaaacgttaggactgccctccctgctcctaggcatttgtgagaaccaggccaacccatacccacccactgctgtgtcctgcctgactgcactgaaatgcacagatcctgtgggtgcagtttgatgagttttgttttgttttttgttgtttttgtttttgaggagtttcgctcttgttgccgaggctggagtgcagtggcgcgatctcggctcactgcaacttctgcctcctgggttcaagcaattatcctgcctcagcctcccgtgtagctgagattacaggcgcatgccaccatgcccagctaattttttgtatttttagtagagacaaggtttcaccatgttggccaggctgatctcgaactcctgacctcaggtgatccacctgcctcagcctcccaaagtgctgggattacaggcatgagccactgtgcccagccacagtttgatgagttttgatagaagtgcatgtgttagatctttcaggaatcaccacccaaaccagaaataccatttgacccagcaatgacgtttatatatatacccaaaggaatataaatcattctattataaagatatatctacatgtatgttcattgtagcactattcacaatagcaaagagatagtatcaatccaaatgcccatcaatgatagattggataaagaaaatgtggtacatatacaccatggaatactatgcagccataaaaaggaacaagatcatgtcctttgcagtgacatagacagagctggaagccattatcctcagcaaattaatgcaggaacagaaaaccaaacaccacatgttctcacttataagtgggagctggacaatgagaacacatggacacagggaggggaataacacacactggggcctgttgggagggttgggggagggagagcatcaggataaatagctaatgcatgctgggcttaatacctaggtgatgggttgacaggtgcagcaaaccaccatgacacacgtttacctgtgtaacatccctgcatgtcctgcacatgtatcccagaacttaaaattaaattaaattttttaaaagtgcacgtgcatgtaaccgccaccacaatcaagacagaggacatttccatcaccctagaaaaatgtccccgtacccccttcaaggcagtcctcactgtggagtgctctgcctatttttgagtttcacggagttgaaatcatacagcacgagctctttgtgtctggactctttcactcaacatcatttttgtttgtttgtttgtgtgtgtgtgcgtttgttttttgagacagggtctcacgcctgttgcccaggctggggtgtgaggcacaatcatggctcactgcagcctcgacctcctgggctcaggtgatcctcccacctcagcctccgagtagagacatgttgcccacgctggtgtcgaactcctgggctaaagcaatccgcatcatgatgtttgtaagatccattcgtgcagttatttccttttgcactgctgagcactgcatgcctcgctcattcattcttctgtggagggacatttgggtcatttccagtttagggttcggctactagaattattgtacaagtcttattgtgggcatccttgtccatgatcttgggtccacctaggagttaaatggctggctcatatgctgtgtttgtttaacttaagacttacttgttaagtgtaagaaactgccaagctgggccgggcacagtggctcacgcctgtaatcccagcactttgggaggccgaggcgggcggatcacttgaggtcaggagttcgagaccagcctggccaacatggcaaaaccccatctctacaaaaagtgcaaaaaattagcagggtgtggtggtgtgtgcctgtagtcccagctactcaggaggctgaggcaggagaatctcttgaacctgggaggaggaggttgcagtgagcagaggttgcgccactgcactccagtctgggcgacagagcgagactccatctcaaaaaaaaaaaaaaaagaaagaaaaaaagaaactgccaagctgttctaccaagaggttgtaccattccacattcccaccagcagcatctgagtgatccagctgttccacatccctgcaacactaagcattctctgcttacattttagacattcgagtaggtgtaagagcaatcctatcttcttatagttttaatttgcatttccaagtaacttaatgatgttgaacatgttgctatgtcttattgactatttgaatgtcatattttgtgtagtgtctgttcaacaatactttgctcaggccaggtccggtggctcacgcctgtaatcctagctctttggaaggccaaggtgggtggattacctgcggtcaagagttcgagaccagcctgaccaacatggtgaaacctcctctctactaaaaatacaaaaattagctgggtgtggtggcaggtgcctgtaatcccaggtactcgagaggctgaggcaggagaatcgcttgaacccaggaggtggatgttgcagtaagctgagatcgcgccttgcactccagcctgggtgacagagcaaaagctgcatctcaaaaaaaatatgtaaaaaggattttgctcattttttaagctggcttgtattatttttgtcactggtttgtaggaaactctacataagctaggatataattcatttgtcagatatatgtggcaaacatttttcccaatttgtgatttgcctttttcgttttcttaatgaggtcatttgatgagcagaggtttttaatttggtgaattccatccaatgtaacaagtttttctgttgtggtcagtacttcttgtgtcttctctaataagttttgtttttttttttttttgagacaaggtttcttgttgcccaggctggggtgcagctgtgcgataagctcactgcaacctccgcctcccgggttcaagtgattctcctgcctcaggctcccgagtaactaggattacaggcgtttgccaccacgcctggctaatttttttgtatttttagtagagatggggtttcaccatgttggccaggctggtcttgaactcctgacctcatgatccacccacctcggcctcccaaagtgctgagccaccgcaccaggccccccaaattgctaggattacaggagtgagccaccatgcctggccctaataattttttttatcccaaggtcatggagatacattttagaagatttagagttatagctgttatgttttttcttaatttaaagaaaatttttaacaacccaatctgttgagatgttatgttttaatctgtcattcatttcaagttaatgttgtgtgtgttgtgaagtagagactgccattcattttcttccccacgctgacacccagctgttactgcaccacttgttaaaaagactccttttcccgctgaatccatggctcctttgttgaaagttaatggtatctctgtgtttgggcctctcgctgaactctgttctgcttcattgatctatttgtctatcctcacaccaacaccacactggctacgttactgtgccctggaatcaggtactctaagttctccatgtgttcttcctctgcatttgttttgactgtataggttcttttcttttccctacaaattttaggatcaacttgtcaatttcaaaaaaaaaagccatctatgactttgattactattttatttactatataatttggggagggtagtgtcttaaccatactgagtcttccaacccatgaacatgatacatccctccacttatttaggtctcatttaacttctcaaaaggttatggctttcaagataaaggtccttcatgtcttcggttaactttactccaaagtgttttctgttttctggttttattgtgaataagatttcattaattttccaattgtttgctgctagtttataaaaatataatagatttttggatgttggcgttggatcctgtgaatttgcttaattcattggttagttctagttgttgttttataggttcctataattgtccacagagacaatcatgacatctaagaataatgacagttttaattattgcattccaatttttggcttttatttcttttacttgtcttgttgtactagttgaaactgcaatacagttaaataaaagtgagagcagacgtcctcgccttgttcccaatcttagaggagatgccttcggtctctcaccattacatacgatgttagccacagatttttttgtggatgcctttcataaggttggaagtccccgtctaatgttagttttctgagagttttttgtctcatgttctttgacaaaattctttgttaacttttatcaaatgttctctctacagctactgaggtgggttgaggaggtgtcctctttttccttgttttctaatggttttgtcccataaagaggtattggattttgttccagtacctttctgcatctatgggatgagcatacatatggtttttctgctttattctattaagataatgaataatactgattgattttcaaatgttaaaaccactttgctttcctagggtaaatgcacttatatttccaggaaatgttcctaggaaatttcctggggtaaactcacttgtatttccaggaaatatttccaggaaaatacttgggaataaatgtaacaaagtatatgtaggccctctccctggtgtgtttgctttttatgtattgacttgtttttgtttttgtttttgttttgagacagtgtcgctctgtcacccaggctggagtgcagtgctgccatctcggctcactgcaacctccgcctccaggcttcaagtgattctcctgcctcagcctcccgggtagctgggattacaggtgtgcaccaccacaccagataatttttgtatttttagtagagacagggtttcaccatgttggtcagggtggtctcgaactcctgacctcaggtgatccacccgcctcagcctcccaaagtgctgggattacaggcgtgagccacagcacctggccgcttttcatgtattgctagatttgatttcctaacaattcgttaagaatgtggctgtctatgcttaaatgggatattgatttgtaattttttttcttgcagtgtctttgtcatgttttgatattggccctatagtggcctcataaaacacattgggaagtttactttcttctgtattttctgaaagattttatgtaattttggtattattttgtcctatgtccctttacacttaatgtatttgggttttttgtgtgtgtctttttaatagttaataacaatgtattttattcttgaaaatcactgagagtacattttgcattctcaccacaaaaaaaaactatgtggcataatgtgtatgttaattcacttgatttagccattctacaatgtatatatttcaaaacatcatcttgaccatgggaaatgtatctaatttttgtcaatttgttaaaactttttttttaattccaatttttttttttttgaggtggagtctcgctttgttgcccaggctggagtgcatgaccatgggaaatgtatctaatttttgtcaatttgttaaaactttttttttcattccaattttttttttttttttttttgagatggagtctcactttgtcgcccaggctggagtgcagtggtgcaatcttggctcactgcaagctccacctcccgggttcacgccattctcctgcctcagcctcccaagtagctgggactacaggcgcccaccaccgtgcctggctaacgtttgtatttttagtagagatggggtttcactgcattagccaggatggtctcgctctcctgacctcatgatccacctgccttgacctcccaaagtgctgggattacaggtgtgagccaccacgcccagccccaacttttattttacgtacagatctaaacgtatcacatgcaggtttgttatgtggtgtgtcgcacccagatggtgagcagagcccccaagtctttgttgatatggttggggttagctctcccagtctttgttcatatggttggggttggctctaccagtctttgttcatatggttggggttagctctaccagtctttattgatatggttgaggttagctctaccagtctttgtcgatatggttggggttagctctaccagtctttgttgatatggttggggttagctctaccagtctttgttgatatggttggggttagctctaccagtctttgttgattagctctcccagtctttgttgatatggttggggttagctctaccagtctttgttcatatggttggggttagctctaccagtctttgttgatatggttgaggttagctctaccagtctttgttgatatggttggggttagctctcccagtctttgttgatatggttggggttagctctaccagtctttgttcatatggttggggttagctctaccagtctttgttgatatggttgaggttagctctaccagtctttgttgatatggttggggttagctctacctgtctttgttcatatggttggggttagctctaccagcctttgttcatatggttggggttagctctaccacgttgctatttgctgtttcttgatcttgggttttgtttttctgttcctccttttctgccttctcctgtgttaattgaataaatttttgttttccattttattccttctgctgactctttagctgtctctttttgcattatttttcctcggctgttgtaagtgttacaatatgcatctttacttttttttttttttttttttacaattgatagactttgttttttagattcacggcaaaattgagtgaaaagtgtggagctcccacatgttccccccacacacagacattcagcctctgccaccgtcaacgtcctgcatcagattgtatattggttacagccgggcgcactggctcacgcctgtaatcacagcactttgagaggccaaggcaggcagatcactggaggtcaggagttcaagaccagactggccaacatggtgaaaccctgtctctactaaaaatataaaaattagccaggcgtcatggcgcacacctgtaatgccaactacttggcaggggaatcgcttgaatccggaaggcggaggttgcagtgagctgagattgcatcactgcactccagcctgggcgacagagagagactctgtctccagacaaaagaaaaaaaaaagactgtacattggttacaatcagtgaaccaacattgacatatccttatcagccaaagtctatattccacctcagaattcactctcagggctgtacattccctgggtttggacaaatatatgatgacctgtgtgtcccatcccagtctcagacagaatcggttctctcagggctgtacattccctgggtttggacaaatatatgatgacctgtgtgtcccatcccagtctcagacagaatcggttcactgccttcaaaaccccctgtgcgccacctattcatccctcccgccccaagccccagatctttttactgtctccatagtttggccttttccagaatgtcacatagttggagtcatacagaataaagcctcttcaggttttctttcacttactaatatgtctttaagattcttttatgccttttcccggcatcttagcattgaagcatattccatggtctgtatgtatcacagtttatttgcccactcacctattgaagagcatcttggttgcttccaggtttgggcagttatgaataaagctgccataaatatttgtgcacaagtttttgtgtgcacataagattttaacacatttggataaataccaagaagcacaattgctggatcttttggtaacagcatgtttagttttgtaagaagctgccaaacggtcttccaaagtgactgggccattttgcattcccagcagcaatgaacgagcattcctgccgctccacatcctccccagcttttgtgtttcagtgtcttggattttcaccactctgataggtgtattgcagtatcttcttcttgttttattttgcaattccctagtgacatatcatgataagcatcttctcatatgcctgcttgccatctgcatgtcttctttgaggtgtctgttcatatcttttggccacttttaatcatcctgaacttttcacaatctatttagaattaatactgtaccgcctcacataaaaaataaggacactgcagctatataagtctacttactcccctctcccaccacctttgagttattgtgtcatatgttttatatctgcatacattttaagccccataatacaatattataatttcctttttttttttttttttttttgagacggagtctcactctcttgcccaggctggagtgcagtagtgagatctcagctcactgcaacctccacctcctaggttcaagcgattctcctgcctcagcctcccgagtagctgggattacagatgtgtgccgccacgcccggctaattttttgtatttttagtagagacggggtttcatcatcttggtcagactggtctcgaactcctgacctcaagtgatccacccgcctcagcctcccaaagtgctgggattataggcgtgattataggccactgtgcctggcctataatttcttatttaaacagctagttgttttctgaagaaattatgaaaataaacttccagatagttttttaatagttgcctatatatttgccatttctgatgtttttatttcttctcaacttccaacttatattatatcccttcactctaaagcatttcttttttcttttaatgtttcttgcagtgcatatctgctagtaactaattctctcagcttttgctgattggaacatgccttttttttttttttttttttttgaaatgatgtcttgctctgtcgcccaggttggagtgtacaatcagttcactgcaacctccgcctcctaggttcaagcaattctcctgcctcagcctcccaagtacctgggattacaggcgcccaccaccatgcccacccaggcactccacccaggaggtggaggttgcagtgaactgagatctcactactgcactccagcctgggcaagagagtgagactccatctcaaaaaaaaaaaaatttttttgtatttttagtagagacgaggtttcaccatgttggccaggttggtctcgaactcctgacctcaggtgatccacccacctcggcctcccaaagtgctgggattacaggcgtgaaccaccgtgcccaggcaaggaacatgcctttattttgccttcattgtgaaggatgagttttcatggtgtggaattctgcattcacagtttgttttcttcaagaagcttaaagatgttgactcactttctttctggcctccattgtttctgatgagaagtcagcttaatttgatcattattcctctgtatgaagtgtgtctttcttctctggctgctttctttggggtttgtttgtttgtttgtttgttttgttttgtttttgagatgaagtttttgctctgttgcccaggctagagtgcagtggtgcgatctcggctcactgcaacctccgcctcctgattctcctgcctcagcctccaagtagctgggattgcaggtgcccgccaccacgcccaactaatttttagtagagacaggatttcaccatgttggccaggctggtctcgaactcttgacctcaggtgatccacccacctcgggctcccaaagtgctaggattacaggcgtgagccactgtgcccaggcctctggctgttttcaagctgttgatttctttcctttatctttaggtttcagcagttggactatgatgtgcttcagtctcattttcttcttatttatccttcttcatgttcattgagcttccatggactatgaatttaccttttcagcaaatttgcaaaattgtcagccattacgtgttatatgtgccattctttctcactaatgacctgtatgttagaaagtttgctgttgtctttcaagtgactgcagctttgcggttttttataatcttttttttctttgcccttcaaattgggtaatttctgttgacctgtccttgatttccctgactcttccactgactccagacttctgtaagttgatccatgaagtttttttttgtttaggatattatattttaaaattctaaaatttgcacttgactcttgttcatagatttgtctctcgagactcccctctgtttacgatttactgacgccgcttttgtttcggtgtttgcacgtacctgcaattgctgcattaaagtctcgtttgctcattttggcatctgagccggcaagcgtccagggtgtctgagggatgattttctcttggccatgggtcacattttcctatttctttgcatgtctattttttattgtagactaagattatgaataacacctaggagagacattggattttgttatcatcctctgaagagtgttaattttgctccagcagtcagttccgttactcactgatcatctgaacttcgtgcagcctggttttatgctttgttggggtagatctctagactgacccttctgtggttttagtaggaagcctgaggtatttatcaagcctctctaactcgactacatttaaactccaaactttgtctcctccacagcaggagctgaaacctctgccacactaggcccacaaacatgcgtcattcagggatccaccaaggaacagggtagtttatacagaatttgggtcccactgccatggcttcctcctttgggaactctcctttccatttccatcctctctgacaacctaaaactgtgtcatctgacgcttcaacctggaactttctgcttaagttttagccatctacattataagggcactttatagcaagaaatagaatattattccattctaggccaagtacagtggctcacacctgacatctcagcactttgggaggccgaggtgggtggatcaactgaggtcaggagtttgaaaccagcctggccaacatggtgaaatcctgtctcttctaaaaaaaattttgaaaaaattagccgggtgtggtggtgcatacctgtaatcccagctactcaggagctgaggcaggagaatcccttgaacctgggagccagaggttgcagtgagccgagatggcgccactgccctccagcctgggtgacagagtgagagtctgtctcaaaaaaaaaaaaaaaaaaaaaagaaatattccttcgttcttttataggagcatagtacttcattttgtagatgtactattgtgtatcctactgatagatacttgtgttgcttccagtcttgtttttacagcgatcagatggttcttcttaatttctcttgctacaaatgttgctgctgtgtacaacctgttaaagtccacagatggaataaaagctttggtttgcaaaaatgactcaatctttacaaacattctgtcatttgtaccataatcaattagtttattggatcaccgaattgcctgacagaatccttcctggaactagtctatggggtcatttggcatagagtcaaagcctcagacacgatgagccagagttgatttcctttggcttcacataattaaactttcccagaggattatcaggttacagtgacacacacacaggctgtcagataatggacaaagtcccagcagcgtgtacaaccagctggtggctcccaaattcaaattcccccagcggcatccgttcggttattcgtacccacaccctcccttagaagtttacccctccgccaggcgcagtgactcacgcctgtaatcccagcactttgggaggccaaggcgggcggatcacctgaggttgggagttcgagaccagcctgaccaacatggagaaaccccgtctctactaaaaatacaaaaattagccgggcatggtcacgcatgcctgtaatcccagctactcgggaggctgaggcaggagaatcgcttgaacctgggaggcggaggttgcggtgagccgagatcatgccattgcactccagcctgggcaacaagagcaaaactccatctcaataaataaataaataagttcaccccactacgggcaagaagccacacagaaagaaaaataaaataggtatctctggggttttctgaagggaaagtaagtgcagctctgtcccgtctttgcagctctaaataggaacatggtggagtagggcaggtcgggcttgacgatgtcatgacttggcctctctcagtgtcacgcagcccctgcaggttataaggaggattgagctggccaggcacagtggctcatacctgtaatcccagcactttgggaggccgaggtgggcggatcacctgaggtcgggagttcgagaccagcctggccaacgtggagaaaccccatgtctactaaaaatacaaaattagcccggcgtggtggtgcatgtctgttaacccagctgctcgggaggctgaggcaggagaattgcttgaacccgggaggcggaggttgcagtgagctgagatttcgccattgcattccagcctgggtaacaagagcgaaactccgtctcaaaaaaaaaaagaaggatagagctaacatgcatgaaccacctagaacagcacccagagcatagtaacagctccttgcagatgttacagtaccttgatctatacaacagtaaagggaaatgcatgctagctgccccagatgctgccagcttcacaggcatttttctgcctgcaaactaatcctaaggaagagaggagggcagggggagaaattgcacccagtcaaatgtaaacgatacaaaatgtgaaattcccctctctgaaaatgaaagggaaaaaactcgattcaatgcctgcccctgaggtgaacctgaaatgacaaggcagacactctctagaacttcacgtttggccaccagggtcttcggttgattttcctttcttcgtcatatctgagtggctgaaacgccagtgatctgggatagtcctttggctgctgatagacttatgcaatcccttggcaggcaggacaggccagaggaagggctcctgtgcctttaaggtcactgttaatcatgtaactttattgtgttcctgggctataaaggaaatgtcgtccttgatctgaatgtctgttttatgatgtccataaacagtgaattgccagtgactgtaccctgagtgagaacatcctcagccagttgaatagttcaagggcagttgcaggggtcaggagagagcaaaagtgggacagaagatgagtttgcttcccaggaagagagacagtgccaccccacccctcgctgacagggaagccttccagcccttcctccaaagagccttggctctcaggggttggaggttggacaagagcagaaataaaggcaccctgctcccaccccccacaatcttccggacgtctagagtgcttatctctttgggggcaagtaatgtgaattattttccctaatgcaaaaataaaaaataagagaccccttttacccttttctgaaaggatagcagaggtatttttcttttcttttttttttttgagatggaatcttgctctgtcaccaggctggagtgcagtggcacaatctcagctcactgcaacctccgactccctggttcaagtgattctcctgcctcagcctcccgagtagctgggattacaggcacgtaccaccatgcccagctaatttttttgtatttttagtagagacggagtttcaccatgttggccaggatggtcttgaacttctgacctcatgatccgcccacctcagcctccagaagtgctgagattacaggcgtgagccaccatgcccgtccagcagaggtattttttctaatacttgagaagtgtctgctaagtatgtattcaccggagggtgctcagcacctcgccctgttgctctgggttgggactaacaaggtgaaacatggctcattgcatcatattaatagcatgcaaatctaagcccagtgatgccgtgcaatggctacgatcaagggcaatagaatggatcgtgcatgagctcccaggccacacacacacgcccttgtgatgtattattccctctactcttgcaggtcggtgcttgggatgctagtgcccaagctgatgttcctaggtcacctccctcaatgcatgggtctaggggccagcatgttctattgctagggccatgtgtgcattcgtttgcctaggggagaaaagtacacattcccatcagctcaggtgcgtggaggacggaagaactgctgttgctgctagtattctcttcagcacaagataaaaaggagataggcaaatcagctggctggccaatcaaattaacttattgttacactaatttttagaatcagaattatgggtcaggctgtgctagcaatcagtgaaatcaaatttcatgtcattctgcactgggtagactcaggatttgcctgaaacaagtaaacaattcctggaagaagtgggcgaggcagaggcttgaactatccactcagaccaaggaggagtcaggcaatggcttctgggcatcgtgtggggtgggggcagcccctgccctggacacccgtgaacacggaggcagccgtgtgaacaccatgaggcagggtgtccatcctgccacccacacagctgcgtcctgcccaggaatgaggctggcagcccataggcccctccttggtccctctagaggtttgcttcattccagtacccttggttctgtcaagtgggcagggcctgggcccctctgctgcaaacccatggcccaaagcggacctgatccggcagcatctaaaaacaggacccggagaatctgctggactccaggattgccctggaacaaacctaaagtctcctatgacatgcaaacaattctgccagccccggccagcattccctgcatgtgcttatcaagtgaggaggccagcaggacttagcacccaggtgagcacacttcattgagtccaggtgtgtgcagatgagaagcagccaggagttgaggctgaagaggagcctacctaaacctgtcattacaactgattgatccttggtgtagtcaaatcttctgcctttatgaaagtcatggtatctagaggtaaatccccatcagcttggagcagcaccatgaaatccactctagcatgcagactcgggggcacttttagatattctattggttgttcttgggggacagcttcctttggagaacatgtgagttgtctgtgaatatcagcttgctctccctaggtttccatcacatggatcagcgagagttaatgctgactccccctccctcgggggcttatttgcaatctcccgatttgctcaaaaacttccaggtccagagggaccctaaagaccctgtcatgtccccctgtgaattaccagcatcccaggccattgctgggttttcttaaaactattaagacactatcaacgtgaaatgacttgaataggctttaatttttaaaattcattatacgtcctgcagcatttaggaaaaagagggaggtgtcacacataatatcaaatttggctgacacaaggtgattttgccacgaaggttgggaaggatgaacatttgcaattgaaaactgtttgttgcccccagaatccagcggtttcaggctctctgaggattccagaggtgctagagggggtaaggccacattcaggtggtgcaggtgggattcaccccttcacagcctggaggtggtgcccggagcgcaccctgtcaccccaaggatgatgacaccccagggaaggtggtggaagcaggaaggggaggtcagaggaaaactggggccctcagtgggcatccgtgatgcggaaacactaataatgccaacagcaatagcagaggcaggcagggcttacgtggccagggctgggctggtgctgtcctgagcacttgacatgcatgaaatcacagttgttttaagttctgaactcccctgggaggaaactgtggccacagcaggaattccaatgattctagggtcaggagaggaggcacccacttcctgatcagggctctgtttgtggatgcgtgggtgtggttggcctttgtgcacactggtggttttgcttctttcccccagcaaaagaatgcagattttgcattatctaaagaggcggttccgtgagcccactgtgctgagtcacatatattccatcggtgtaagtaccaccacctgggcagtgcccctggagtgttctcactgggagcgcagctttgtgtctgtacccttcctgagaatagctgacatgctggcctgggtggcgcattggccgaggtgtggctatgacagaccaggataccagcatctgccccagcactgaactgagcacaccacagaaggtgtggacagagtggcatgaaacatgacagctgcttgtgctcgaaattagatgtagccacacaaatcctgtcgtgctcaaagggttccatctccaaagtccaaaggaaaactcttccttaactgttattccattctgtctatacatttcttattttgaagcaaggataggttcacacgctgctgtaatgatgcatgcagagaaagcccactcatggcccggtttctcccagtggtgacatcttgcaaaactctagcacaatgtcacagcctggcattgaccgtgacacggtccagatccggaacatggcgtcccccacaaggatcccacctgccgctctttaatagccacgctgcttcccttccattccccactggatccctgtcccctggcaaccaagaggtctctctcttttttgtttttgtttttgttttttttttgagacagagtttcgctcttgttgcccaggctggagtgcaatggcacaatctcggctcaccccacaacctccgcctccagggttcaagcgattctcctgcctcagtctcctgagtaggtgtgattacaggcatgcaccatcatgcctggctaattttgtattttcagtacagacggggtttctccatgttggtcaggctggtctcgaactcctgacctctggtgatccacccacctcagcctcccatagtgctgggattacaggcatgatccaccatgcccggcctctggtctctatttgtatgatgttgtcaattctgtaacgttctacacatgtaatcatgcagtaggtgactttgggattggcgccttccacccagcacaaccccctggcatccatccgggttgtcgcctatatccgtggttcattcccttctttctgagtcatactccgcggtatggatggaccacggttggttcaaccattctcccttgaaaggcatctgcatcgtttgcatttgggactactacaaatacatccgccaggaacatgtggacaggcctttgtgtgaacatcagttctccgcgtacatcatctctctgccctggtgcttgcatctttagttggttttttctgtcttttgaagaacctaccagactgttttcagaatgactgtaccatttttcattcccaccagccacgagtgagtgagccgtgtttccacgggggttggcattattttgtatcccagccattttgataggtgtgcagtggtgtctcactgtggttgtaactggcatttcctaatggccgagtggctctcagcatctcttcatgggcttctttccatctgtgactttctccagtacccatctgctcatctcttgcccgctttcaagttggctggttttgttttctaccattgagttttgaccattctttatacatgctatctgcaagtctttgtcagatacgtgtcttgcaaatattttctgccacaccgtagcttgtcttgtcatcctcttaccaggatctttctctgagcgaaaattttcattttgatgaagtccagtctatccatttttctttttctggtttgtgtttttgctgtcaagtctaagaactccccaccttaccgaagaccctgaagatttctcctatcttctctctgtgttttatagtttcatgttttacatctgtggtccactttgcattgatttttatataaactgaattctaggtcaaggctctttttcttgttggcctgcggatatctaatttttccaacactactgaaacactatttccaacactattactgaatgccaccacgcctggccatatatatatatatatatatatatatatatatttttttttttttttttgtagagatggagatctctctttgttccccggctggtctcaaactcctgggctcaagcaatcctccaacctcgacctcccaaagtgctgggattacaggcatgcgccactgtgtgtggctggtattttatttataatttcagtgtctacatggtcattgctaagctttcttttctctgttgaattgcttttacatctgggtcaaaaatcagttgggcgtatttgtatggacatggtcataggccctctgtttctttccattgctctacctgtctgtctttctgccagtacctcacagtcttgattaccgaaattatgtcataagtctcaaaaataagataggctgattcctctcattttgtctgttgtttttcaaaattgtttttattcttgtgaatcctttccctatctaaatgttagaataatctctatttctacaaaaaaaaaaaaaaaaaaaaaaagtcttgctaggctttcaatgggaattgtgtaaaacttgtttacctatgtggggagaatttactatgttgagtcttccaacccattaacatggtcagtcttgccatttgtttatatcttctttgatttctttcatgaatgttttgtagttttcaacatacaacttctgcatatgttttgtcagtttgacacctaggggcatttttgagtgactgtaaatggtactggtgtttgtttgtttgtttttgagacagggtctttgtccctgaggctggagtgcagtggcatgatcgtggctcactacagcctcaacctcccaagctcaagcaatcctcccacctcagcctcctgagtagctggaaccacaggcacatgccaccacgcctggctattttttttttttttttttttttttgtagagatggagatctctctttgttccccaggctggtctcaaactcctgggctcaagcaaccctccaacctcgacctcccaaagtgctgggattacaggcatgtgccactatgtgtggctggtattttatttataatttcagtgtctacatgatcattgctagtatatacaattgtagtaaatacaattgaattttgtatgctttccaccctgcaaacttgctaaactcgcttcttagttctaggagggttgtgtttttttgttgttgttgtttgtagattcattggggttttctatgtagacaacatgtcattggcaaacaaggacagttttctttcttcctttctaatctgtttgccttttatttccttctcttgcctattgcactggctaggactcccagcactatgttaattagcagcagtgagagcagacagctttgccttgtgacagtcttagacaccaagcactgagtttttcaccattaagtacagttggctcttctgtatctgtgtgttccatatccatatatccaaccaaccgctgatcagaaatgttttaaaaacaagaaaaacaatacaaattagtaaacagtacagtatagcaactctttacataacatttacattgtattaggtattctaagtaatctagagatgatgtagcgtgtacgggaggatgtgcataggttatatgcaaatactataccatcttatataaggaatttgagcatccttggattttggcatccttgtggggagtcctggaaccaatccctcagagacaccaaggaacaactgtataatattggctgtaaggttatggttgatgcttttaatcaacttgaagaagttctcctccattcctaattttatgagagttttctcatgaacatgtgttgaattttgtcagatgttttttatgaattagttaatatgatcatgtaatttttcttctttagcctgttgattggagactacattgattggttcccaaatattgagccaaccttatatccccagaataaaccccactaaatcttgatatgcaattatttttatctattactgaattctacttgctatttcattagtgatttttgtatctatattcatgagggatgttggcatgtagttttctttttgttgtttttccttgtctgcatttggtatcagggtaataccaacttcataaaatgaatggggcccaggtgcagtggctcacacctgtaatcccagcactttgggaggccaaggcaggcagatcacttgaggccaggagttcaagaccagcctggctaacatgctaaaaccccggctctactaaaaatacaaaaaattagcctggcttagtggcgggcacctataatcccagctactcaggaggctgaggcagagaatcacttgagcccaggaggcggaggctgcagagagctgggatcataccactgcactccagcttgggggacagagtgagactcagtctcaaaaaaaaaaaaaaaaaagaatggtagtgttccctcctcttctgttttcttgaagatattgttagaatcatgttgactttttaaacatttggtagaattctctataaatgtttagaaccatcttggcctggacatttcgttttggggagtttttaaattacaaattgacttttgctataggttgtttaaattacctgtttgatattgaatgagttgtagtacctcatgcttctctaggagttggtccattttattgaagatgtcagagttatgtgtgtagaggcatttgtagtgttcccgtattatccttttgatgtctgcagggtctgtagtgatgttccctctttcattcctgatattgacagtctgtgtcttccctctaattgtttctttgtcagtcttgctagaagtttgacaatttcttattttcaaatacctagctctgttttgttgattttctgcattgtttttctgttttctgttaccgggatttctattcccctatctttgtgatttccctccttccttcctttgctatcattgtgggtttactttgctcttcttttcctgggtgctcatggtgggatcttggcttattgagttgagatttttcctctcttcaaatgaaagcccatagtgctataaatttccctctcagcattgctttagtcatgtcccacagctaagttttgtgttgtattttcatttttattgagttcaatgtctttttaattttcccttgagacttcctctttgacccttaagttatttagaagtgtgttgttaagtttccacgtgtttggagatttgtctgctatctttctgttattgatttctactttgatcctcgtgtggtcagaggacatgctctgtatagcctcagttcctttagattgggtgagatttcctgtatagcccaggatatggtcaatcttggtacatgctctgtaggtgcctgaaatgaacatagcactctgctgctgttgggtgaagtggtctgtaaatattcatcatttgatggacttctaaatttatctcaagactctgagatcatttactctcaaaggttatgtgatacgctaccttttccagacaattcctaagtgatctaaacccctgctgagttcaccaagtggcctgtaaaaccctatgatgattcttgttgatgggagccatcttcccccactagtaggtgtgggcctttcttaaggtgagggccttgagctcgcaccagttcaacctatggctgtatgaaaattttctggctgacatttttacgcttgtaccttcaagaaatataacaaaacatcatttttcttcttcttatcaagtcatagaatgctaaaggcagcgggaatctagggtgatctggtctaccctctcgtttgacaggtgaagcaatgaggtgttgcgaagttaaactgattagttttttttaattttttaaatgaaattaatatacgttaattatagaaaatgcataagaaaaaggggaaatgcataagatagagggaagcaaacatttttaaataaaatttatataaaacttataaccaaagatgactactatttttattttggagtatactctcccaatatgttttcaaaagcaggatcactctctatgactgctttaaaatcttttttttgtactttaacaacagacatgaacatttttcaaaatattatttctaatagcaaaatatcattccagatatatgtctgatgatacagttttctcatcatttatttaatgagtctccattgggtgggcgtgcaggttgtgacagttttctctgtgttaaataacactgtgatgaatatcttttgtgtacatgcatgatgatttcctagaaatgggaccctgggtcagtgcttgtgaacatttttagcttctgagccccattgccaagttggattcttgaaattttttgtttgtttgggcagctttggttttgtttttttgttttcttttgagatggagtttcgctcttgttccccaggctggagtgcaatggcacgatctcagctcaccgcaacctctgcctcccaggttcaagtgattctcctgcctcagcctcccgagtacctgggattacaggcatgcaccaccatgcctggctaattttgtattttttagtagagacggggtttctccatgttggtcaggctggtctcgaactcccgacctcaggtgatctgcctgcctcggcctcccaaagtgctgggattacaggcgtgagccactgcgcccagcgcagctttggttttatttgttttgtttatagtggagggttagacatgaaatcaacatagaagatgacgtaaacttatgactaagcctggtgtgggctctcggtgttctggggcatgagctagaggatggctggagccaggtagagaccgctcccttccttagaatgtcaccttgctgacaaggacagcgctgtgagcatccacaccttcctgtgaggtatctggcattgagcctggtcaggaaacaggaagacaagcaggttccattgagcctgggacctggaccttgtaaagccagccacccagcccagttttacaggccaggcaacaaagggagcaaccggctggacccaggcctgcctcccccgtgcagacccgccgtgagaacaccgtgttctgaattgagacgtgccttgcactcactttgtcccagtaattgcccccataaaatagacctggacactaagaggaaacttcccatatttggaaacccagtcctgcctgctttttatagctggtgtcgaggacaagagaaccacaagccgtggccagtctgctgagagaccactgagggacagacgggttgtgggcctggagcagccccggagggaaggagcatttgaaagtggacaggtagagcccaggcccagagagccccagggctgctaccaggaaggccagcgcatccctccaggtaacgggcagctcctcggccacagcctccaccccccaacacgtgggattcgggctgcaatggcctacacatcttttcctcttgtccgtgttccatctgtctttcttctttggtttgtagagagagaagaattaatccagagcgtgctggcgcaggttgcagagcagttctcaaggtacagagtcttctaaacttacaaccagccagagatgggcacatctttctctaagagcgagggcaggccccaggctctgaggctggccttggccggcaagcgtggctgtctcacctgcctggaggagctgcccgcacggtggaagccttctgtggcttctgtaactaagccagcttggatggggcccaggaaacgctcaccttagaccaaagaccatgttgagtgggtgcattagaatgtgagctcgtgaggtcgagaatgttctccaccggctcttctgggatgggagaacaagctataagaattggctccactggaaaataagcttcctcgctgagcttctgtgtagttaggagacttccttttcatcggagtcatcccaacaatcctgacctggataccgtattttccatttctcaaactgacttctctgtggcgtcttactgcccaggttaattaaaatagtgaaaagcacagacgggtgggattttttaaaaacctttgaattggccgggtgcggtggctcacgcctgtaatcccagcactttgggaggcggaggcgggcagatcacctgaggtcgggagttcaagaccagcctgaccaacatggagaaaccccgtctctacgaaaaatacaaaattagccgggcgtggtggcacatgcctgtaatcccagctacccgggaggctgaggcaggagaatcacttgaacccgggaggtggaggttgccgtgagccgagatcacgccactgcactccagcctgggcaagagtgacactctgtctcaaaaaacaaaacaaaacaaaaaaacctttgaattgtttaactgactgggttggagcctccagagagcacaacaggtcctccgaaggtgtctgtgcccatcaggggaaggtgcggggactggaccatctcaactgcatgagcagagagagggccatgtgtccaccccagagagcttgggtccactgctcaggcccgaagaagtaaatatgcccaaccagcccagaaaatacacctcatgatactttggtgattctttcctccccatgggacatgatgatttctgaaaagcaagtcctagcatgttggcacctcagaccctcaccagcccacctagaggccttgcccatgcccacagcagggactcagtaggtgtttgcttaaccggttttggctctgagaattttaagggtcatatttactctctcttttctttttcattcctagagcattcaaaatcaatgaactgaaagctgaagttgcaaatcacttggctgtcctagagaaacgcgtggaatgtgagtgacgtttctgtttcctttttgcttctctgtcctttaacctctattcaaattaaccacttggaacggggaggagttcagtgccgaaggtaaatacaaataaatgtcttttctttgtgaaatacttgaaaattacctttgatgttaacaaaggctagcacagtgactaactaagcattttatttctattttaaaagaagcacagctcatggtataaagcattctttcagccccaaagaataaaaatgaacacacgaagccttccgcacttagcccctctgagaacctctgctgagtgtcttgtctgtgtctttttgtgtgtaaatgaagacattctctgcacactgatcggcaccctgtgggtcataattttttggaatatgtctactaagttgttatctcttggtttctgatacagtctggatgtcccctccacatctcacgttgaaatgtcattcgcaatgttggaggtggggctggtgggaggtgtttgggtcaccaggcagatgcctcctaaatggcttggtgctctccttgagatagtgagttctcgcaagatctggttgtttaaaagcacgtggcatctctctaccctcctgcttctccgttgccttccaccatgattggaggcttctcgaggcctccccaagagccaagcagatgccggcaccaggcttcctgtaaagcccacagaactgggagccaatcaaacctcttttgcttataaattgcccagcctcaggtatctctttatagcaacagaagaacagcctactacagcctccaatcaccaccaaaggaaaagcagaaaaaggactagggagccaaggagtgtcgattcaagtcctgattcaatgatcacaaagctcaaattctgggaagaaaacagcttcaagtcacccaccctttttgtcctcatccataatatcaagatcaatgcttgaattccataggcctcacaattctgtgttccactcacagcttgacaagtgaactctttgtcaatgacaaggcaaaggttaatgattaacaggcactgtatttaccaacttaggaactaaataaacagaatccagacaggataccattaagagttgcagcatcaccaaaaatatctggctgattgactgaatgtcgtcgcttttctttttctttttttgagagacagagtcttgctctgttgtccaggctggagtgcaatagcacaatcttggctcaatgcaaccttcgcctcctgggttcaagtgattctcctgaaacatgatttacatagtcagatttatacttttcaaagtgtgttgacatttctaaaaatgtatgtggtcactggatcttcaagacagtttcattttccccattgtcaacgaggaagccacagagaggttaggtaacctcaagttcactcagcaaattagaaaaataaataaagctgggactggcacccagggtcctggccgggctgctgtcacggcctgctacctgcccttctggaacgagtcacttccctgcacacctggctgaagaggaccaggcactccatgaggattccttgataacgcaggttagaaagctaaagctgcaagcaacagaaactgatcgtggctgctttcaacagaaaaggagtttttccctaaaggattttgggaagcttccccagatccccaggaaggcttgggaacagggctcagaggttgtgcagcagcaacaattccccaaatcccgtgcagagctgatgctgtgcggatgcctgtgctgccgtctctgagccccagatgcggcaccagctcccctgtactcctcactctggacctaggtcccccggaggctccacaaccacttatgcagatatcaggctgcttctccatgtcactggctacaggttcaaaatctagacagagccaggccgcgcacccaaggtctagctgcaaggcaggccccacgaagggaggctgtgagtatcctgaagctgcctcacaaagcaccacagactgggaggcttaagcatcaaaaactgactctttcacagctctgcaggccagaagtcagaaatcaaggcatgagcatgactggctatttctggaggctctgaggggccctggttccatgcctgtctcctagaaccttgtggttcccagcaatccttaccgttcctgagcttggaaggctacattgctataatctctgcctgtgtctacacgtgatgacattctcccaggatgtctccatgtcaacagtctctctcagctaggtcttataaagatgcctctctttgaatttagggcccaacctaaatccaggatgggcccatctccagatccctaatggattatatctgccaaggacctttttctacataaggtcccattcacaagttccagggagtaggttgtgaacagatctttctggaggacacaattcaacccaccacagcgagtgtttgcatttccatattctgcactgggaggctggctcagctctccaccaagccccatgtcgcagggaattctccaaacttgggtaggggtttgagccaaagcatgcaaaaaaggcttgctgcagagtccccacccctctttacggacacaaaaagccacgcagtcactacggggcgagtgtgcagatgcccgcgggcagcaggtgcctcccacctctcctcctctctccagcacctgggtttttcctcagccttccccatctcctacgccccacctggaagccagtgccagctccccccatgctcttcccggaaagtgcaaacaggcaagttgaagaggccatgtcgtaactctcaaaactcttacagagaattatgtcgcccacaacaagatgaatagtaaccctgtgtgtctttgaataactgaccctggaaaataaccatcaagccagaagaaaagtgttcctattttacctgcaagtggcaggtgagtcgaagaccactgaaggaaatggcccataggaccttcccccctagcctgttctggctgcggaattctccaaaatttctcacttctcagagggaagcatcttcccataaaaccctcagtaaatgcacatagatggcctggaaaaggacaccgctcttgacccaccgagctcaggctcactgcactgaccaaaattcctggcgcttctatgggtaaaaccggttgtgactagttgtactgatttctagcaccagagacctaggactgcagaaatgggattgagggagctcacctctctaaggagtagagaaggaggaacagtctaggagttgtggagggtaagggaggggcttgggtgaggtcaggggggactctcctcagtcctcctggctgccctcctcccctggcatgcaactcacacccccaccccaggaggcagccatgtccagacaggctgtcctcctcctgaactccacctggctttgggctcatcctccccgggcacttctggctgatggctccccactctccagcggatgtgctttagcgggaggtggccaggatgctgcacctgtgctgagccccagagattctgagttccagagacactacaagggcagcagagccttaacccaaagatgcaagagcccagacattttaggaagcttggagggcagaaacggaaagtccttttgaggagagggcctgcagctgaacctctcacgcaggccactgggtaggtgcgcgcccagcttctcagaaggtcagtcccaaccctgcacggctgccagaagctagccagatggggaaggcggccaggagcctggtccgacaccccgatgcacagggcctgggccagaggcagatgctcccatctacatatgcacacacacatataaacacaaacagagaaaggtgcacatgcactcacatatacacatgtgaaatcacacaggcatgtcaggatgtcacatatacatgcacacgtgtaagcacccaggcacgtgcagatacattcatatatatgatcacatacccacacatgcgcacacacagctgcttctgctatacatgagctgctgtgagctgttttgttttgtcttgtcttgtttttgttgttgtttgagacggagttttgctctttggcccaggctagagagaagtggcgtgatcttggctcactgcaacctctgccccccgaagacaggacacttctgtctcagcctcccaagtagctgggattatagctgcccgccaccatgtccggctaatttttgtatttttagtagagatggggttccgccatgttggccaggctggtctcgaactcctgacctcaggtgatcgacccgcctcggcctcccaaagtgctgagattacaggcgtgagccattgtgcccggccaagctgttttctgcctcttgagttaaaggattcatccactagaactggccaccttaaggccatattatattgtggtggacttgtcttaaatggaatttcctgcttcttcttaaatgtataattcctctgaattgaatataaatttcttcatttctcctcattgactttcaaagctcttcttccttttgatatacaaagtttagccttgttcgagagatctgggatttcccttacgttacggattattttgtaaacagaacacccaggctcctcccctcatgtcctggctggaggtgaaacattaaaaagagattttaaagcagggccctttactcccttccttcctggtttgtggccagggcacagggcagctctgctccatccaccctttgtccctgtgctctgggcttggaccaaaacctaaacacagcgtgggccgtggcaggagctgaccggctggggcaaagtttaacacaggccatacaaacagcccagagcctggatgctagaaccaagccttgcttttctctgtcactccggaagtgtgctctacgcgggctctttagtgaggctcctggaggaagtgttgaaacacaactctattcatacatgtctttaaacagctttcactagctctgtagccaaaggactgggcctgccaggttcccggcctcttgctggagcacagtgaggctggggaaggagcacagcacagagcctcctgagcctcggctcagctctccccgacccccagctcggctctccccaccctccggctcggctctctctgacccccagctcagctcttccccacctgccaggacgatttccccaaagccagcgtctgtcagaaaatcacccttagtttttcctgcaggtggcctgtgacttgtagaagctcacaaaaatctctttcaaagcccttttttgttgctgttttgttttgttttgagacagagtctcactttaatgcagtggagtgcagtggtgtgatcttggcccactgcaacctccacctcccgggttcaagtgattctcccgcctcagcccccagagtagctggaattacaggcagcctgtgaccacgcctggctaatttttgtatttttagtggagacggggtttcattatgttggctggacaagctggtctcaaactcctgacctcaggtgatccacctgccttggcctcccaaagtgctgggattataggcatgagccactgcgcccggcctacagtccttttaagaggacagcccggggtttccagataatactagccccacacacaggcatgtcctagggtccacacctggtcagcgggaataacaggcagccgtgggctgggctcccagccccctagcagggtccagtgggccagggagcctctgctttggtttgtggtgcgtggtctgtgcccgcctgtgttcagcgtttgaaggcagaggagcgggccatgatgggcagagccgacgtccaggctccacggtagggccgtcctgctgctgtctgcagacctctcaggcttgaggccccccgccccacaggactggcccgctcctccctctggattgaggtggagcagggctggcagtgggtcgaagaggggagctgtggaatcttccccaaagcagccgggtgtcctggaaaggccagggagtgaggaggcaggacccccggggacacaggcacacacatccaccacatgctcacctctgcctcctcctgcagacctccccgccagccccgtcatttcatggcatcttgctttctcttcattgaggaatgcacttttgcaatgttgttactcactatccatctacttggccaacagcctcttcataaacttaattgccacaaattctgcatctctgggatgcaaactagtgaagctgtgctgtgtcacccaggaggcttaattttaacatcacctcaataggtagccagggaagcggatctcggtggactctgcactgtcaatacaaacgctatgcacccatcaaaaaccatgagctggcttaaaacagagccttgtatggacatgggaaaaaaattataggtttgttgcaaactcatttagcagcaaaaatgtgatctgaactgacatgaagcccttggtatttatttatcctgctcagtatgataaatagcattttcctcgggggataaaaagaaaaacgtgagctgcgacagcagccactaacatggggaagggccgtgacctcctgatgagtgaaaatagcaagttagaaaacaacaaattttatcttttaaaattaataatagatatatagatacatagacacacacaggatggatagaagctagatagatacatacatacatagatacatacatagatagatactatatagatatgtaaatagaaagataggtagaggctgggtgcagtggctcatgcctaaagtggttccccagcactttgggaggtgaaggcaggaggattgctttagcccaggagttcaagaccatcctgggcaacatggcaaaaccccatctctacaaaaaatacaaaaattagccaggtgtggcggtgcacccctttagaccctgttattcaggaggctgaagtggcaggatcacttgaacctaggaggtaaaggttgcagtgagctgtgattgttccactgcactccagcctgggtgacagggcaagcccctgtctcaaaaaaaaaaaaagaaaagaaaagaaagataggtagatacatagaatgggtggatagagagatagaacggatagaaaaataggatggataaatagaacataggtagatacataaatatgatgaatgcatagatggatgggtggatggatggatggatggatggatggatggatggatggatgaatggatacatagatgaatggatggatagatagtatataaatggatggatggatagatacacagtaggtaggtaggtagtagatagatagatagatagatagatagatagatagatagatagataaacaggatagatagatagatagatagatagatagatagatagatagataaacaggatgaatatttagaaggctgggagtgggcagaaagcctggaaggacacacattaatacaaataatattaactgagttgttttctgggcccataggatcctagacaagtttttaaatattattctttgaagtgctatttcctacacttcctacaatgataataggatattttatattcagaaaaatgacatttaagacatagtcaatggtccatggaccttggacagagggcccagctgccctgtttgcagtctacaccgcatgcccaacccttccccagatctactcactttcagaatgtgctgccttccacgtgtgaaccagactgagctcctttctgccactgatgttgaattgtccatttgctcacgtcagtgtccacgtggcaaatccacagggcatgggtgggatcctgcagtctagacaaagccaaggagcaccgctggaggccacgttgggcttcccaatccacatgcaaacccaaaatgtgttcttgggtaccttttctgagaagacagcctgtggcatgcatcagcttccttgaggggcccatgatgctggagaaaacggagacccggctccaaaggagaatgtggactcttagtggttggacaaagacgtcccgacctcagacctcaggtaccctgtgtttccccagcggcagctcatctggactcggccatcacgacagcgaccacactggctccagccacatgcacttccggaccccatgtcctctagctgttgggtagaagaggggtggagaaggtttctgtagcacagaaacacatcagcaggaccagatccaaatattgcactctccagattcttcgtccttctggcagaaagaagcagtgtcccgggaacatgcccctacttgacccctgaccctggaaacgcctcgaaacccacccgggaggctgattccagctagtctgccctgggccactgtactgggagagtttctttccggagctgcagtacttcctttggggtgggaaggagttgttacaaactagccaaaggctctgagttgcttggtttttcctttagaaaacatttgctttttatttttagcagttattcagagccaaacttcatgaaaaggggaatagagtggtatcgtgggagtatccttttgcataaaaactaaggtgtgattacaaagtaacaaagctaatcttttttatttcaattggtttatgaaccaactctaattgaaaagccgtgcaaagctgcttgcttcatggcagcttttctggggtaaacgtgcagtcagccaagggtaaatatcttgaagtttaacgctcgctcggaggcataagctccagtttgtttttggttgaaaaatagtatcctaactgttgaggtacacctttgcagtgggactctgtaactgcccaaggggttcaccctgcctgctacctaaacagagctcattcatcaagacaggggaactgcaatggagaaagagccattcacccagtgccggctgtgcgggagaccagagttttattattcctcaaatcagtctccccgagcattcggggcgcagagtttttaaggataacttagtgggtggtgggaagccagtgagccaggaatgctgattgattggtcagggaggaaatcatagggagttgaagctgtctgcttttttttttttttttttttttttttgagacagagtctcactctgtcccccaggccagagtacagtggcgtgatctcggctcactgcaacctccgcctcccgggttcaagctattctcctgcctcagcctcccgagtagctgggactacaggcactggcacaccatgcccggctaatttttgtatttttagtagagacagggtttcactatattggccaggctggtcttgaactcctgacctcgtgatctgcccacctcagcctcccaaagtgctgggattacaggcgtgagccactgtgcctggctgcagctgtcttcttgcactgagtcagttcctgactggggccagaagaccagacgagccagtttatctatctgggtggtgccagctgatccatcaactgcagggtctccaaaatatctcaagcgctgatcttaggagcaatttagggagggtcagaatctcgtagtctccagctgcgtgactcttaaactgtaatttctaatcctgtggctgttagtctcgtccccaggcaagaagcaggtctgctttgggaaagggctgttacagtctttgtctaaactataaactacaaatgaagtttctcccaaagttagttcagccaaggaatgaacacagacagcttggaggttcgaagcaagatggagcccgctaagttagatctctttcactgtctcagtcataatttggccaaggcagtttcaactccaggaatgtgatcaagtccaagttctgctgatcctcaactttgcctatttatttctcttctgttttaagtcaacactttctcctggtgaaactgctctggaaggacgttccaatgaaaagcttttcccataatgagatcgtaatccttgctgaaaacgctttgccgttcactgcattttaatgctctggcaccacatgtgcccccttttctttttgggataaaagacgcctttgtcccatgtcctcagctggtgcttaggggtatggagcaaaaagtgggtgccagagttgagattcagggagtggagagtggggaggagcttctgccttctgaaaactgcccggatggatgcggtagtgcagcggtggccacggcacatgcctgcgaggatagagtcagttgtggctgagctaagcgcggaagtgcaggcaaaacctgagtatcggcagccagggcaggtgtggggacctctgcactgaggtatattcctccctgggagccacagggagcccttagttaccagccttgagagatcctccacattcgtccgtggtaacccccttgctgtctctctctctgtcaccagtggaaggactaaaagtggtggagattgagaaatgcaagagtgacattaagaagatgagggaggagctggcggccagaagcagcaggtagggtctgcgctggggccacgggcggccgggcctggggagggctccccgtaccagttgggctggggctgtgggctttgtttgcctaaaagaaaggctggtgcagttcggtacagttcaggcttgggagagtgcagtctggaggcagccaccctgcttgcgacctgcttgtcagtggtgtgactttcttctaacaaaagagcacgcatgggccgggtgtggtggctcacgcctgtaatcccagcactttgggaggccgaggtgggaggatcacctgaggacaggagttcaataccggcttggccaacatggtgaaaccccgtctctactaaaaatacaaacggtagccaggcatggtggcacatgcctgtaaccccagctacttgggaagctgaggcgggagaatcgcttgaacccaggaggtggaggttgcagtgagccgagatcgcgccactgcactccagcctgggctcgacagagcaagactctgtctcaagaaaaaaagagcacatattggagataggggctgggaagacgatttcacagaagaagagtcctcctcctgcagatccaagccttaggagcaatgtgtccagcttggaataagttgatatccacttttaaagacagaacaagaagaggaaaagcattaggggaggagcctcctgttgcccccagggacccggttccttgtgtgatgttcccactgggttgcattccagcgagggcttcagcactggggacacagaagtcattctcctgggaacaggcatccttcacaggcgcttcggggggcccagtgagctgtgactcgtggggaaaatgccccagtctccacgatgccacctccaaagtcagttttgtgtacagcaggactctttactggagccagggtcaggacacgtgtggatgaaccacgaccaaactggggatggaaatgccggtagtagcaaagagacggcggtgatgatgagcagagcgcatgcattgaggcacttactgtgtgcgggcgctgtgcttagtgaggggcacacaggacctgctcacacctccgggctttgcctccatgcccgctggtgccagcccagacaccacaggcatatgatgtggctcatggttccccagagtgccactgcccggcctcagtgggatttaatggggactaatggactgagaaacagccctgtgcaattgcactgagttgtctcagagccacctggcatgctgacgatcattccctgattttgaaattgagggcaatctgcttattgaggaagcgtggcaagtgaaagggtctcagaggcagaaggtgaagggaaagccgacgggcctcatctggtcccctcaaagccccgggggcctggcctcggggtgggcgcagggaggaaggccgagcggaaggaagcaggccttgtctgagccacgtgagagcctgtcctacagggaccgtgccacgtgtctgtcccatgcactcatgggctcatttggagttagggatgtctcagcccaattgacttaggggaagtcaggccatagtttgtggccatggaaagttgtgagtgaacaatccatcttcgtcatccctgtgctggaggctctttaaaggacgggagacagagtctctcatttgtgagccaaggaagagctcccaagttgcacagggacggccacacagctggggtcccaaggctgggacctggcaaggctgggacccggcttggcagcctcagacacacagcaccttcacctgtggcaccgcccttggccgtgggctctacgtggcttggttcagccctctggctgtcccttgcgccccaggtgccatggctgctttggcaggagggtggtgttccagggtggtgctgcctggcagggttcccctctgcccagagccaggcggagatgggtggcctcaagctggggctgcgggtgtagcagggccagcctttccagccccaccagcagcacgaggggaagaggacaaaaactgagttctagtcttcagcctgaaaccagactccctgaacagcggcctctgggccccatatgggttggggaactccaccgccccaaggggtgtgtctggagccaggccatgcctcccgaagctgcccccagctcctcacccacaactgtgtgtccctgagcactttctggaggtgtttgtaggatgcagcctcttatcccttaaacgactgcatttaccgcccacctacagcagcaggagtgagtggtgagacagcctccggcctcacaggtcttgcctctgccgtgcctgatgggcacccgctctgtagaaagcaaggcgagtgctcggatcacacgccgctcctggcgtggtttctggtgtgcactagtcctgcaggtcaggttgaggttgcaggggggaagattatttttatcgaagttgtagtcatttcctggggctgcgtaacgaattctcataaactgggcagcttaaaacaatagaaatgtattcccacatagttctggaggccacaagtccaaaatcaaggtgccagcaggccctgccacctctgaaggccccaggggagggaccttcccggtctctcttggcctctggtggctgccggcggcattctctgcctgcttcttcacctggtgctcccatccgttctgtccaaattccccctttttgtaaggacacccatcctattggagtaggggtcaccctcctccaggatgacatccccttaactacatctgcaacagtcatgtccccaaatgaggtcaccctcagaggcagcagggttaggacttcaacatacaacttttggggggagatgtacttcagcccataacacaccacgtgggaggataacaccgatttcagagcttgcagaggaagccgccaggaactccagtgagacatcagcccccaggtgcctgtcaggcacgccgggctgtggggggcacctgggcccatctgagtaacggaggcgcatccgcacttcccccaggagtacatttttagaacccacagcgccataaaccaaagacaaggagacttcctggtgccccgtcagcttctggaggcgacgttctcggctgacagctctggcagcctcccctgtaggtgagagacaggtaaatgggactcttgcttccaaaacggaacagggtaaaaattctcaagcgttgtcgacacattgagaaaaaacaaatccagcctcctgggctctggtctcatccccagccgcgtcatgtgccccaggccggcgttgccacacatgaaaccccttcctgtttttctatgtagaaaggaactcagaatagagacactgagatattcgtgttgtcccttttgtctttgtcaacagcagagttacatcttactcatgagagccctgtagcaatgtggggaccctgggaccagtctcagttaagctggaacttccccggatgactggggagaggagctgcaaaaggcagggtgggggtggggggccttcccgagatggcagcccagccagaggccagcgttcttgcctctgggaagagaataaaggccccagacagggtggagctagctcagccccgtgccacacaaatggccagtgtgagcctgaaatgtggagctacattcagcccacatagcacaccctggtggggcctcggagccaggggtatggatccaccagaagctgccccttgggaacagcagtggcatcggggtccggcacacagcacccgggagcaggtggccgtcccctgacactcacgggctaggtttctcctgcttttccctcaaagaggacagaggtccaactgccagcttacatttagggcaggggcaggggcaggtctaccccaggggccacggccactctggcccccagcactgtgccaggcagagagcagagcatggaatatggggttcacccagagctggggagtctgcaggagcctggggtggcaactgagggctcagcgttcatcccaaacaaatggccttgcccactggcctaagccccagagaagggggatggggaccccaggaaatgaaagcaaagataagctccaaataggatgaaaagaaagagctccatgccagctgctctgtttgctgaagacgctggttcccgtggcagcggagcgcagagagaggggctgcctggccaggcagggtcagcgggccccagcagaccctcctctgctcccagctctggtatctgcaaggaaacagcgggattcgaacagtcaaactgtcttgctcggtgaagatttccataaccctcctggggaatgcaggagacttacagagacagcacatgtgcgaatgtttacacaaaacaggttaaaagcagcgaagaaatcatcatcatgccatctattttttttaactacgcagaaaacgttcgttacttctcagaaatgtgtaaatggaatttctcgtttaatggatgacaatggaaatcatttgattggtgcattttgttggttggttttgttaatactttgctgaatctgttagcgttcccccttacacatcaaactgtggtagcaactctgatgggttttgcaagcatgaaacagagggaagggctaccaaatggatctccgtggagcggtggttatcacggggaagagacggcagcatgccgagaaaataacaccgaagcctctttttccagaaaggaaatagattgattattctagttttgaaaatagcacaggctcattggaaaacctccaaactacactgatgggagctgaagggtgcacaccgatcatgacaacagccggcaatgtccccccagtttaaacctggacacgaggccttctagatgtttttctgtgcatagataccttgttttgaaaaacaactaaaacatgcgttgtgtagtctttttttttactagtggcattgtgagcaataaatagattaaattttaaccagcgtacagctcatagattttcccagaaggccacaatcaagcactctttttaaacctaccgaatgtgctctttcttcctcgtagcgtggcattttttggcacttgctttcagtacatactgtgcatagcattcttattttcccttttcatgtcaagtttcctcacttggcataatatccgtgatgatcctcctaatggcataatagtccatcatgcggaggcactgtgctggtttaaaccgcttcccgtcttgggacattcaggtggcttctagtcggttttgtgtttttgttacagcagatcacaccacggtgaatatctgtgtgcatagagctgtttgttcctgtttaattcttggcttaagataaattccccaggatagatatgtgggcttaaaggatacgaatttctatatggctcttactgggcagtattaacttgctctcccagaagaaggggctttatttacaaatcgcaggagcttctgctgcatttagctccctgagtgcccccatagcctggtgaatgtcacacaagccaggcgtgacccccacccaccatcgtccaagtacacagggagcctgttcacttccaagcaagttcacacccatagggtgtgaacccagatcggcccagccccctggtgcactctgctgcaggggcccaagagcagccagacctcctggggcagctgctcctcattcagcctctggggaccaccctgaagccagcacactgcccaaccggaaggtggctttcctctgaaacatgcctggctcactttgccctgctcctatgtgggatacctcgataccaagtgctaaacaaaaacagagtcagacagaaaactcatctgctaacattacatgtaacagggaaagttggaaacattctaaaagtccatcactggggactggattgctaacgtgtgctatggccacaccctggagaaacttggaaaatgaagctaagctctgtggagcaacttgggatgagttcatgatatgttagatgacaaagcaggttgcagcagactgactttggtgcaattccatctttgtttaaaagtacaaaggggctgggcgcagtggctcacgcctgtaatcccaacactttgggaggccaaggcaggtggatcgcttgaagtcaggagttcacgaccagcctggccaacatggtgaaaccccgtctctactaaaagtacaaaaattagtcaggtgtggcagcatgcacctgtaatcccagctactcaggaggctgaagcacgagaattgcttaaacccaggaggcagaggttgcggtgagcaaagattgcgccactgcactccagcctgggcaacagagtgagactctgtctcaaaaataaataaataaataaaaattttaaaaagtacaaaggggcggggtgcagtgactcacacctgtcatcccaatactttgggaggctgaggcagaaggatcgtttgaacctaggagttcaagaccagcctgggtaacatagcaagaccctatctctacaaaaaataaaaattaaaatattgttaaaaggtaaaagcggccacccatgtgtgtccacacttcaaaacattctggaaagatacaccaaactattagaagtgatttccagagtatgggatttagggaaataaatgggtaaagtgaggacttcggttttcatattttggtgtttttttttttactttactcttgtgttgtttagattttttagaatgtttttcttttgaaaacagcttctaaaagagaagatagccctcaacatctgacttttttttcttttttttttgagatggagtttcgctcttgttgcccagactggccaggctggcgtgcagtggcacaatctctgctcactgcaacctccgcctcctgggttcaagcgattctcctgccttagcctcccgagtagctgggactacaggcacacgccaccacgcccagctaatttttgtattattattatttttttaatagagatgaggtttcaccatgttggccaggatggtctcgatctcctgacctcatgatcatcccgcctcgacttcccaaagtgctgggattgcaggcatgagccaccacgcccagccccaacatctgactttctgtgtgttttccaagagtctagtgtgaggtcagaggtcagacaggtcatcagggattttgcttcgagtgagttgctgctgccctgactcctctcccacagcaaataagaccacacggggcttgggggttgggtttgtcgcttgcttttgctgtgctgagggcttcaccagactgaaacagcaggaccacagctcatctctgctccttctctctaggaccaactgcccctgtaagtacagttttttggataaccacaagaagttgactcctcgacgcgatgttcccacttaccccaaggtaagatgagattccggcccagaagaagctgcagctgtgtccccagccccacgcccagccctgtggccctgcggccagaccctgctgtgtgtacgttcacatcaaccgcccctcccagccctgggccgctgacggtgcgggttactttaaggcaaagtattttttctctttgacatttgtttagcaaaagtgatcccagaccataccttcccctgcaaggacataacagctccgtgctgctgtctgcccggccccgggagctgacctgggtagacagtttttacactcaaacgttactggaaagaactttaacgtttaactgaatttttaaaaatccattccattggcccttgtctctgagcaattcttagttgtcctggcaagttttgctcttttgcacaaaagtgttcttagttctaagagaagctgtgacgttggtgaagtagcaatggcatttttgaaataacgacaaaaggagggtctcgagttgccggtcacccgctcaacgccttcagctgggaagcaggcaaaatcccggcccacctgctttttttttttttttttttgagacagtgtttcactcttgttgcccaggctggagtgcaatggcacaatcttggctcactgcaacctctgcctcctgggttcaagcaattctcctacctcagcctcccaagtagggggcattacaggtgcccgtcaccatgcccagttaatttttttgtatttttttagtagagacagggtttcaccatgttggccaggctggtcttgaacttgtgacctcaggtgatccgcctgcctcggcctcccaaagtgctgagccaccgcacccggcccggcccacctgatttgtaatgtgctctcatgctaagattcagggggcacagcttccagagacagcagaggcctgggctaaacacaggtgggctctgccactgcctgcggttcaagtgatggcagagccttccacagcctccatgtaggccactggtgtccattagtccgtgattctatccacgcagttccaaacaatgtcctggatattgtcaggttctgggtggatttggggggtttttgtttttttcttttgatactgagtctcactctgtcacccaggctggagtgcaatggcatgatctcagctcactgcaacctctgcctcttgggttcaagtgattctcctgcctcagcctgagtaggtgggattacaggcacccaccgccatgcccggctaattactgtatttttagtagagacggtgtttcaccgtgttggccaggttggtcttgaactcctgacctcaggtgatccacccacctcagcatcccaaagtgctgggattacaggcgtaagccagcccagcctcatctgagatttttgaatggagactagtgcctttttccattggaaaatatgccccgcgcttctcaggatcctgtcccagggagccgtgaagcacagcctagatccaaaataaaaggtgtcagccctccagatctgtccccttacaaaaaacagaaaaacaaatatccagtaagacctaggagaagacagtgtgcaataccaaagcagtgttcttgtcttctgtatagaaccacagccttctgtccttgtgacagcttaacctaaagcctgatgtcctcagaagcaacccaggggcaccggccccatcagcaggcctgctcttctagctctcggcagaaaccaggaatgggttccagacaggagcatctcagaataacttcttaggtggtatctgaatttatgccaagtgaattttacccccacacttcactttattgccctttttttattattatttttgagatggagtctcactctgtcgcccaggctggtgtgcagtggcacgatcttggctcactgcaacctccccctcctgggttcaagcaattctcccacctcaggctcccaagtagctgggattacaggcacctgccatcatgcctggctaatttttgtatttttgtagagtcgggattccaccatgtttgccaggttggtcttgaactcctgacctcaggtgatccgctcgcctcggcttcccaaagcactgggattacaagcatgagccaccatgcccagctattgtccattttatcatcgggcttgttgaggtctaatttacatgcagtaaagttatttaggcttggagtacagtgaattttgacaaacttgtttagtcctgtgacctccaccacaagcgagatatggaacatttctgtcaccccaaaccctcccctctgctccctcaccctgcctctggcatccaccgatgggatctccacccgtagcattggccctttccagaagtatgtggcctgtgagtctgacgcaggtgccttagaaagagaacgggagaagctgggtgcggtggctcacacctgtaatcccaacacttggggaggccaaggcgggtggatcacctgaggtcaggagttcgagaccagcctggccaacatcgtgaactccccatctctactaaaattacaaaaattagccaggcatggtggcgggcgcctgcagtcccagctactcaggaggctgaggcacgagaatcacttgaacccaggaggcagaggttgccgtgagccaagatcgcaccactgcactccagcgtgggcaagagtgagactctatctcaaaaaaaaaaaaaaaaagaaagaaagaaaaagaaagagaacgggagaaagaggagaaatatctcagcatgcacatcactgtcacaggcccacggcgcctggttaacacggaactcctgtcctttctagtacctgctctctccagagaccatcgaggccctgcggaagccgacctttgacgtctggctttgggagcccaatgaggtaagtgcggggcttgcaggcaccacgtcccagggggaggcagctcaggatcttggacgccagtgggaccacccccatcgctcttcctccttcttgctttttcctcttctttttaaagactgaaaaaaaaaaacaaaacttgttttgccaggttttagttgaaactaactaacactttatagcagggcccaggagacttcacagcaaggggattctgtgagtgggggagacggctgtcaggggcagggaggctccacccagggctcctgatggcgctgggccccccgagccatctgctcatcctgcagaccctcatgcacgccggtggcagccccgtgctgcagaacacccctgccaggagcaaatctctcctcaaggaaggggctgcggtcagagtgctctgctctgagagcagtgtctgcaaaggcaaggcacaggcaaccggctgccccagataagtggacatgtgggattccgggaactgtgtcaccttctgcagcaaggcttgaggccaggaattccacactagcctgagtgatatgatttggctgtgtccccacccaaatctcaccctgaattgtcataatccccacgtgtcaagggcagggccaggtggagatcttgaatcatgggggcagttttccccatactgttctcgtgatagtgagtaagtctcacgagatctgatggttttataaatgggggattgtcttttgcctgccgccatttaagtgactttctccttctctgccattctccatgattgtgaggcctccgcagccatgtggaactgtgagtcccttaagactctttttctttataagttacccagtctcaggtatgtctttattaacagtgtgagaacagactaataagctgggcaacatagcaagacctcgtcgctacaaaaaaaaggtgttaaaattcctatttgctgaaaaatacaagaatggggaattttttgtttcatctcattggctaatagaccccctcttttcacaccccaaaaaatgaaaaagttccctcattgcagacctcggcctcagctgttttcaacgcaccaaaatctaaggacgttttcctgcttgtcagcaacacagaaaatgcacaaggctcctcagcaagctcacctgtgctctttgacaagctcggccgcagcgatgtctctgcaaagggcagaaagtgggctcttgcctcttggcacccctgaggccaggctgctgacacctggggcactgccctctcctaagtgaacctcttttcatgtgcatggtctcccagcaggagaaaaactgcagcaccagccagaaaagcaaagctccagcctccactccccagctcagttcacccaagagcagcaggcggccagtcccaggggctgcactgctgcaaacctgctcaaaacctccagccgccacgtggcaacttgctccccagctctgagagtgcaggaccggggcgcagagacgacagaagaggctttaaatatgcagaatgactgtctaggtcaacgcacaaaaggaaagggccccaggtgtgggagatgcaaggggtgagagggaaagctcagaagagacgtgttggagctgctggcctgcagcagctcccagggtccctgcacagctgctgagattgggcagagcaagtacacagcaagtagacaccgcagacagttagagcacactgactcctgctcccagcctgtgggcaaccgccgcacctcagcatcatgtagaaaaatcaccatccccaaagtcattttgacctcagcctgctgggaggaagagccaagccaggggccactgatggcaaagcacctgcgtggaaactggcactcgctgtcttttctgccaccttctaccagggaaccctttgagcacgggccactgtgactggggaggtggggcttgccccacgaagctgggggatctgtgtctccataatagaaaggccacctctctgtcctctgatcacagagtggattcacagctgctctcggggctggcaggtgggcaaggcagacagctcccggcagctggactcagcctctgggtggcatctcccacggcccgtggctcctgcccagcagatctcaagggcactccaggagaccgatgagggttccagtgcttccaagaagtatctagctgcctgtgtgtgagaatgcagagatgcccaagacaggagccttggcctctggcagatctagggatgccaggaattttggagtgtgagtggcaaagagggacaactaaagggacacacatgaaaacagcccactcggccccacaaaactgcatctggccacgcatgaggcacctggcactcagagaacgtcagggcgcctaaaagtgatcacctccctcccttccagcaggggcgcccccacttttctccgagtggtttggcccagtgtcctgcccatcacaaaccagacagaggacatgacttcaggctgctgtgtcctcccatgtgttagggcctccgagggcccagggctgtggcccgtgagcgtggcctgcctctatcctccgagggcccagggctgtggcccgtgagcgtggcctgcctctatcctccgagggcccagggctgtggcccgtgagcatggcccgcctctatcaagtgcagagctggaaggctgcaggagcctcccccgtcatctcatgagtcccccactcacgaccatgcagcccactcagaccacgacctgccgccacatgcgggaactgctggctccctcgtgcccgcccggggctgaggactgcacgtgcagccacagatgcatccggccctcctgccccacagcctctatgaaggccacataaatggcaccaagtgtctctgtctgccgatcagcatcccctcttggcttcacagcagacgcatctgcctttcaggactgccttgaacaacatctgggctggtcaggtggagagcgaggagtttccaggttgcagcccctatggtcctgagggctggcgtccaggatggtgggggtccagcagctctgggcagcgaggcccctggctgggtgatccaggtggcagctgaccagtggcctgggagccagccctcctgtcctcacgtggggccccatctccaaaagccagtgcagtgccctgcacattatccaacctacatctgtactgtctccccaaggaaaacgagtgtgtggttcacgtgctttaaggacgtttcccaggtgacattccaagctcccatctgtggccgcaagtgggggagtttccagttttccagatagattttctgccatgccagagaaccctccgcctccttcagagccatctcatcaatgcagtgatcgcaagcttcgatttacaaaaactcgcctcccttgcagcatttccaggtttcacacacagcgtaacaagtaaaaatggatttttgggcagcacgcctgtcctagtttgctgaggctgccataacaaagtaccagagactggggtggcgtcagcagcaaaagttgattcctcagttctggagctggaagtccaggatcaaggtgctgccaggttcggcttctccggaggcctcggtccctggtctgggaccttcttgctggggcctcggtccctggtgtgggaccttcttgctgggacctcggtccctggtgtgggaccttcttcctggccagcaagatggccgccttcttgctgggtcctcatgtggcctgttctctcggcacatgcatcccaggtgctcttcctcctctaatgaagacactagtcccatgggaccaaggcctcaccctgactagatggaaacttcattacctccgtaaaggccccgtctccaaatagccccactggggtcggggctttaccatgttgacctggggaagggggcagttcagttcgtaacatgcccttttgggaggagaaagtcaggcaatgagcagacacaggcaggaagccacgccgggctccagcagggatggcccagtgccctgtacaggcagcaggcagctgggctggaggtgggccctgggtggaggacacctaccaggtgtgtctaaactgcccctttcctacacatcttccttcgcactgggctcgccacccaagacctgctttttccagaaagcaaagcctactttggtcaaactctcatttttaaaaatcacttcatcttttcctccctaacttaattagctccaaagcactgagctgtattgaaatagatcaccacaatgacaatcctctttgggactgaaaacaaaatctatttcaacttgaacagggatattgatagaagacagggctccatgaaaaagggttaggaggagccgcttgctggggcaggggccgcatctgggcactgcagttaagatgttaaagtgtcttcggtcccagggggccgcagatgaacacagttcagcgtttctggatgtaaatcgtcaaagctccttcgatccccagcctcgggcaaggaaagggcctttctctctgtgatgccacctgtgctcaggtgtgcactggatggaactgtgtcctagacccctcagctgtgatattgatccgctgagattgtttttcatctgtagaaatcaataaattcctttttggtgcagtgttttgtgaacgggtgcactctctcacccggtcgctgtcctaagaattctccttgacttcggaactggccctccacgccccaggatccacctgccaggagacccccagtgtgctctcaaacccccacccatctgagtggcctggaaaggctggtctgaagacctctcttcccatgtctgccgaccaggctttgctctccagggactttctgggagggggagaacccacctcctgccaacggccctgctggcactccgaggacagcagagggaaggaagccaggggctggggagccggccacacaactgcccagtgcctatccttctcctgtgcccacagatgctgagctgcctggagcacatgtaccacgacctcgggctggtcagggacttcagcatcaaccctgtcaccctcaggaggtggctggtgagtgccaaacccgccttcggttcttcctgggcacgtggtttcatccagttccacaggaatggagggaatggatcaccagggcaccttccggatggcactgcgctccctgtgagcagaggtgacatttccccgggagttctgtgaggacactcagcctgtctctgttcctccttccaccaaaaccttctttacgcccgagctactcctgctctgataagcaaggagtagcttatcagtgagactctgccatcatcaagcaaagcagcatgtcctaaagcagcggtgtgtgggagcgtgtgtgtgtgtgtgggagcgtgtgtgtgtgtgagagtgagtatgggggtgtggatgtgagtgtgtgtgagtgtggggtgtggatgtgagcatgggggtgtctgcatgtgtttgtgagtgggtgtgtggatgtaaatgtgtgggagcgtgtgtgtgtgtgagtgtggggtgtgggtgtgagcatgggggtatctgagtttacgggtgggtgtgtgtgaatgtgtggtgggagtgtgtggggtgggagtaggagtgtggaggtgtgtctgtgtgtgtcagtgtggatgtgtgcatgtgtatatctggatgtggggtgtgtctgtgtgtgggtgtgtgtgagggtgtgtgtgcatgtgtgtatctgtggatgtgaggtgtgtgtgcatgtgtgtatctggatgtgggggtgtgtgagggtggatgtgtgcatgtgtgtgtgtggatgtggggtgtgtgagtgtgtggtgtgtgagtgggtgtgtgcatgtgggtgtctgcctgtgtgaatatgtttggcagcaggtttttttaatgaaatattgctcagaaccaaatattaaaagcctattaaaggtttcatggtgactggggacccagagctccctcttggagtctcccctccccccatcccctaactttatgccccactgtggctcctcagacacctccggggagaccccagtccttgactgcagggtgaaacccctggtgggagctctgtccccacacctgccccgggtgccgtggtgtggcccgctggacgttctcagggtccctgtgtcacctcattggtacctgtggtaaacctggaacactgttgacctctggttgggatgagggtttggcagagaatgttcaaaccagcgcacagccttctgggtggctttgggaggagaggtgggcgggcccaggcacagggtgactcggaccccctgcctcccgcagttctgcgtccacgacaactacagaaacaaccccttccacaacttccggcactgcttctgcgtggcccagatgatgtacagcatggtctggctctgcagtctccaggtgggtcctgcccgctgcacacccagacctctactctcgggggtcagacggaggcccccttccagggagcggcagccccatcccaccaagagagccacaggcgtggggtccccagccgctccgcccctcctagggacgcacccctgcccaccgttgtcagtcaccccatgggcgaggctgctcctaggattacgagagcaggtgagtccccgacctggtcacccccccaacccccacaggcaggccgatcctctcccaccatgccaggagatgccagatggctgcaggggcctttgtcccccgcttaccactcacccaattccaccccccctcaccccatcccaccctccgagtgaagagagcaaacacctacgccctgttttccaatccaggagaagttctcacaaacggatatcctgatcctaatgacagcggccatctgccacgatctggaccatcccggctacaacaacacgtatgtacaggattttctctttttttccttttaaaaggcaccctggctactggagggaacctgtcagcccaaccctcagagcagttcccagatggagctgtcaacgacggcctcccagcccccaactctgcctccactgacacagctcctggcttctggactttgcccagggccttgggtctccccggagtaggaactttcaggattatcaaaccccaggggctctttcccactcctgtgcgggcctggcttcaggctcaggtgcacggcagatccctggccccgccggcgccttctccaccccaggcagggagcaacacctgtccgcatgcagggatgggggctccacacccccctctcaggagctcgcctctccctgggcaggctcccagctggcttccgcagggaaagcacaggcaggagccagaagagagcagaagagggggagaagagggactgcagagggacaggaggtgggagtgaggtgtccctcgtggggccagggatcagaaggacagaccgttgctccactcctgcctccacaggcacagagttccgccccatgtggcggacaaggtccaggccatgggcttgggtctgtgtcctcagtggcgcagcagctctctctgttgaactgtgtgtttgtgtgatgtcatcacatgcctgagagctctgctgccatgtgtcagcgcctagtgggttccgaggtgtggctgtcagcgctcctcccggggccatcaccatgcacacccatctgttccccttttgctcatttcacactcacagtggccggcacagcacaggtcagcagaggccttgaccacagcatcccagtgaacctcagcctcgttctgcccacctgcctctggcacctggtgacgtttgataatttcacaagaggccgtgatgcctcagggcctgtcccagggagcatgccgcttcctcagaggtgtctgtctggtgggactgcaggagcatggggacgtgcagttgcaggggcagctgagcggcaggagggacctcctggccaggccagggcacaggcagctcccccagcccccacggcaccttctcctgactctacttgctccacttacatggctgggtgttgctcccccgtgcaggtacctggtgagggcgcctgagtctcccctcactctctccttgcctcccaggtaccagatcaatgcccgcacagagctggcggtccgctacaatgacatctcaccgctggagaaccaccactgcgccgtggccttccagatcctcgccgagcctgagtgcaacatcttctccaacatcccacctgatgggttcaagcagatccgacaggtgtgtggggtgagggccctcccaccggagtgggggcacattcagggacagagcagcccccactctccattggctggaagctcccagaagctcctggccacagcagtgccctggggacccaagggaacccctccctccttcctcacctcctccagggcccagagtggagccccaaaaagagggtaccctcgccatgcgcacgtgcatcccactgacctgcacttcccagcctgtatttaattcagccttcactggctccctttgagataaatcctttgtccctcttccagcccaagaaactgaggcttagcaaaggtagggagcctgcccaaggaggggacaggccctggacagacacatctgctgcatccaacataggagagctgccccctgccccataaccccagctgctgtcacctgccacccacagcccagtcagcccccttccttttatttatttttttttcttttgagacagagtctcgctctgttgcccaggctggagtgtaatggcaggatctcggctcactgcaacctccacctcctgggttcaagcaattctcctgcctcagcctcccaaatagctgggattacaggcatgcgccaccaagccggctaattttcggtatttttaatagagacggggtttcatcatgttggccaggctggtcttgaactccagacctcaggtgatccacctgcctcgacctcccaaagtgctgggattacaggtgtgagccaccacgcccggccaccccttccattttagataagggggctttatgcctctcagggcgtgatgggaggagagtgagaggatatctgcgtgagaggaagatgacctggtccacctgccccagacaaacacctccagctcaccgaaataacgccccattccacacgggaattcctcatcaaaccctcactctctgacatttgcaggggagggaagctctcggagtaaaccctgggagaaatgtgttgggttgaatagcagcgtccttcaaacaaggtccacctcccgtgaatgtgatcttatttggaaaagggtctttgcatttgtacttgttaagatttccagataagatcagtgtggattgtctaagggggccgtaaatccaaagactagtgtccttggacgaggagacagagtagaaaacagcccagacacagaggagaaggccgcatgaagacgcagtgattggagatttgagtgatgcagccccaaactaagggacttcggggcccccaggagcaggaggagacaaggaaggaccctcccctggagtcttctttgagagcagggccctgcccacactttgatcttggttctggcttccagaactgtgagagaatgagtttgttgttttaagccgcctagtttgtggtactttgtgtggcggccccaggacactcacccagggcaccgtcttctgcggttccacaaggcagacctcagccattcgaagtctaagtggcttccttccagaggcagcaagaaagactgcctggacttcagcactgggaagatactcaccaccctccaggcgtgctgctgagcctccctttatcagagagcagcagcctcttctaccatggctttccaatttgtctacgcttccaggaagttcaaagcccagtgtaaaaaactgaagtcagtgaagcatttggggaagctccgaggaagcagcatgctccctgggacggggccctgaggcatcacggcctcttgcgaaattgtcaaatgccaccatgtgccagaggcagaggtgggcagaaccaggctgtggttcattgggatgctgtggtcaaggcctctgctggcctgtgctgtgccagccactgtgagtgtgaaatgagcaggagaacagatgggtgtgcatggtgatggccccgggaggagcgccgacagccgcacctcagaacccactcggcgctgacatacggcggcagcgctctcgggcctgtgatgacatcattgcacaaacatacacaattcaatagacaatttacagtcattattgaatcactggttcccagtacagttatctcccctttatctataggctctctggcctctcctccatgtttgtgcccctccccaccctgcaagcaggtgccctgtgtggctacgataagctgtggcaaatcttcgtctgcagtaggtcaaggagcaaccgtgaagagagaacgctgcatctgccactgctaccccagtggggagctcctccagggacaggacctggggaatcaaagcaagtgaacgccccttagtgtaggcctcgtcccactgagccatgtcggagagcatcccgcaagagaaggaggcggcacctgattggaggagcagccgctctgcacaggggatcgttctcgtgcccatccaccgtggggacacaccagcattggcctgcttcaaatgcttcactgactgcaaaatatgactctcctctgggggtaaaattagttgtcccacttttttaaaaatatattttgtcatggaagatttcaggaataactgaataaatgcttcactaataacacaattaaatgtttacaggaaaattgaataattcaagatacaagtgatccccccaaaaaaatatatatatatacagttgaaatgacctagattgatgggtttgggttttgtatctgatgcttgttgttttattttcttggaagaggaaaacatcatacctggcacagagatgtgttctgtaaatgcttgtggggtgggtgggtggatggatggatggatggatggatggatggatggatgggtggatgggtggatggacaaatggatggaagggtggatggatggatgggtggatgggtggatgaatggacagatggataaatgggtggaaggatggatggataaatggatggaagggcagatggatgggtggatgggtagatggatggaggatgaatgggtggatggatggatgaatggatgggtttttgggtgggcagatggatgtgtggacaaatggatgggtgatggatgcacatatgaatcggaataagagatacatgaaataatgtgtgcagggggctcagtacacagtaggcctccgctgaataattgttcagactatacccgtgttaacacgttgttctctcgctatttagggaatgatcacattaatcttggccactgacatggcaagacatgcagaaattatggattctttcaaagagaaaatggagaattttgactacagcaacgaggagcacatgaccctggtgagtggcttattctgcctgggtgggcagccaggcggtgggctggcgaagcaggtcatccatccagctcacactggaagccaagaagctgaaattattagtcttcttggaacaaggtgtctataaatctggttttcaaggtcatgactcttactaggaaagtccgggcagggcctccctcctgatgggtcctccttcatggtcagaggcagcattctcccattcctccatctcttttggatttgaaggagataagtgggtgaaggccgtgcatctcgctctgctttccagagaataaaaccagctctcccatgaaggcacagccccagcatggcactctgaaagcccacctatgtgggggcaactccaacacagctcccgctccccaagccagcatcccccaccaggcccacaccatagcccagcacccctccataaccaggacaaggtggccagagaaggggtagggggcctcccccatgagaaggtgcacttaggttgcccagcatctgccttttggaaaggacaggcactgggcacaccaaggcacacaaggaccagagcacgactcatgcctggaatccagcactttgggaggccacggcaggaggattgcttgagtccaaaagtttgagaccagtctgagcaatattagcaagactccatctccacaaaaaaagaaagaaaaataaaaaaatcagtgcatatctgtggtcccaactgcttgggaggcagaggtgggaggatcgctggagcccaggtccaggctgcagtgagccatggtcgttccactgcactccagcctgggcaacagagcaagggtctgtctcagataacagagagagagagaggtgcatgagaactgccctcccggccttcagagagaaagctggttttgtggagccttgtctaagcatcaggtgcacccctggcattcttactctgaaatttgattatctgtttaaaatcaatagcatcactttccacctccagagaggttgaaagatagggaactctcggctcaggctgaccttctaaccatccagtcccagtaggtagagtcattaggactcatcgctctctggagctgaggtgcagttaattcccaaagactgtgcgagaggatgggagctcccgcaggcaagggctggacagcaggcaaacctccccaggccagggccaccagaagccccttccctaagagggaaacagtcacatagagcggcttcctggcaagcaagtttcttgctcctgaaaaaccaagggaaggagggaggcgccgccttgtcctctaagatatgaggaaggcagagatggacctgcagtcaggggtgacccaggccccgccgatgccttcctcctctgaggtgggaggagaggtcagggaagagacggggaggggcaggatgccagaggatcgggtgccaggtggtcaggacaagtgaacccagctgaaggtccccactcccaccccacccccagccttacacactgcagctgtgcagaccagaggcaaagcgaggctcagagcccagggttccgtttatcccaacgacctgcaccgcggggtcagatgacaagcagcacggccaggcatcgtctcactgctacggagccccagacggggctttatgaacacgggtggaggacagaggttggggtaaggtctcgggggaaaggttctgattcaaaatgggccccaatagggaggcctctgaggatagtgcgggccagcgtgggaggtgtgaggtgcagggagtgtggccggcagggcctgggaccttgaccttccccagagacactgctgccctggccctgccctaggtctggtgtcgggacagctccactgaggccggccaggcacaggctagtcattgcctctgatctggagccggactccacagaggagtcaaagaaaggcctgaatggcttcctgggaactgatagggcagggaaaggaagggcgaccacagcaggatcccttcgaggtcctgccgaggttggaaggcaggatccaccaagcatcatgcagactccgagctgaactgagctgctcctcacctagtcacgttccccaaaccagcaggtgcagcccgcagcccgggggcatgtgcctcagctgggctttcctgtctaatcagcttcagagcctggatggcaaccaacactttggtctggaaacctggtgattccagacactcatttgtgcccggtgcaggcagggccacgggacgccagccctccacctcttgtcctatggcgacatccgggctagtttgggtggaagctgctgcattcctgggcctgccctatctcctcctgaagctcctatggcatgcccaaccctggccaagctgagacagagctacctgtcccctgggaagatgagcaatgcacccacctagggaacagcagaaaatagggggtgaccaggcacagggcagtgcttcaggggatatcacctgggctggggtggccagaaaggctggaaggaggggacccaaacaggaccttgaaggttcattctccattgagaagggagcctgtcctccctgaaggcagccaagctcagttgcatggtccagcaggtcctccgtctcttcctgcctgtaatggcaagtccagacccgagcagcagcagcaggcccgtgttctacctcctgttacctcaattccaaaatctcttctttcagctgaagatgattttgataaaatgctgtgatatctctaacgaggtccgtccaatggaagtcgcagagccttgggtggactgtttattagaggaatattttatgcaggtaagagtcttgcagagcaatcaagcctccagccactcttattagccccacttagtaagggtttgcgttaaacgagcacgcctgggtggtcccgcatattccccgggctgccgacagttcagcctccagaaagccttcagggtaagcgtacatcagaaacaaaataggttataatttgagacctgaaagacagtaacaatccagaaaagctaatactctaaaactgtcacctgtcactgctaattgagccattattacaagcagccttgtcaaacaaattgcctgaaagtcaagaagcaaggactgcagaagcaggagggggcccaggagggccgagacccagcaggtcagctcacacagatggccacggggaaggtcggggacatagaaaaccaagccagctgaaaacaaccaccaaatattaatacaacagcttgatgaaccctaggagaagtcgggaggctttctgcaggacgctgctgccgtcctgggatacatccatccaactcacctctgcctatctctcaggtcggtcttcccagctagacctgcacgcccagctctgtttagcactgaagatagggtcaccttctccttgttcttactgagacacatttgtggtgtggtttggttggttggtggttaactggcgcatcttgtctttctctgagaacagcgatctggttatggggcatttctgtctctaatgtcactgtctgctgcattccctgcagagcgaccgtgagaagtcagaaggccttcctgtggcaccgttcatggaccgagacaaagtgaccaaggccacagcccagattgggttcatcaagtttgtcctgatcccaatgtttgaaacagtgaccaaggtgagtaactgtcaccacatgtcacacttgcttacactcagatacatgcatgcacacacaggcacacacacatatacacatatgcacacaggtacacacagacacacactcatgcacacacgtacacagatacacacagacgcacatacaggcacatacacatatacacacacgcacacagctacacacaggcacacacacaggcacacacttgtgcacacaggtacacaggcacacaaatgcacacacacggcacacacaggcacacactcgtgcacacacatgtacacaggcacacacaggcacacaaatgtgcatgcaggtacacatgcacacaaggcacgcaggtacacatgcacacaaggcacacaggcacacacaggcacacaaatgcacacacaggcacacacacacacacacatgcacacaggtacacacaggcacacaaatgcacatgcaggtacacatgcacacacaggcacacacagggacacacaggcacacataggcacacaaatgcacacacaggcacacacatacacacatgcacacaggtacacgcaggcacacacgtacagaggcacacacatgcacacacaggtatgcacatgcacgcacacaggtacacacaggcacacctgcacacctgcacatcctgagcagcctcttccccggctgtcgtggtgaccgctgtccctgttccatccagagcctgctccccacagcctggcccgtgaccccagcatctcccactctgtgctgcactccctgccttgccttgctgggccctggggggcccctcactgccctcacccatcgctgccggccttcaggaccctggaggcagcactggctgtggactctcctgtccccactctgcgtcccagttcctcacctgtggaggaacccctgagctctgtgccctcgagctgtgaagcccctgtccagctcccagtctcaccgcacccagccaccgagaccttgctccttgcacacagctcgttcctgcccagctccccccagggcctctgagctgcctgtggccccctgccaaggcccccacctcaaggcacccccagcatgtccaaaacaggcccatctcttgttccccccggggatctgggctcacagcctcacaccctccgaccttcctgggctcctacgctgcgcatccttctgctctagggcatctcttggagccaacccacccacttcccactcccaggaccctcagccgggaggctgtcagctcctttcccctgccccgtgtctttgtaagaacctcccaacctgtcccccaccctcatctcacgggcacgggggacacaggaggcaggaaggggactttctgtaggacctcatggagggtgatgagggccagagacagagccgcagtgggtggaggcagcagagccggcacgagggtgtccaggagctgggactggcccagaggtttccgcacggagcacctgacacctgtttttctccgacgtttcccattgccttaagaacgagggactctgaataaatccgtgtgtctctcccagctcttccccatggttgaggagatcatgctgcagccactttgggaatcccgagatcgctacgaggagctgaagcggatagatgacgccatgaaagaggtaaaacacactgagaagagcctgccttccttgcggcaagcaggcacgctgccctccgcactcccgactccagaagcttggacgtgccaagcagggcaccactgaaggccccgtggacaggcacacgtgtaccttccatcagaaagcctggctcagtaaaattagggaatgcgatgagggaaaccaaaactgcattcgccaagaacacgtcaggtctcagtaccttcgagggagtttactggccgtgcccttcacaagaatcacaactgtcacccacacctgtggacacccaggtgtctttgggtgtatcagccgccgttagagcatctgggacccctcagagtacagtgcctggcctggccccagggctgacttgttcagaggaggccatggggtagaaaggggccctcccctggcacggggacaaagcgaccacccacctgccagctcccgggcccagaacacacaccggcacctctcaggggccagggagcctggggctggctttaggttgctgctggatagatatcattttggaggaaggggtccaggtcacagcctcagggcccacgcagtctttctacggattccccacggctgtctgctgtcctgctgcccatggtgtggcctctgcccctcccagcctcctgcctcctccctccagcgcccccaggcagctagaacagtcttactactcctgcagggtttgacccctcctggccttggccggtgttgcctctgccacccccgctccccacagtgccactgaagcaccctccaaggcccgtcagtcagggctcccctagttactgtgcccaccaccccgtcttttctgcctgggcgctcctgaagcccatgtggcccacaatgcccttttgagcactgagccattttccaggcgtagccttgggttggtctcatctccctcgactgacggccccgtgctccccatgcccacacccgcctggagcgccatgccaggcacatggtaggcgctcagcaattgcttaggagtccactgaaaatccagaccagctgccctgacttctccagttgatgtctcctactggaaagtcacagaaaggtctctaaacctctggaaggctgagagcacttatgcagagggacagatgtagcaagaaggcttcccccactccacaaccccgcaagagagctgaaggggcttctgcctctctcgtgggccctccgagagccatagccctgatggccttgagtctctagtcctgagccctgctgcccagtaggggatagtagggttccttaaggcctctgccttcccccctgtcagcccccacaaaaaggagagacacgccaaagaggtgaaaaggccaagcccaagccgcaggctctgcacacaccaccagtccccgcggctgtggtggctgcagctgggtgagctcactgtccaggccccagatgaggcaccaagggtagcgggacagggtatgcagagctgcctctgaaaagcccatgtcaggagtgcttgggctcagaggggctggggaccacaggctttcacgttgcagcacctccaggcaacagaagctgctgggagagaggcagacactcccctgctgtctcctgctccctgacttggccttctctgtactctgttccagttacagaagaagactgacagcttgacgtctggggccaccgagaagtccagagagagaagcagagatgtgaaaaacagtgaaggtaatgcttgctctgctgaagtggcatctcagcgcatacaatgattctgacaaaggacagaaggaaagaggaaggggagaaaatctgaattttggaatacctttaaatgaatggaactttttttttttttgaaactaagtctcgctcttgttgcccaggttggagtgcgatggcacgatctcagctcactacaacctctgtctcctgagttcaagtgattctcctgcctcagccccctaagtagctgggattacaggcatgagccaccatgcctggctagtttttctatttttagtagagatggggtttcaccatgttggccaggctggtcttgaactcctgacctcaggtgatccacccacctcggcctcccaaagtgctgggattacaggtgtgagattgcgcctgaccaaatgaatggaaattttatttcttgcaactaatcattagaattaggctcttaaggctggtggctcatgcctgcaatcccagcactttgggaggccaaggtgggcggatcacttgaggtcaggagttcaagacccagcttggccaacatggtgaaaccctgtctctactaaaaatacaaaaattagccaggtgttgtggcgtgcacctgtagtcccagctacttgggaggctgaggcaggagagtcacttgaacctgggaggtggaggttgcagtgagcccacattgcgccactgccctccagcctggagaacagtgagactccatctcaaaaaaaaaaaaaaaaaaaagtgaggctcttaaagaaggggaacatgctttagttaatagaaaaacatcaataattagcatatgtatcacttataagagtaagtactttttaaaagtgcaattgaagtactgaaaacttttcacaaatcacgtgtttgctttatatggctttgagcattttcctctgtacttgttgatactagtcattcagctcacggggaatgcagagcagccgtttgttcacctcataataaggtcacactaatggccaggcacggtggctcacgcctgtaatccaagcactttgggaggccaaggcggcggatcacgaggagatcgagaccatcctggctaacacggtgaaaccccgtctctactttaaacacaaaaaattagccgggcgtggtggcgggtgcctgtagtcccagctacttgagaggctgaggcaggagaatggagtgaacccaggaggcggagattgccgtgagccaagatcgcgccactgcactccagcctgggcaacagagcgagacttcgtctcaaaaaataaaaataaataaataagccgggcgcagtggctcatgcctgtagtcccagcactttgggaggccaaggtggacggatcacaaggtcaggagatcgagaccatcctggctaacacggtgaaacccttctctactaaaaatacaaaaaaaattagccgggcgtggtggtgggtgcctgtattcccagctactcgggaggctgaggcggagcttgcagtgagccaagatcgtgccactgcactccagcctgggtgacagagcgagactctgtctcaaaaaaaatataaataaataagtaaataataaataaggtcagactccatctcaaaaaaatataaataaataaataaacaataaataaggtcacactctccatgtctaacagataattcaagagatagtgcatcaagcatgcaaggctcagggcaggacaaacgggacatggctcataagaggagctgcaacaggctttggcatccaacacacctggttttgagtccaggcttgccaattacaagccgagagatgtgcacaagtgtcccagcctctctgaacctcagagccccagtctctaagccagaggcaataataccattgttactgctgttttagtgattaaacagtcaaagtgcttgtctggtcccgatgaagtgctcagtcaatgttgccatttaatttttaagtcagttcatatttttcagtgggtcagaaaagagatcaatattgttttactttgtctaaatgtgttcagcaatatatctgatggcctctttcttttaaaatggtctgtgtgtcggccgggcacggtggttcacacctgtaatcccagaactttgggaggctgaggtgggcagatcacttgaggtcaggagttctaaaccagcctggccaacatggtgaaaccccatctctactaaaaacacaaaaattagccagctgtagtggcgtgcacctgtaatcccagctacttgggagccagaggcaggagaattgcttgaacccaggaggcggaggttgcagtgagccgagatcacgccactgcaccccaacctgggcaacagagcaagactccatctcaaaaaaaaaaaaaaaagtctgtgtataatcctgtaacgtttctgcgactgctggcacttttttttttccttcttttgtgagacggagtctcgctctgttgcccaggctggagtgcagtggtgcaatctcggctcactgcaatctccacctcccgggttcaagcaattctcctgtctcagcctcccgagtagctgggattacaggtgtgtgccaccacgcctggctaatttttctatttttagtagagacagggtttcaccatgttggtcagcctggtctcgaactcctgacctcgtgatccacccaccttggtctctcaaagtgctgggattaaaggtgtgagccaccgcgccctaattctaacaaaaacaaatcagtcatcgtttcccttcttccaggagactgtgcctgaggaaagcggggggcgtggctgcagttctggacgggctggccgagctgcgcgggatccttgtgcagggaagagctgccctgggcacctggcaccacaagaccatgttttctaagaaccattttgttcactgatac

SEQ ID NO: 34 - DNA, 383432 bp, Homo sapiens
atcttcagacatcttttgttaaaggtgaacaattacttaatactgtgttatggcagcactctatacgccccaagttttataaagtagagtcaagagtgatctgagctgggaaactcacgcaattttagttctgcatgaaagcacaggctctccccactggggaactcttttgagtaggacaaaaagctggacctaggacccagcccagggcgtgagagaaaaggaacctgggaggcaagagcggccggtccggagccgggtcctccgccagctccgggcgggcgctgcgcacagagcccaagcccccggcggaggcggcgcggctcgaggcccctccccgccgccgatgcccgggcggctgacgccgagcagcggcccggagcggtgggggccgggctggcgggcacgagcgagggcagggcagggggccggccgaggccacttacggctttaaatatggatcgcaggctcgcgctcgcggcacagcctccgccgcggccgccttccgtgagcccccgcaccccggcttgctcccgaggggcgcctgggctgggctccactgctgcagtgttagttactagcaggaacatcagagatccccataaatatgcaggagctgcaggaggcaaagtagagtagacgcccgcgctcttacacactcgctcgccgcgcaccacacaggctgtgtagacatccccccgcgccacctttcccctttcctcgcgggccgttcaggttgcagtcctgcctgctccgaagaccctcccgccccagcgcctttgccccgctctcccgcgctcgcctctctccggagcgcgcacccacccaggcggcaaagttgtgactacttgggcgcgggtgactggcgccccgctcgctccgcgcccggcgcagacaacttcccgcggctcggccccgccgcgtcccgggctcgcgcctccagggattccgcggccccccagcctccaaccccggcggcgcgccgggcagcgcttcggtggcggcggcggccgcggtggcagcgaaggcggcggcggcggcggcagtggcagtggccgctgcagccccacactccgccgccaaactggaggagcgacggaagccagaccccaggaggtgagcgcccggccccggcagctgccgggagggtcgatggggtccctcgctccaaggcggaggcgggcgcgggcccgggggccgattccgtagggcgcgcaggcggcctcagcgcgctcctgggagggagagagaggtcaattgcgggccgggcatcccctgagctgggcgcgggcggtgtgtggaggctgcttccgcggaaaagtattttttttccttcttagggtttagaggaagagtttgggtggtctgcttctccctcactgctaagtcccctgcgcgcaactgggcgtctttacgaggactgcggggccagttctgcggcgggctgggctcgggctcagtgacacgtgtgttgctgtgagcctgggtggtcgccctgtgaccaggcacctgcttgagaggaacacatccctaaacccatcacagggggagatttggggactcttggtgctaccgaggccgcggcccccacttcactgccagctccaggacggagcatttacatctctccctggcacgccaaaggcggggggtgagtcaggcagattctctgcaagtggcacacacacatttatttgcaatggatttggctaggggaggcataggttaaactggaatttctcttggccagcgacaacggagctctccctcaggtactgggcagcatgtgagtcttggcaaagagaggtgatttcttttttcttaagtgcattttactcagccgttgccagtccgttaataagtcaccagaggaaggcaggacctgggaactacatcagcaaaccgcagcaagcaccataaagacaaaagttcttatagaacaaaaagaaaaacttgaacttgacgtgaaagatggaggaagcagttctacctctcttctatcacttttttcagcgccctgtaaaactgtttttttctatccttccttccctctcaaggccctaccttctcagcataattgatcgcagcaagctctttccaacttgacactgaagagcagcgacccctttggcttaccctccccatttcttttcctggttcgcttcagtgccctggaaagttgctcctaatgagaaatcaagaacactgggctgtactaaacgctcattgtctcaaatcctgcagcagttcctttcctaagagacactgtgttgtactgtatttctcttttttcttgtatcttgggacttggagttgtaatactacctgaattaaattaattaaagtgtacattgctcatttgggcttttttttttcattgtgatttcagtagattcgtcaatgccattagaacaatattcagtagctttttatagccaatgtgatgtcttttgaaaacgtttctgactacagctctctttcttgtgtctttcatattagcatgtaaataatttacatggtcattttagtacttagactgaagatattagtataacttcattcaaaggaagtgtgcctgtttatttttctataacttttatagctgagaaaaaacttttactttcattttaaagttaaaagtactgataggattctggtctttgtggtagatcttgaaattgaatgatttgttttaactgtatcccacactgtcaagtaagatgacagagaaactctcatatatgtagatggagacaggaaagcagtaccactacattatgagctgttgaggcagagaacatttgtaggagtgggggtgacaaggacaagatgggatattttgatagtcccagccatgttaaaaaaactgaaaactaagaaacccccaacattttggatttaagtgtacttcagaatgagggttttggtgccatttgctcttttggggtcatttctggagacttaaaaacatacattagacaccttacccaatgagattgacagaatgtactctcagtttagattaatgtatttcttttagttcacgtagtcaatattaaataattttagatgtttgaatgttagtactatgatttcagtcttctaaatgattaagagacattttggatttacaaaaatgttgtgtgaaagaaataaaggcaatcagatttagaggaataatgcgatagaaatcgggtaacctttgggacaacttccagtaggccctgatggtaatctcatttttcgctgagtgctggcaggtacagttttgaggttctgatcccttgttccgataacaagagtgatatctggccatagcttacatcttaaaggaaaagacaacacttaaagaaatgcacactagctggtgaatcatgtaaataaacaggattccttgcctgcctctgtgagcgctgtagacctcatatgaggactgctattgttagaggagaagcgtcctgagagactctgctggacttaagtgtggcgagatacatatctgtttcttggagtttctttgtgtttatttaaaataatatgaatgaaatctaagaccagagttgatagataagattgggagtggaaagaacaaactgagaagaggaaaatctaatgatgattaacatttctaagtgtttttttcttgattgctaaatgaaggaatcagaatgcatgatttgatgggacaaaggaagctataagcagaacatggatctcagttgatgctgtttccaaggacaacctgtgacttatgaaatttatgtatttttagggagtcatttagcaaaatggataaagaacatccaggaagctagtaagactttacaaaactggatcttactacttttacataatgtaggaatcttagaggaaaggaggaataaagttttatttgaggtcagctaagttgtattccaaatacattttgcctttctcccaatatataaactcttgatacgtttgggtcacaaaaatggaaaatatgctgctgttcttctgacatgaagatgatctttttatcctcagtagtgcacagctttggttatttttccagcaatagggatggagtctcctttactcagttctgtctatgtatgtttacacacacacacacacacacacacacacacacacacacacacacagacacaactcatttgtagaggtggctgatttaattttgtcggaagccatattaactactttcgtaatacttctgtggcaatggcttttattgcatttggtagtctcagcagtgcaatgacatttctaacaagacattgaaaatacaatgagagccaggtgcagtggtcccagatactctggaggctgagttgggaggatcacttaagcataggagttcgaggctgtcatgtgctctaaaattgtgcccataaaattgctattaaattgtgcctgtgaatagctactgcacctcagcctgggcaacatagggagatcctgtctgtaaaaaatgaacaagtgtataaatgctaatggctttacttgctgtggcaaaggagagataaaactttttcttccaatcttcctaatgatgccaataattttattccttaatgataatgtcttacttgatgctgaatatagacggttccagacttatgatgttccagttaaaatttttcagaattacaatggtgtgaaagcattcacattcagtaggatctatacttcgagtactggtaacaacattctgtttttcactttcagtacagtattcaattaattacatgagctatccaatagtttatttgtaaaataggttaggctttgtgttagatgattttgcctagtaggcgaatgtaaatattctgaacacatttaaggtaggttaggctaagctatgatgtttggtaggttaggtgtattagacacatttttgacttgcaatattttcaatttatgatgggcttatcaggacataacccaccgtacatttaggagcctctgtactggaaaaagatagtggtagaaacagtaatgttgaaactatgtgcctctgtagttgtttgtgtaaaccaaaacatcatcttgttcttctttcctgaaaactaagtaaatataagggattgttatgcttattgagatgaagaggaaactatgacagagaactctgtatgcttttcttaaacttaactacaaattattggtggaggtaggaataagtattttaatcttttgactggtgatacatgtttgtcgaatgactgtcaatgaatgggtgaatgtccttttagtcacagcagaagatactaaagcagataaaagtttatcctgttttaaagtgatggtttccattttctgttggtaattctgctcagtagcagtgcccacttgccgcaactttatttcagtttctgcaatccagggagtatttcatgagagaagaattttcagtttgggtgtaccagttttagctaccatcttgagagctaacttttgtttttcatgtagaatgaacatagaaagaaattaagtgaaattaggatgttaaaggaaataaataaccaccaactgatattttggagttttgtatttttactttgtggatagttgtgtggaaaaggtatactccttgacttgaatttaactcgaatttctgtattagaaaccttaagaaagttgtaaataaaactcctagtatgcttttttggggattaaaaaaatcaatatgaataaaaatacaaaatgagaaaggagtatgttatgtttaacaccgctgtaatattctatgggtgacacaactagaaaaatctcttaatatattgaagacgtcttcttatttaagaggaaattggtgatttctttttttaaagtatattcactgattaatattcttcttaatactatttgcaagtaagtaaacttgtgggatatggacttctatgttagttaattctagctttggcctggagatctgatattcactgataagatctagtaacaacttcatctatttggaactcctacatttgtcatgttccccagcaaaaaagtctctgagcaggcaaaatagagggtaaaaaagtaaatacattaaaaagaattcactttactcctaggacatccctcagagtcagtttacttttaatacccatactgttctatgattgattataaagtttttaatcccatagcaaacagtaaactacaaagtagaagacgaaaatgggctttattggcaaatacatagaaaacattgaaaagtgcctgaaaacagcgtggtagtaaaggaagaggtagacagaagtaagaactaaagcaaacacagtggttgaggactatttagatttggactcttatagcatcacttcattacacccccttctccctcccccactttctcagctcttccttattttcccctcccctcttccttctgttaagtttttattgaaatacatatggtcagaaaattgtatgtcatcataccatcagtggacatctcagcgatttacctaagtgaacatgtccatataaccagtgccaagaccaaaatatagaccattgctggcatccggaagtctcctctaactccctcttcaagtcattacttcccaccaaggtaaccactctcctaatttctgagataatggttactttcacctctcattgaactttctgtcagttaattacacggtgtgtattcttgtgtgtgacttcttttgctcaacattatgttgtgagattctttcttgttttgtgtgaagcatcagtttattctcattgctacatagtgttccactttagaagaacgccacagtacatttatccattttgttcttgatttactaattttgtttgggttgtttccagtttttggccattatgaatagtgatgctatgagcattcttacgtatgtcttttggtgaacatgtcgccctgtctgtcgcccaggctggagtgcggtggccggatctcggctcactgcaagctccgcctcccaggttcacgccattctcctgcctcagcctcccgagtagctgggactacaggtgcccgccaccacgtccggctaattttttgtatttttagtagagacagggtttcaccgtgttagccaggatggtctcgatctcctgacctcgtgatccgcccgccttggcctcccaaagtgctgagattacaggcgtgagccaccgcgcccggcccatgtgggaatttcagttgtgtgttttcccagtttaattgatgggacggttttagtagatagtgccttccttcagaattggtgctaattcacattcctaccagcattgtgtgagagtatcatctaccccacatccttacaaaaggggttttgtatgtcttttttttaaaaccattctatcggatgtatagttgtatcacagtgtagttttaatttgcatttctcagagtaccttgtctatcttttcatatgattattgtctacactttttcgtaaagtacttgttcatgttttttgctcctgaagtttttatccagtatcttttcccaagtaacgaagattttaatacttggggagttcagttcttttatttgtttagaagactcagctaaccaggcaaactcattcaccaatgcttccacctgataagtaaactcatgggataaagagattacaaacattttgaacttgtaaagatgatagtctggatcttcgaaactttatccctaaaaaataaaaaacccaaaccaaaacaatattaaataactttaatacagtactcagaaacatgcagaacttgtcctcaatgctttacataaaagtagagcatcttgtaatgttgtattgcccaatgaccaatggagatttgtatttggaaggtatgaattgaacatctagctctcttacttattagttgttttgagaatttaaaaaacatccgtgtcttttttcattattaaaataattataaaacctcattcacagaggagttatgaggaacagataaagtgatctttatgaaatcttgttcagcactgtaaatggccatacatgttagttattattattgttattgtattcttcaacattccttattcttgagttgaattatgccagcactgagaacagttcctggcatattaataaatgtttgttggctgaatgaatgaacacatttaagtatctttcttaaaccgttactctgagtgactcaagctgtgctttatatattttttttctctaggacttttactttttattgctgaagctgagttggaaccaaggttcatcaagcatcatattgaaaaattgagtctaagagccagcagtttgagatcacccatttctatatagttcatattgaatttatgcctccaagtaacacacacgacttggagaacccttgaaaatgattacactgctcttcactccatgagtgatccccaaagcttacacattgaatatttttagcttctataattagaatggccacaaatttccagatttaaaatattacagtgggttctccagtgctaatactttggaaaccatgttttgtgtaaaattgaacattcaaggatgaagaatagctgaaaactggagcttttatagtaccttttcagcttaatataaataaggtgtttcacagatatgttgattataatatgaaagcaaacaacatacaccttatatacatttgtgtaaagcaacaattcttaaccctttgataggtctgattttcagctttggcttgatgttgtgactattcaaaaagtggtttggaggcatatcatttttatttttaaattaaatagaattaaaatgtgtatgatttttgttttggggaattacatgatcttcctttaaataacagtaggtatccctttgaaaaatcaggcttgcagcagaagaaacttggatttctatatagaaatctagttagattttcttacccaaagactgatgttcttttccttttttcctgtatttgagtttttttttttttttttttttttttaaagagcttatgggggtcttgggtgtttgctgccatcatttaagtatagctgttctgtggtactcagaatactgagcatgtaacattttacttcagaataacataagtcagtctacattttataaggacgtttacatattaggtagtataccttgtgtgcttgacgcaaatgtggccaatttagggtgatttagtggaaaatggaatcatctggtatagtaaacagcttttgttttctgttacagacataatgttaggaaaattgaaataaatacaaggggtagttatggtgaaccctgttaaactactgttttaaaaacagtgaatttcagaaaaatctcatctgttctgagtgatttcattcctttgagaagttaaactggctctttttaaaacaaatgcatccaggcgtgcctggttattgctttatttaaagctggaagcaaggctcctttcggttcttacttgacacatgggatttaaaaaacaagggtatactatggatttagggaaggatacctgtttaacaaataggattatgacaattaaactatctaaactgaactccaaagggaatgggattagctcttccatttcttgtgcccttcagcatggaaatctgttggccttattgaaatattcctaatgtctctaatacaaaccaggtttttgcaccttctaccccagaaggatcaggaatgaagtcctgaaagtgatatttggtgaaatatgttttgttctgagtgagtaatcagtgggaccatcagttaggctgaaagtttcatggaatcttgagtgttgatggctgcactcctgaaactctctccttgagtactgtgtgaccacagctgcagtgagacatcacagttgaactgcttcacaaattccttcaattcctttgacctctggagactctgtccttaggaatgtgagatgagcactcacgatgttagcagcgagtagggcctcatggtagggactttgctaaagtactaattacagttgctttggaaaatggcagagcattaacgattaagcagagacacgcagctcacacatttgcactttcacaggttgagctcctttgccagggaaaagggagaaggcggataggaaatgtctcaaaagatttagataaactagattagataatttctcttgaaaaatatattaagaaatgaaataaaaacaccactccaaaagcatcaaaagaaaatatagttcaaacacttacctatttttattgccaaaaccttaggcagtgaattctgcagttgaattgatcactttattgttttctgctttgcactgccctttaattgtttcatatgtgttcatgttgtctacacagtatactttcccatggtcctcacggtggccagaaaatgcttatttaatggagggatacttagtatttttaaaatgtgtactggctgggtgcggtggctaactcctatagtcccagctacttgggaggctgaggcaggagaatcgctggaacctgggaggcagaggctgcagtgagccgagattgcaccactctactccagcctgggtgacagagcaagactctgtctccaaaaaaaaaaaaaaaaaaaaaaaaaaaaaaaaaaaaaaaatgcagacagaccagagatgccaaattatcttatccaactttatttaaactgtatttctggctgggcacggtggctcacgcatataatcccagcactttgggaggccgaggtgggcggattgtttgaggtcaggagttcaagaccaatctgaacaacatggcgaaaccccatctctactaaaaatacaaaaattacccaggcatggtggtgggcacctgtaatcccagctacttgggaggctaagacaggagaattgcttgaacctggtaggtgggggttgcagtgaggtgaggtcgcaccactgcactccagcctgggcgacagagcgagattccgtctcaaaaaaacaaaaacaaaactgtatttcttctggagatattcctccaatgcagtagctgtgatcattgctattaggctttttacatactttttgtgaaattcattgtaatgaagtttggaacccatatctttggggatgagtctttgttattatggtttgtgatatgttatagtttcttggaaaaattaattaacttattttgatatgactgtatttgatctgttctttgagttggataaattttacttattgattatttgagattaaaaatgaattgttagcagttttataaataactttttgtttttaaacacaggctcactagaagttgcaaaaatacagtgcagagagtttttctgtatgctttacttagcttcccccaatgaacaccactttaaagatgcctaaaaaggcctttacctaatgggtgcagcacaccaacatggcacatgtatacatatgtaacaaacctgcatgttgtgcacatgtaccctagaacttaaagtataataataaaaaaaagatttataaggaatagcaatttttatacttgctctgaagaaatatgtatttattaatcactgattatatgtataaccacagattataaaaaatagaattagagacacctactaactctctattttggggggttgtgggtttccgttggaaaaggtgctcatgtggcaggcaagaaggaagagtcattcattcacttatttattcatatctctgtgaatttggtgtttgcctcattcaaatcatttaaaaaatatttatcatattgattacattgaactaagagtttgaagtccaaatgttgttcctataaaatctttggaaaatagaatgcaaataaaagtgaatgagagtagaacttctttatggtacaggtattagggcagcatgataacactggattttatgtaaaggtgagagaatatcattgttctatacatctctgttaggtgcatgtcattaccttacaatatatgtgaaagcacaatatattgagacgttttagaacagatgtttcatttattacatatgcataatatttccagtgaaatctcagtgtttcactactccttaatatattgataaatattacacttgaacatgcatttgagttcaattatctcttaataggaatatttaagtgctatatttctatgtttgtccatgtatctgaactttatgcagtcttgtctagaatattcctttgagggtttggtcttgcacctcagggcagatgtaactgggaagggtctagagaaacacgctgcatatcatgagaatggaggagtttctttaagagaacacacagaaagttatttgaatgcttagggtcttgaacaatgaagtgtaaagtctgaaaggagacctcaccaaagcctgtaatggtcatgaacacttaccccaaatccaagaatatcagaactaggagcaccacatataagagagaaataggctgggtgcctcatgcctgtaatccttgtgctttaggaggctgaggcaggaggattgcttgaggccaggagtttgagaccagcctgggcagcatagtgagaccctgtctctacaaaataaaaaataataaaaaaatacataactgagagaagtaggtttagcttaaatttttaaaaagtttaagtttatacagtgggtatttatgtgagcagatgtttttaccacaagaggagaaactggatactctaacaggagaaggtccagagcaaatcactgggtggattaagtatttatacaatttaaaagagaagatggacatttggtaaatagacctaatcttttgggtggttattctctctttactcaagactttacccaggattatcctcttttcacagaactttcttcaagtcacttatcattttgtagaataatttcctgttctttgatgtcgtcaggtgtcactgaaagttggtctagaggattgtgggtctgaccgcacatgacagttcctataaagtttactggcctcagcatgtcttatctcagctcttgaccttgactggaaggcactagtgtaaatgcattgttacatttgaggttataaaataagcacttagacttccttatacaatttctatgaaacaagtccacaccttgctactgataacatgaaattggatgttatttctgaattgaaaccaacatttttggtttggggtttatctggtataatctcactactctgaaaaagtttacttttccaaataaatgcaatatattttattttgggtgagtttaaaaatcatcatcttggatagcttttttaaatgtaatactgtgtatgcaaattaaagagcctggaaagtctggtgccatgtattcctgtttggcctacagcttttagcttgtgtgatagatggattctgccacatgggcttgaacaacacagtgtcctttttttatttttatttttattttttgagacggagtcttgctttgttgcccaggctggagtgcagtggcgcaatctcggctcactgcaacctccaacctcctaggttcaggtagttctcctgcttcagcctcctgagtagctgggactacaggagcgcaccaccatgcctggctatgttttgaatttttagtagagatggagtttcaccatgttggccaggctggtctcgaacccctgacctcaggtgatccacctgcctcagcttcccaaagtgctgggattacaggcgtgaaccactgtgtccagcccacgagtcttttatataaaaaccagaacagcaggaaaaagcaggttagagcatgtggcccaggctgctacttgagttgacagctgatggaataaattcttagttctgtagagaaagtgaggatttagtccttaggtgattgtctggggatgtgggatctgacagaacccctatggcttggggagcaggggtgggatgatgtgaaagccttagtaggtactatgcagggtctgtggaatcaaggaagaggaaatcatattttgaggaggctgattgtgagaaactgtgaacctgtctgcttaaattacaagagtggcctgtttatctgctgtcaatagagtatgaagtagtcattttaattgaattttctgataattgaagcttattaattgtctaaaattatcttaagatattttctgatgtacatcattttaaaatgagttgcacacatttctattctgtttcaacatattcaatataattttcgctcttgttcatctgttggtattcattatataattcagacgtggtctcaggtctggagacatgtgaagttattgctcctacactgagtgtttccatgtcattatgccttaatccttatttagacacagctatgacaccctctttacaacataaaggataagcaaaaggatgtataaatgtatcctgggctggaaagtggcattattgactggccattggccatcagcaaaggggcctgagtggaaggatatgaaaggatgggtgtaatgtagatgacgggttgatgggtgcagcaaaccaccatggcaggtgtatacctatctaacaaacctgcaggttctacacatgtgtcccagaacttaaagtatagttaaaaaaaaaaaaggatgagtggtgagcacagctgacacaccccacgaatatctggggggctttgagaaggttgctgagatccagtaatcatgtggcaagtttcagttatttttattgagacctcttggctcaataggctgttgaggtcgttggaaactcccatcaaagttgttttccaaatcctccatgactgtcagggtttccctgtgcgagttaagagcatgagctctggagccagagagcccaggcttgaatcctgtctctaccattgtcttaggctgagttccctgtgaaacagtttgtgagattgtgcaagaagtttactgggacttgtactgagggacactacctgttggggagttaaggaagttggactgggaagagggaggagctgaagagcaagacagtaacagaggcctcagctgaacccatcaggagctctggagctggggagagagatcctttagagttgcccccagataaggaagctaggcctctttatcccacaacaactggtcatgatatatgggctgcctctggagaggggtgtgaccttgggtcagacggctctctttggctaaggtaatttctagaacaaggttgagctgagcgtcatcaatgaacactccaccagctggggaagcacctctgttctgcaggggagatctgggctgcacagcacagcaccaaagacttcgtgccttatgacgggggactctgtgcttccaagttctttatcccaaccttctttaattcctagagtttaagtaagttaatgaatgtgaaatgcctagaaaaatgcatagcacatagtcagtatggtttaggtgttcgttattatgatcatacctgactttatcagccctacctctattatagtgtggttcttctaatatgctgtgagtctgaaagctgttaatactctccttatttttttaaattttctttgcaagaggaaaacatctgacaatattttagtaagaaatgatttaacatataatgtgtttttgtaccatttgtgtttttaatttttaccagaagaaagatgcaaaagaagtgattactgatgatgacatttgaaggatttggacatatggtggataaaagttttaggagtatgtgtgtattagttgttggcctccctcaaagtaacttagataagcaatctctgagttaacagagagttcactgctgttgagttggagactggtgtgataagagcagttcataaccaggggatagtgtccagctgagaagctcctcgaagtgttggtcttcaactatcccatcactgtaggcctagatataaacattagaacatataaccaatacatatagcattgacagttaaattgctttatttcttaaacatttcagaatcattcatttccgtatttaaattccataaatatagagcaaatcacctggaatgttttagaaatttggttttgattcaaagtaatgttctcatggagatgcagtctctgccaattcatttctcattcactttaggacatggctaattcccttggacagtttttatctccttcatattcaaatgggtggaaaacattttatctgaaatgactcacccttcccccacctcctcaaatatggcaactatgttgtattgtttatttttaagggactatctaattgcaccgttaacattaaagcagagagttaaaaatgtatgccacaaaacactcttttaaaatatcaagtgtgaacatgtcttctgtttgtaccagtaatccattatttgtataccctaataaagccagcggagtggaggaggaaataatacaacaccttctttgaaaattttttttaaaaaagagggcttccttgaatccattttcctccccagttttaatttaaattgctcgtacttattctccatttcttttaaagaaatgagattgttagaaatgaaccatggaaagtaatttatctacatatttattatatgatgatctgtagaaaatgaggattacatggaatacacagtaatcatcaagctgtcaacaagaaattttgttttagcttaactttcttagacattaaccttgtttctgagttgagcaatctgttgtgggttctatgcagaattccatggttacttttgttatgtgagccaagaacctaatggaaatcttctcacttcagcaaccagctaacgttttttttcctattgagactaagaatatataacacatttaagattttagttccacattttggcggagggtggtgtttgggaagagtgaatatggataaaagatttgaggtagactactagatgtgtaaaaatgtattaatgtttatatatgatgagtggtaacaatgtattgcataacaagtcctttctccttttagaaagatgacttttaaaactgtgtatttaggggattaaaatacataaaccctctttttagagaaacattgttgagcttgatttaatgggaaacaactctatatccaagaagataatgctagtgtagcttttaattctcaaaaacctgaaattatgacattggtatagatgatctttcactgcgtaagagatagtgaagtaaaaataatattttggacaaaattatgtattgtgtccaaaatgggtgtaggtgaaatttctactcttgtatatttaatccgaagccagccacagttactgtgtgatgactttgcagagggtcctgctcatgactcccaatttaaaaaccacttaatgccctcttttttgttagcatgcatgtaggtaggtttttatgtggattttagttataccttggcgaaaaacatgcatttctcaatcttgggccattgacctaagttttttaaatgaataaatgcaaaccagaacatattgtaagaaggaaaatctgttgatccaaaacacttgtttatttaaatagaatggcttattactttcatttagagtataaaggttaatcaagtcttgggattgttcatctaaatatgtaaatgtaatgcggtcagggacacctgaataaatgtttgcttaaatgataactagttagtagaagtatattaaactagattttaatcactcacaaagttttacatgtgacatgtttagtaaactcactgtttattatgtaatttaagtaaaaggcagaagaggaaagatacctaataagcgaaacactgtaaattccagaaaagccatgttattagaatttatattttctctgaaaaccaagtagtttttcacccacaggtcactcaaaggtttatcaaaaggagaggaagattccatgcggtgttggctatttgatctaatggtctaaatgaaatggaaaaagaaaacatgtccttatgctaatggttcagtttccaacaataaacctggtgggttcactttaagtgtggtttcctgaaaattgatgatgatttttagcacttagcttcttatcttcaaagcactttccaaatgttaaataattaattgccacaacccccatgtgggcgtagaatagcaagcatgtctttctgtttaccaggaagccattatgacagagtctggaaatgttgatttttatttttagaggtgtctttgctttccaaggtgaccagcattttaaatgatgtcctggtttccaatcacagggtcatgggaaaagttaccaaggatgttgagtacttgaaaactttttattcttcttgtttccatacaggtttcacttttcatcttacttttgcctgttcatcattttgcaatactattttttaaaatggaatattaaatattagcaagtttagtctttgctattagtatagtctctttgtaactagtaaatacagcatgcagaaaacctggtggaactaggagggataaagataactttaagtggaaaaaaaatcacatttcaaaaacaactttaatatattaaagaaatgaatcattttaaacaatagtttttctagtctaacttaaccttggagcctgaggaataatgaatatagaccatgtatatgtctaacagtgtatagttgcactgtatgacatatattgaggatgaacttatataaaacaactagagaacaagaaagacaatgagagaggctaatgtagacaaaataaatatggaataagatggctaacactggggttaacacgtacatcttaacactggatttaacgcatacatcctgaggagactgaggtcatgggtgatggtgtgacaggacctttaggaaggaggtgggttagaatttacaaggtaggtggtgactgtcctagcagacaatacctacattagccagactaattcccagcttgtttgtgttgccagcgtcagaatatctactgattagctctctggagagatgcaggatggagtcactgtggcagatgcagaaggctccccatccctcagcttctcaacctttgaaatagaaaagagccaggaccttactttgagagcagtcaatccctttatgctttgagaaacccaccagataacaaagagaatgctatggtgattatttctgatgaatgttgtttctttgcatacgattaacatctttaaaggcagagcagagttagatttcttccatgtcattttaaggaggtaaggcccccccatcccccaaatcagaagtgtcagctaaacacttgtctattgaatgcaggtatatcttcttcatcatgaagtttgagacccacagctgggcttcagagaaacccctcgatattgttgtatacagaatttgtatatatatttatttttttctggagaagtatgtccagcatatttatgacattactgaaactggggcatacacacaaatatttaatatttaatactgactaggttcccttatggaccacaaaacaaaaggtcagtttctagctattgactcctccaaaatttgaatgaaaataaaatgagagcctgtcagctgcaagacatcacctccaaaaaatctaatgtttttctcttatcagaaagatcagaaagtgcaatgatgcagtcaaaaccagtgaacatggctatttaactacagtacattaaatttggaaaggtaatgatcaagattattttatctaccatcagtcatgggactttcttactatcagatctagagagggtatgcccataaggataaggcaactttaattgtgcatttgtaatttagctcacattcaaacatgagtgctttgatagcctttttgtgggaaattgctcattgactatgtcgtagaacgcatttgggaagtaggataattctttgcctctctatagttctttccataagcaaagtagttattttcctgtaagtttgtatactaatttaatctttgttaataagaccacattttctgtgaaattttgcaaataagatcatgattataactcattaggggaaggctgatatttaaaggagtattggaatataagagaatcattaaatatggaaaacaagaccaaaagactagggtattttaattgaagttcattgttggtctttgaggtgtgagtgttcaataatctcatgaaactatagccacatttaaattatatattcatatatccattttatttttaggttacaattcacagttttcaacagatttccaaaaggctcatggccccccaaaatgttaagaattattggcttataatgtcagaattttataagtgcttatctaggaagaagccttccataattttgagaattttgctcaacttcagtaatttgaaaacaggtcattgataaagaataaaatagtacaatacagtggagttcaaaactgtttagttctgagtataatgctttatgaatatatattagacttgacaaatgtgtaagaagataagcaagaaagatcaaactgttaactccgaattataactgagggcctggggctgaatatatgggttgaaatctgtcaataatctgtgaatctcattaaaaccagtagttggaaccatttcactgatgaaattcacattcattttgattattattattattattattattattttagaaggagaggtttccgaccctagtgattggtttggggtttcatttcctctactataatcatctactgcaagcgaatcatgcagtggttaagtattcagcctctggaatcagcttggacgatcatattactttgctactatgactgtggtcttggggaattcacttgacatccatgtgctcctcttctgtaaaataagcataatggtactagtaatcttataaggttgtaatggaaaatcaaatactgtagtgtatattgagaacagtaccacctgtctcaactgaataattttaattttgtcatcatttctgaagtgatgcctgctcataagatagataagatactggcagctgaaaggacaataagaagaaatgaggtgttggctctattccaaacactatggtcccttgaataaatgagaattgacgatttgttttattgacactagtctgaagtctcctggaaatgtttcatctgctttagtatgtctagacagatggtcttcctgcatagaatatttctatgtttattaattcagaattagaacaatttaaaaatctgtaagcatgtgtgaggataaatttatagcatgtgcttccatatccttaaagcaaagtatatctataggtgcaaattactgttgatcttaacaactatgatttcccaacatttggtgggtatttaactttcacttgtttacaaaaaaactaaatgaagtcacttgactatgaaatacactttaaaatattgaaatcagatagccttagatgataatttttctgcagtggtaaaggaagtattggaagtgatgcaaaatttgctacttcacattctccatcaattacttcatggtttttcaagttaatttgtatttctaagaactgcatgaaggcttattttctttgtgtagaaaaatattaatgcttgaattctgttttttcctctttattttcatttgagtttaggaaatttttggaaggctttcctcctttttcttcggggagacaggggctcattccattgcccaggttggagtgcagtagtgcaatcatagctcactgcagtctgcacgtcttaggctcacgtgatcctcccacctcagcctcctgagtagctgggactataggcacgtgctaccttgcccagctaattttagtttttatagagacagggtcttgcttgttgcccaggctggtctcaaacttctgggctcaagccatccctctgccttggcctcccaaagtgctgggattacagatctgagccactgtgcctggctgctctcctcctttgacaaattataataatataacaatgttggctgggcgtggtggctcatgcctataatcccagcactttgggaggccgaggcaggcggatcacgaggtcaggagatggagaccatcctggctaacatggtgaaaccccatctctactaaaaatacaaaaaaatttgccgggtgtggtggcgggcacctgtagtcccagctactcaggaggctgaggcaggagaatggtgtgaacccgggaggcggagcttgcagtgagctgagatcgcaccactgcactccagcctgggcgacagggtgagactccgtctcaaaaaaaaaaaaaatatatatatatataataaaacaatgttactattacaggtatccagatatattattggctaatcattatctgtaaaatgaaaaaataattggaaataaaatgtggtattacacaatttatcacattatattaaaaggggcctacattagaatgtgtagaagcaagcctttttttttggtattaaaatctcataatctcatttaatgatttattaattatggttttctttcccattacggccttttcttttattgttgtcatctggactcttctattttaaatcacctttctttttatgattgtatgaaaaacaagttaacctagttaagttgggttctaagatgcctgaatcagtgtcccacaccatttataccatctcttgaggacattagatgatattcacgtgaccctcacttgagtgtaattcttgagccaggaccaaaggtttgacatgagatgaatatttctcagtttttttttccttgagtttccagacttgaaattggctagcaatcagctggaatatttggttatagagacaaatttggttacgctagaaacctgatctttagaatggctttatgctctttatgcaatgctgaaagtcttcagaaagtttgtgtcaaattttcttgcctttgtagtttattctgcatgatcagaataagtgtggcataagttactttatatgacaagggcacatattttttccccccatgctcaatataatatgcaaatcaaaaggaccctcatactatctgtgctattggctacagtgtattatgtctaacttttgaaatgaacagtggcatttttatttcatagtcatctattgagcactctgttaggatcttggaaaaaagaagcagcagggcacattcctccctaatgtgtaacagtctactgggggagacagggcagacacatttagaaacagaattctacaaggatgttgcaagaacagggtcaagtgaagggtgtctgaggttcacaggtgctgaggcttgaaacctttcttttcttcttcttttgaatacaacacttagatcacattgttgcagctaataaagatgtatcataaaatatgagtaccagtagctacctgtaatgcattttggagattttcattttattgtatctttcttcagaaaattatgagcatttcaatctgttagtactctgcagttgcatatcaattggactcaaattgctcaatctctgattttcagacctatttatttttttccttcctgattattgtgagaaatacttcctgagtattgtgagaaatacctttaaaacctaggttttaaaggtagctgactttgctattgtggtgagttatgcttaaaaattggaaaaataaattatgatgtatttttggattaactattatttacagttttcaggagattttagcactgtattttatttcatcattattatttttatttggttgtatgttatttggagggactgttccagtgctttttgtggtctaaccatgaaagtctctgagaattgaacatttatacacttttccggagaacgctgtgaccatgtttatctcttttttccttttgcttttcaccttagttgcctgtcttttgaagcctgccatgctggcaatgatatcacatatttctggtgctttttgtaactaccagtgtggacaccaatggggtgcccatctgagtagccctgggtgtcgccctgagctcacctgcatgttggcctgagcactgctggtattgtagggatagtcaatgattgcttcctttgggcaagcaggagctgcaaccccctgtgtaattttctaggcagtaagcaagggtgtgtttaccattatccttcttggctgtttaatagccattatctaatttaaggagaaatcacagcatctatgcaatctgtcaaaaaacatgatgacttaaacatacttaatgtatttctagaaccaaagtaacagttgccagaaatgttgaagaaagtaaatgtcttctctgagaaactttagtttgtgggcaatgcattgtatgtgttaaaatgcataatctttggtaatttttcaggaaacattttcttatcggttatttctcacaaaataacatgttatttgtgatttctctttctccatctgtccttccattccccacacttaccccaaggaaaatcttagggaaattaacacaactaaggagaaggctttcttcttgttactgggaacactgtgtaaacaaaatgatcagaagaatctcttttaaatcttgaaaaagtatatttgttggaggttgaagctatgttgttatgtttatatatttttctacctcagtagtctgtaatctcctgaatgaagtgtctgtatcttattcattttttatgtcatcagtctctagcatggactgatgcagagtaggtactcaataagaagttgtccaggagagctgaactggaggcatgcagctgcagttataaagatgaaaagtgatagagaaaaaatatttgctactcagaatttccaaagaattgtctgaaaaatgtgaaaagacttcgagccaaaatatgacaaagaaaactcgcattcagaatgtttttctttgtaatttgtcttggcaacatttattcctttgcacagatccatgtggttgttagattgctttcaaataatatcgttgtatgacagggtgactgcatatacttttaccacaaaataccttcacaaaacagtttatctttttataattaccttttgtcttttcctttacttactcctacagattttaggcttttggcagattcagaaaagatttatcttttatttgcttttaacaatataaagacatagtgattctcctatgattctgtattctgtaaatttaggtctgtcatcaccatactttatttaacatagagaattttttatatattacctgtgaaactccaaataatttgcaaaattaagatatcaaaatggtatatgatagctcacaccatgaggttgtttttaccaggaggtagaaggatactttgggtctgtaacacaaactactaacaataaatttctgtccatcctaattgcgaatataccagtttttaggagtgacctcaatgttgctgcactctgaagttttaaaaatgtgggtatgtttaacagctccccaatgaatctgagcaaaaacctgaagtgttggagctctgccctaatttggtggacagatttttcacaaatctttattgctaagaagatggaacatttgacaatttaaagtcatgtcccccataagttgagagtaaacacattagtaatagtgtcacttgaatttatctgttttttttttttttttttttgtgtgtgaacagcttataatgctttatggagcttatcaaagccacatggtgatgactgtcaggcctggagttgtgcaaaaatgaactttggctcttgcagcgaaggaaaattagacgctaaaaaccagggattttttttagaattacctaagacagggtttgtaagatttacaaccaaattcacggatgtgatgattgcagtgctccctcaccaaggaagccagccaactgtgaggatgtctcactggttgtgtgtgaagacaactaagatgccatctaagaaaatctaaccttccagccttggcttgtacaagtgtgtctgccctcaaagagtcattccagctttctgtcttctgtctgaaagaataatttaggtctaattttaaaattgtctaattttcccctaaaattttgagttctttatctctattgttactattctggggtttggaaccctctggctttttctctaatgggctgttcactgagcttaggtttctcacttggttagattcggggttagttttaatgtagtcaccatcctgtgttgaatcctcaggatcaggaatggatctaggcagaattatgtctgactgggagagtagccaggaagaggcccaggcctctggagctgggcagaaggtgggggttgcccttgctgggagcagagggtgaataccagtgctgacctgctgtcagaggggctcaccagaaatgagaaaaaccagatggtcactaagaccagagttggaatccacaggacagaggcacaatggggttggagaaccatgggatatgaaagtgtgaggggaaggttgagactagatgaatgagatgaggtgggccatattccacaatggcaatgacatttcctgtgtgcacgcgtttgtgtgtgtgcacgtgtgtgtgtgaatagggtagcaggtttagttttgggtaggccaggtcacattaaataaactggcatgggataggtactagggagctgagcagagtgattaccatgaggctaaagctcctctgttgctgggggaaagtgtccaaaggtgagagaagtaaatacagtcattccttgcataacgatgttttggtcaatgatgggccacatatatgacagcagtcccataaatttatattattgtatttttactgtacattttctatgtttagatacacaagtacttactattgtattataattgcctacagtattcagtacagtcatgtgctgtatgggtttgtagattaggagcaataggttataccacatagcctaggtgtgtaagaggctgtaccatctaggtttgtgtgagaacctctctgatgttcacacaatgacaaaattgacaaacgatgcatttcttggaatgtttcctgtcatttaccaatgcatgactgcataagacctgatgataactcagaattctgtattttcctgcatacagggtgttgctgatttgcatctgtttgtcccttcctttattgtcattactagaaataatgctggattttacctcataaagtattggctcatgagtgccactcttgacatgttacaaggagctggtaaagcagacatagagaagcctctgttcttatttttgagactaaaacacaagaaagctctgctttcaggctggtgggcttgaaagcaggggactcttttgtcaccacacaatttgatcttactggagtactgagttttcatggcatactaattgctctttattaagagtcatttctgtggctgtcattatgattgtgcaccttgatgtatattgatagagtaaaagatgaaaaggtgagaagaaaatctccctgatatggactgaatgtctgtatccaccctgacccccacccagagtcataagttgaagccctaatttccagtacgatgatatttggaagtaagacctttgggaggtaattaggttatgagggtggagccctcatcaatgggattagtgcccctgtaagaagagacatgcgagagatgatctctttttggccatgggaggacatggtaagaaggtggccttctgcaagccagaaaggaaggtctcaccaggaacggaatcagctagcacctggatcttggacgtccaagtcttcagaattgtgagaaataaatgtctgttctttaagccacccagtctatgatgttgtgttatagcagcctgagctgacaagacactccctgttctctacaccctacgtaggctgctcccttgcaatatttttatgcttgttcagttggccacttagcatcccaatcatttttcttgacatggcccccaggtacccagatgtactggggttttgtgtggagaactgaactgtgcacaggctacacctttggcatgaactgatcctgtaccgaggggtatagaagtgctcccagctgtggcctcctaacttggtttacacagccccgtatacaacacttcagaagtgtgtcatcctcagcctaggatgacgctggctaatggccctgtagggagggaagaggtttgaaagggaatgataattaaagcaacttcagttacattgtggattttctaggatttccaggtacatgttagcatttcctgatcaagaaagttggtgatctcaattctgttttccataaacgcatcatcatggcaaaggctgatggggcagagagacaggatatatgacccttgtatataacccagaagtcagggatgtggtcccgccaccactcgtaccctatcctacgtacataaaactgtcccatatctttactcttgcgggcttttgattttgttttgttgagttctgtgtttattttttgctgtgtacttaaattgattcaataaggcacatgatctgagcaaaaaaagaaagttggtgaaataatagatttatttactaatgtttctgaatctttttcatgtcacagagtgctcagtaaataataatatttgcatggtacactgggtaaacagtctggacatcttttggcctggggcttgggctctgcctggccctgcctggcagctcccaggagtgaggggcatctccacccacttgaaacttactccaaccctggtttagaaccatgaggattcacagttgatgcagtagtagctttatgcattatgcagctttatgcattctatactggcaacttgggttatgattttgcttttgctgtgatttcctagtgtgcttaggactttttgtctgaattatctgatctctaacccagagtcaatatgttacttatcttattagcaactaggcatgctgagagaataaataaattgtgtgtaactctttgagtatcttcaaagtaataccctatgctattacaacggtatcacaaatgttggatcacaaatgtcatttagtccatccttctgtcctctcctcaatcttgttgatagtacagggtagactaaaacatcacagctgggtttctttatttcccctgaatttattaattcgctcctgactgcttttttcttgttttgttttactaagaactttgtgttctggtcctgtccaaggtgcagatggttatgctttcaaaacaccttattgtcataatagcactcatttcaaataatactctactctcagtttcaccatttcaagcactattcatttgattcttgaggagaaggtgatgctcttccactgatcctccaggaagggtctgatcctccaggaaggctccatccacctcgttcctttcccaggttcataaggagggtggcagtgtcaaatgaaccctgtgccaggcactttcacattcagtaaggagagcatgggttttagagtcagacagatctaagtgtgaatttccatctcttcccttttagactctgtaacctcaggacattaactttatgattatgggactgtgtttcatcctatgtaaagtggagctagtggtaactactgggtgtgtgctgccgtgatgatcacaagtgaaccgtcccaaaggggctagcaaacagtgggtgctcaacaaacgatacatataattatcattattgataattctgtaatgcattgtacagagtcagttgttttaccgaacaaaataaattattattgcttgtctaccaactttgtcatttctatttttttttttttttttttgagatggagtcttgctctgtcgcccaggctggagtgcagtggcgtgatcttggctaattgcatcttccgcccccaccccggattcaagcaattctcctgtctcagcctcccaagaagctgggattacaggcgtgcaccaccaggcctggctaacttttgtatttttagtagagacggggtttcaccatgttggccatgctggtctcgaactcctggcctcaagtgatccacccaccttggccccccaatgtgctgggattacaggcgtgagccacaactcccagctatcatttctatttaagaaaccattcatttcagaaaattagttcttaccaaagatgtgttaactgaaataacatttttttcttgctttcattcctctgtcacttctatttttaatgtttcttttattctgatttttaaaaattggcatttggggtcatttttaagttttattcttgtcaaaaacattacacaaacaggtctgtatttcccagggtgaccacctttcaaaaatgcccagctggcccatttccatgcctcagccatgtgcccagttagtcctctgactattatcaacaagttgagaaatttgacctctgatatatcaagaggcacatgcttgatgatttctttccttgattccctgcaaggttcaaaagagggaagctcctcttatcctttatttttggcttccaccttggaactaataagcttagaaaagactttggaaggctatctggttatccctcctgctccatgctgaggagggagcatggcatggagcattggagtcagagctgggtttgaattctctctccgccagttgctagtaatgtgaccgtcataaacttgtgccaggtggcagcaatttgacctttatgaacttgtgcctgtctgggagaaattaaggacttgcggcatgacaatactagctacgtgccttgtctacctgctctatgctaagtatctaccacgcagggtgcttttgtgtctgttatcccatagcttctccacaactgaacaatgtgggtattactaagtccatttttcagatgagaaaatggaggcttagagagttggtaacttgaattacattcactttataaaaattctttactaattttgttttaaagaaactgtgtgagtgggacaagatgtggagaataagaattgagcaagaaataccactttagatttgctttgacattaaagtttttttttaaagcaatttaatccttactgagactgaataatatgtttctactaatgaatgggctgtcagctctaatgataaaacagtgcaaatcagcagtataatggagcaataaatgatttgggtactaacaaaatggcagttatgggctgggtgtggtggctcacgcctgtaatcccagcactttgggaggctgaggtgggcgatcctgaggtcaggagtttgtgaccagcgtggccaacatggtgaaaccccgtttctacaaatacaaaatattagctgggtgtggtggtgtgtgcctgtaatcccagctatttgggaggctgagacaggagaattgcttgaacctgggaggtggagattgtcatgagctgagatcgtgtcactgcactccagcctgggtgacagagtgagactccatctcaaaaaacaaaaacaaaaacaaaccaccaacaacgaaatggcatttatgtagcttagagagtagtttttatctgtagatgcttattatatggttgcttttcaaagaccattgtaaacaaaaatgattctatgactgtaacagaaataggaaactctcagctggtcatcacttctatttggtataagagtggcatcatatgtacttagctggcatttcctgattgactgttggtttttatagaactggaagcagaggcaggaagacttacaaaacagactctgaggtcttcatcaaggctggaatgtggtagtgacagtctgacatgcactgcttttggcttttcttcctttttggctttggctgaagctagtgagctggggggactgtgaaagttaaaacaaatggagagtgtagggaaagtgatctttgctttttctaagactcttcttggcaatgggacttttcttctgatatttacaagaagaaataattctttcttttttaatagtggcatgtaaagtgatccaagtaggtaatagttcataagcaagtcccaaatctccagaagggagatgtcatgatactgaacagctctttaagaagtgagtgatgttttactttggtcttcagaggtctgtgtttatccaaataatggagttttgagataatgagaaaagcaaatgcaaaaagttaccttagacaacatgcgtatgtaatttcttcttagagttggtttgtctcaactggttatggttaattttatttgtgattatctattagaggtaacactggtatttatgctctaatttcagtcacttgtttgatgacctttctaaacaaatacgtgtgctgcttccaacttaattttggaatgccatcactttatatttattatttagttgtttgaaactcaaaatgtatttcactgtagaaagcaatattagaatggtgcttagtgttccagacccattcaaatccgtacaaatctatttcacccataatatacctaaaacagtactattagcactataatattattagtaattttgatactgtgagctaataatctatatgggttgtatcacttagtagctgtgtgaacttgacaacttgcttgcatctttaaatctcagttttatcatctgtaaaagggggatgataatagtagcagctatttcattgacgagtagtcaagcttaaataattcatataaagcacttattatattaaattttattattatttctataatttggccacattttcagaaaattgaactttgtgagttggccttggaacctaagcaacaaatgtaatattacttccttgggaaaaataggtatcctgtgtttggcaagaagggactatgctgtcactgggaacatccttcttcttcttttcccttgtatcccatcaatgtctagtaatacaagggactgtattagtttttggagagtttttattcttctaggatcacagggaagctcacttttctgcagaaacatcacaagagcctctaagtgttcaagtgaaaggaagagtagcacgtctctcactttaagttaaaagctagaaatgattaagcttagtgaggaaggcatctcaaaagccaagataggtcaagagttaggcctcttgccgcaatcgttagttaagttgtgaatgcaaaggaaaagtgcttgaagaaaattagaagtgctactccagtgaatacaccaatgacaagaaagtgaaaacaacccttaagatttatgctaaatctcctctgcctatgctctgaagatggaacagcacagcctagataacagtacatctgtttatagcatgatttactgaatattttaagctcaccgttgagacctactttcaaaattttgctgcttattgacaaagtgcctggttacccaaaagctctgataaagaggtacaaggagatgaatggtggtttttatgtgtgctaaaataactttcattctgcagctcatggatcaaggagtaatttcgactttcaagtcttatatttaaaaacacattttgtaaggcaatagctgtcataaatagtgatttctctgatgggtctgggcaaagtaaattgaaaaccttctgaaaaggatttaccattctagatgccattaaaaacatttatgattcatgggaggatgccaaaatatctacagaaacagaagtttaagaggaagttgattctaatccttatgggtgattttgattcattacttcgatggagaaagtaactgcagaagtgatggacatagcaagagaactagaattagaagtggagcctgaagaagtgactgaattgttacaacctcatgacaaacttgaatggatggggagtcacttctcatggatgagcaaagaaagtgatttcttgagatcgaatctgctcctggtgaagatgctgtgaacattgttgacatgacaacaaaggattgggattcagaatattacataaacctagtcgataaagtagcagcacggtttgagaggattgactccaattttggaaaaagttctactgtgggtaaaatgctgttcaacagcaatgcatgcaacaaagaaatactttgtgaaaggaagaatcaattgatgaggcaaactttattgtccatcagagttgaggcaagaccttccactagcaaaaaattacaacttggtgaaagctctggtgattgttagcattttttagcaatacagaattttaaaattaaggtatgtgcattttttagacataatgctattgcacacaatagacaacagtgtagtataaacgtaacttttatatgcattgggaaacaaaaatttcatgtgactcgctttattgtgatatttgttttattgtggtggagtggaaccgaacctgcaacatctctgacatatgcctctaaagacattaaaaatatatataacctcaccaccattatcatacctaatacaattaataataattccttagtaccgtctaatacccaattaatatccaagctttcttgattgtctcaaaatagttttttaaacagttgatttgtttgaattagcatctcaacccatgtgtcacattagatagttatgtcttatgggtgtcttttttctctcagagttaaggagagtgtttttattttattttatttattttttttaacttttattttaggttttgggggtacatgtgaaggtttgttacataggtaaacgcatgtcatgggagtttgttgcacgtattatttcatcacccatgtattaagcccagtacccaatagttgtcttttctgctcctctccctccttccacactccccgctaaagtagaccccagtgtctgttatttccttctttgtgttcataagttcttgtcatttagctcccacttacaagtgagaacatgcagtatttggttttctgttcctgggttagtttgctgaggataatagcctccagctgcatccatgttcctgcaaaatacatgatcttgttctttttcatggctgcatagcattccatggtatattggtaccaccctttctttatccagtgtcattaacgggcatttaggttgattccatgtctttgctattgtgaatagtgctgcagtgaacattcatgtgcatacgtctttatggtagaatgatttatattcctctgggtatataccgagtaatggaattgctgggttgaatggtagatagttctgcttttaactctttgaggatcaccttactgctttccactgtgaaggacagtgtttttaaattgggatgtaacgtccttccacaatgtggaccactcctgtttgtacaaacaagtggctagaaccaaacacgggatgtcattcttatggcaaaggatgacaagctcagggcattttcccccaaagtgcagtcagtgtaaccatggaatcagaaaactcatagtttaaaacaactttaaatgtattccttttttatttaaggtatcaatttgaatcgtgggtgttaaaaaaaaacaccaacaataagctctatgctattctcatgatatccacatattaatcatctgctttggcatcttctagcactacgtgttgccatccctggggcagatttaggtaggcgaggtttcaagtggcaacaacttgagtcatgaactttggagctagtttggcagaagttgataaagattatattaacaagttaatgcagattggcctttgtcatgagcactgaaacattgctcagcaccttcacaaggcagaagtcaaggtcaaggctctgaaccctcgggatgaagtctcctaaggtgtgttgattcatttttggatctgcagaggattgggtcaagttctgacatggtgctgtaggattctgatccagcagaccccacctgtaacctctgtgctacactagttgtggccccagaaagaccttctaagcaggtttcaggaagcaccttaatggaaatgtttatataatgacagagacttaggtaaagactataagctcgaggaagtatcactctattgcttagaccatccagtggctttctagttgttcagagtaagcactaaagcccttcatacagtagccttccagacccaaagcagcctgcctctcctttaccttcacctctctgattttatctccagccctcctgactcactctgcaccacctactggcctccttgatgttccagtaatcttcctggctatttcctgcctcagggcctttgcatttgctgttctctcacataactgcaagtctcacttccttacccttttcaatctttgatcaactatcactcgttgaggcctttcttaactacctatttaaaactgcaccactacccagtttaaccagcattccctaaatctcttccttgcttacatttttccattgtagtatcaacttttaacacattatgcaacgatttttaaattttgggtattgtctatttcccaccatggattcatccttcgtgcctagaataatgcctagtcatagcagacactcaataaattgaataaatgaatgagtaaatgaattaaactttggaaaattagatcacaagtgtacactgagagatttcttgggaaaaatgaaggataaactttgaacagcattgtggaaagagacattttaataagggaacacagactagagaaatgtcttcaatgttcttgtaatagtgaactgtgctcataaagtttatgagataaaagttgtttttctgcttagtagtgcagcccacgtggtgagtgatgcactcttctggcttttgatacagtagttccttggcatgtgtgaatttaacaattgtgatttcaactatttgctagcagccctagagggtcataccatgtagtgggtttgtgctttggtggacaaccatgtggccaagtggtgagccgaggctgagctggcagatggaaattagatgctgtgtgatacttgtgaattggggaatttgcaaaatgggcctggggaggggatgttcatgaatgtcaagggtctgtatactctttaattattcagtgagtctactctttcactaaaggtctgtttaatatttgtgatcccaggttcctagagtttttatttttgtttttgttttgcactgatactctttttttttttttctgagaccaagcctccctctgtcgcccaggctggagtgcagtggcgcgatctcagctcactgcaagctccacctcctgggttcaggccattctcctgcctcagcctcccgggtagctgggactacaggcacccacccccgcgcctgtctaattttttgtatttttagcagagacgggttttcaccgtggtctcaatttcctgacctcgtgatctgcctgcctcggcctcccaaagtgctggttttacaggcgtgagccaccgtgcccggcctgcactgacattcttttatttgagatgcagagatctgtgctcaatcagggttgagtggaatgggatttaaagaacttatcaagtatataactgagttcaaacagttcaaactattttcaactttacatctgattcccaagaatgaagcagaaaatgaagatgcttgcatgtgggcctcctagattgagtatctggcacaagaaaagcctgcccaaagccaagtaggccgccatttccctttcctttgtagggtgatctcacatccatggtcccttagatccaatgcttttaggagctcgggtcctcacagccctgttccgagactcatgaactcggagtctcaaagcccagatcccattcccacagaagcccgtcttcactgcccgcttctgttcccttccgaactcagattttctcagtctgcttctgcccctcaggaacctgagtcttcgtggccccgtttctgatccttaggagcccggatcttcactgttcctcttctgccacttaggagcccaggtcctcactgccccatttttacctctccggagcccgtgtcttcacacctcattcctttccggtcctctcctcttaggaatgcgggctctcacaatcctgttcctcccagacagatttccctcagatactggagaactcacatccatagccgttccctaagtcccgtctggagcccgggtccctacagccacttcttctctgagcctgatcctctcagtcccttcccaagagcctgaatcctcacagcccatctcatccacaacctggtcctgcgaacactgacccactgtaggtgttggtcctgacttcctcctcccgctcttgttcctcaactgccagagctcaagactccccaagatatttggagagttttaacagatcagtcgaattggctaaaaagaggcagcttgacattgagtgggtaagagaacagattttggagctagtcctcctgggtttgaatcctgacatcaacagttatagccatgtggttttttttgggaatgtgacttaatttctctgtatttcagatatgatggtgataaaaacagtacaaatctcatgggattgttgtattaaatgagctaataatatttgtaaagcaattacaatagtaactaagacatagtaagcactacctaagtgtttgctaaataaaaataaagacattgatttgggggggattgctacaggatgctccggtctttggccagtaggcacaccaaagtggggaaagaggtaagtgatgtaatttgaaattataagaaggcatatatgtatgaagaaatattcttgaagataatccttggtgggcattgattagttaattatgaaagagtatagtagagtggttaaaattgtggactgctaaattagtctgcatgcctggtcttctcatcacatgtactgtgtgattttgggcaaattatttaacttcaaaattagaactttaaagtgggtgtgtgaaaagtccctacctcatggcattgtcatgaagattgaattaaataatcatcacgaagtatttagcttagtacttggcaagtagtaagtatttaaaatgtgactgaaaaaattaatagataatgggccaggtgcggtggctcacgcctgtaatcccagcactttgggaggcctgggtgggtggatcacctgaggtcagtagttggagaccagcctggccaacatggtgaaaccccatctctactaaaaatacacaagttagctgggcatggtggcgcatgcctgtaatcccagctacttgggaggctgaggcaggagaatcgtttgaacccaggaggtggaggttgcggtgagctgagatcgtaccactgcactccagcctgggtgacagaacaagactccgtttaaaaaaaaaaaaaagataatgaaagtccctaatctcagttcctacattgttataggtattgacatcctttagctagaaccttcagttctttccctgttactgagtcagataaaataagatggcatccagaaggaaataatgcatgtatgttgcttagcacactgactgacatgtagcaagaacttaataaaatttcaggagcctcatccctgccagctgggtggtggttcaggatgggagatgtgaacactgtggttgccatgttgggtagaggtaggaaggtttgcctaaacccgtttcagaaggcatcttctccaatgtcagctgtgtgtgtcagaggtgggtgggtcagggggctgtacatgatcaggtgccatggagctgactcccagccctgtgtcctggaacaaactcctgctcttgagtccccatctgcctgccaatctgcatctgatctgagatcactgtgaaatccacagtaaatgtgcaaaagtcacagactacaatgaatatgaattaactgacgattttagttattcatgctattgccgtgctaattactacaaataatttatcactgactgtgtataaacataaaactaagctacaatttctagagcttaaggcttatattgacattttgaatcctaattttatttgcaggtagctgccatccagcttctttataggtttacctaaacacattacagagttttatttgtccagttgcaggcctgatgagcaaaattgaactttcttataactttcctgctgcttctgggtatttattatttttttttagagatagatctcactatgttgcataggccggagtgcagtggctattcacaggcacgattgtaacgcactacagcctcaaagctcctgggctcaagcagtcttcccacctcagccttcctagtagctgggactttaggcatatgccactgtgccaggctttgcttctggctatttaaagtagtttatggtgtgatttatttttaagttcattcattattctgttcgtggaacaaacttttatttagaatcaaatatgtggcaggtccaggtacctcttaatttcttttttagcagacaaggggaaattctcatttgaatttaatttgacccctacatttgagagtatagttatagtctgtgtggagagctaagatctaatgttagtctataaagagaaaattatatagttaaaaatatgcttgaaaaatcccttaattcaaccataaacataatactcttcagggagtatagcacagccattttcccccctttctttggaacaaatcactatttcttcagttgaataacaggctaagtaattggaaatttgcttgtttatggggtttatgttgtttgaaatacacattcagggcctttagacttacagatccacttaataccaaacatgcatgtgccctcactgtgcctatttctaactggttgattgactgatggattgattcatagtcactgaatcaattgattaattgattcattcatagtcactacacatagtcactacacatagttagtagactatgtgtagtgactatgcttgatactagaggtagaaaaacttcagaaagacagtatttgctctcaaagagctcataatgtggtggggacaagagccatgacatgcccaagtacagttgagtgatgataagttataatgacaatgcattgtaacgtgctatatgagaagcaggcacattcaggaagccaatggagaacagaggaaggagcatagctctgctcagggaagggtatgtctgataatgtagagaggcttctggagaggttggatcttaagttgggttttgaagaatgggttaactaagatgatatattaattagaggaaatagcatgtacacgaaggtgtggtggacggttcagggtgtatggcatggggatggtaggacctgagcttacgtttcatgttaagcaagttggatttcatcttccatgtaatgaagaaacactgaaggcactttaaaaggagagataccaaagtgtgttttataaatggatggcttagaggggaatgagttcagatccagggagcccagagagaaaccactggtgagaaggcagatgggaatccagccatcctacactcacatcaaacctgagcattttggggcatccactgactaacagctgccttgcagggtgggctttcagctgtagatattccctttcccgtgattgtcctgtggggtatcatcccttcttccctttgctcttctttccttattctgctgctggtttgggtctggctcttggttgaagagctgatggtggtggggaggaggggacagaggataaacatgcccgtcgccatcctctgtgctggtgtgtcatatggaggagcccagccatttcatcttgcctgattcctgtcttaggacctttctgattttcacacaagaagccttgaagaagggtgattgaaagctaaaagagtttagaagggagcttctttttcctgtctgtaacggtaaaacctctgagaaaatgttggaaggacaaagtatttggtttctgacagaggaaggagactactgtattctacaatggaactctggtcagaagcagcacacggtctttgtggaagcacgtgaaatggtccattaaaaatattaaggagcatgtgagtgtgagtgtaggctaagtcagggaatgtcctgaggagtcatgaatgaagtcctcctttcagcacttcataccctcccccacagcactttctcccttcatctttcaccttccctggtctctgagccttttctcaccccagagtctccattctcctatcaattattttcttgccctttgttgctgagcctgctccagcctttcagaagtcaatcaacaatctgaagacagagtttaggagacttagccctagcatggagaagatggaaagggagagtttgatcctaatagtttgagggacagtttatctgtggtctccccagtcaaaaatcccgtgcatttgctcatgagacagaatcatgacctctgggtctgtaggagtattaatactctattctctgggccctaggaactttatatttgacttaactgaaactggttggatttatttaggaaattatttaattccctaaactaacttctgaagtggtataagctcattttaaaagacactgaagtgagaggttagttaactttctaagcttacacacaaagtgtgcatctgggattttgtattcagttttgcctgattctgcatgtgtgttggtggaccagctgattgtacctgaccaccatgtagaataatgtttctaggggaaattaaaaaacagagttacaaatgagcttttttaaattgaaaattttattgaggtaattgtagattcaaatgcgtatttgagaaattatacagagaggttactggtgcagaaaagctccactttgccagattttcccaaggttaacattttacaaagaggtagtataatgtcataaccagcatattggcactgatacaattcaccaaactttattcacatttcctgttttacttgtactaatttctctctctctcttctctgtctgtattaagttctatacgattttatcacctatgttgatccatgtatccacagataagatactgaatagagccaaccacaggggtccctcgtgttacccttgttaacaacaaatacctccatctttaacccctggcaaacatgaatctgtcctaaatctgtccttcatttctaaaattttgtcactccatataaattgtataatgtagtttgtaaccttttgggatgagcttttctcactcagcataaccccctggaaattcattcaatttggtgtgtgtatcaatagtttgttcatttttcttgctaagcagtatttcatggtatggatgtaccatagtttaaccactctcctgttgaaagacatgtggattaattctggacttttctactatacttaaagctgctgtaaacattcatgtacaggtttttgggtgaacgtaagtttttatttctctgggataagtgcccaagagtacaaatgaacttttaatacagttcataaatccagaattagatttggcgtgatcttgctctgggttgcattttcaccttttatccagttctctcagtctgattttgtgtggggctctcacctatttccctctggccctgggcctgtgtaaatttccaggctgattagggtgctcctgagctctgggaaggagatttgcttcgctttgttgctggctgatctccgggagtcatcactgctatcagtcatgcttgtcagttttgccgcaccgatgtccctttcccccagtatggatgtccagagctccagcggtctgcatagttaagtcagcaactgtgttctgtcttacttcctgtgggaatgaaaggccttcttagagcccctgcgaagtttttttttttttttttttttcccagcccctgtgaaattttaaaaggaatggttgcagctttttcttgccctttggttccctgtagtgaacacatgttgccaaaagatggcagtgcactttgcagccactgagatcgctcttccctgtcgcctggggcttagagaattgtgtcttgttctttatgtgtatgttgaaaatgtgcagagcagattttacaaaacaacaaaagcaccaataaaatgctgtgaagtttagaatcatgaaaaaaaaatcacgtttgcaaatggtttataatggaaatagtcccccacttcttaaacatgatttgaatagggaatagaactcagaaatgtgtgtatgagtgtataattttaggtgtcagtactgattgttatattctgtatagctcctgaaaaagacctgtgaaatgctgatttttgtctttcatctgatccaagattagccaagtaacaggcctgcttttgaactctgagactgcagtcctcaagtaaaggcccttgtatacacttagttttcatggcaaaaatggctaataataaaactcttcacttgctagcattggtcactcccctgtgtgcgtcactttggtgtgcgtctgtgggcatgtgtgtaaagaactgtttaaacattggctatgcaccagaaagctgtgtgaagtgagagattatggggttcaccggatgtcataaacagaccaagctggtgaggataaagtgggatgagttgaaatacaagattagctaataaactttaagctgcatgcacggagagaaccagtgatattaaactctggtatgggcatgttaaacactggtgccctgctgctctctagggtgccatccccgatgccttttgggatggaatcaaaaagccctgctatgaacttgatccatgtgcagcatcgttaagtgcagagcaggctgtggaagagagtgggctagctctgggattgggtatacaagctccggagtggatcctctacacaccagccagtgtgtcaaggttggaggctctgtttcacttcccctgagctcagtaccgcagtcgctttcatcctacagtttacaaagtagctgcaatcctgggtggcagggaaacaggtggcttcacggtaaagcagcaggctttttgctactgcatcctttggcaaaagcttgggctaggaggagaaatgtgctgtgtaaagttttaaccctgaaagcagatgctgttactatagagacaagtgaaatgctacagtgggaggcgtaacaggggagggatgggagaagggaggtgggagggcaagtaaggcgaatctaaaggctagcacactccaagaccttcaacctttagcagcactgtgacggggcaggcttgcattctgaaacttgtgtgctggcggcctgccacgtgctgactggctgagtggcagctgcttgcgctgtgcggactagctggtgagcacgttggcagttggcatgggctctgggggtgggaacttagaggggtggaatgtagatgggtgctcaagacccaatggctgacagttttgcacaaatgtttctcatgctgggcttaagtcacccttacgagcctgctcagtgattaggaccggctggtgaaagccggtccttttggcagtagatatgacatgtgttacagttaaatcattgtggtgtcccagaataacagagaataagaaaaaccttgctttgggtgtggacttctgtagaaagggtataacttgtacggtcagaggcctggctgaaggaaggcattattggccctgagtggattttatactgactggtgtgacccttatccccgtgatgctggtgagaagcttccaaatctattctgaactttgcctcatgctggtgatgtgagcaacccagggagctttttagaaacatgttcttccctttctttgttttcagcgaatgcaggttgtgtgaaaggaacttttaagaatgggtttgagggcctgattaaggactggatgagttaatttcttcctattgatagaaggaggaactagttgggtcagatggttattttaaaagatatctctgtcttactaataatagcaagcaactgctgagaggatttgcggtggggagggacacgaacccaaataattgacatttgtggtgtaaagatgaagaaaaggtgctgaattcctgtattttgtgcagaagcctaggtgcaccaggctggacttacttctaaggaggagtgagggctgctctggagaaaggctgctgtgggtgtacaggttttatattttccatttgcctcactcacctctttttgcttcctacagggaagaggctgctttgagatgctctgcattgtctgtcagaaagaacgaagtttctaattacttgctatgtatagtcttggagggaatgtgaaatatgcatcaaagagccaaggaatgcaccaatcattattctctctctctaattcagatggaacatagtgacagtgcctcagttaggctggatggttttctcagcctaggaagagggtttttctgaacttttctactatcccctccagtttttgctggtttttattttctctttgtttctgtttttcttttttcttttagagatgagaattcactgtgttacccagactggaatgcagtggcctaatcatagctcactgaagtcttgaacttctgggatcaagcagtcctcctatctcagcctcccacgtagctgggacaacaggtgcacaccactgcacatagctaatttggaaaaaaaaatttcagagatgggtcttgctatgttgcccaggctggtctggaactcctggcctcaagcaatcctcccactcggcctcccaaagcattgagattacaggctgagccactgtgtcagcttttcttcttttacttctttggttgttacatgcaattttgggaatggcttaggcacaaggctaaacattttagttaggaaatttgaaaaaaaggcaacaaaagactttaggaccagttcgattaatagtggggtgcagaaatgatgttccacatgaaattgtgttggactctataggttggaaagggttagttctgataggactggaaagggttaatgtgagctaaaccactcttttttctaaaggggagctggcactattaatgtacgtgcagtagcacagggcttcaggattttgttgtgcttctgaggtcttttaagaaaatttcctcattaaactgtcatccttatctatgtctacaaatgtgtaatggatgggttcttgtcttttgaacttatttgcctggattgctaagggtaatctttgagaaggtggatgtgattgcattaggcaccttgtctgtcttgctcactgtaactctagtgccttggcttgtgcctgcaacatagtagtagcatccagtaaatatttactgaatgaatgaatgcaggaaagagaaaagagaactactgaatgcctcctctgtgtctgctactgtgtgtggtatgtaaaaattatatttggcaattagaagacattggtgatcatgaccaaagtgctttttacatctctttccatctttctcagccactcggtagcagtactctccttttgtcacttccttgacatcactcttgcctggattcttacctcattgactgtttttgttcctctgctctgcttgtaaatgttggcatgcctcagcacttggtcttaggtccactccttgatttttacattttcttcctggatgatctcatccagtaatagcttcaggtaccagctttattcattggtttcctaatttttatctctaatcctgagcctctgagctccagactcagacatctacttgtatgtccgatggctcatttttcatgtgtaataagcatcttattcttaaagtggctaaatagaactcttgatttgttccccaacaacttgtttctcccatagccttcccctggctccttcaatattttcttaatttctcttgtccccttactgtccatttttcacatagcagccagggtaatcttttaaaaatgaaaaacagttcaagtcactctccattttagaactcttcattggctcccgtaacacctaaaattctgactccttaccctggttttgtggcccaatcaatatcatctcctaaagttgaccttctagccctgtccagctgtactaactttgtttctgttcctgcaacatcctaaacttgtcttcaccttagagcctttgtacttgctgttccctttgcttggaacacattacctgcaaatattcacagtactgattccttcctgtcatttttgtctctgctcagttgtcatccagaagcctcatgtgaaccaccctgtgccaagcagtccctgcctcattttattttccacaaagtgcttaatgctatctgagattaccttgttcatctattcagtattaattcttgcgaactttgtttctctgattcacagatatatttccctctctctgaagagtatgaggaacatagcaggcactaaataaatatttgctgaaccagtgaatatactttatcatttaatcctcatgggaaccaggggcttagagaagttggtaaatgacttgacttcttaagtcttttcttttttttgagacggagtctcactctttcgcccaggctggagtgcagtggcgctatctcggctcactgcaacctctgcttcctgggttcaagttatcctcctgcctcagcctcccgaggagctgggattacaggcgtgtgccaccgtgcctgctaatttttgtatttttagtggagacggggtttcactgtgttagtcaggcttgtctccaactcctgacctcaagtgatctgcctgccttggcctgccgagggattacaggtgccgggattacaggtgtgagccaccacggccggcctcaaatcttcaaggaattttcttttccaccagaatcttgatggccaacccatatcctgcttgcattcagttttctatttttagtttgagtatagagaaggaaaatgatgtatatcaggatgggctattatatacaaggccgatattattgaaagaagaaatcttgcaagtgtccagaggtaatgagtttcttaatgctattgtccaccattgactggtcagggtgaaaaggaaggaagcagaaaggaaggaaatttacagtaattaaacatgtagtatgtgctgagtcctgcactgtgtgcttttaggtatgttacctaatttgaatctcaaagccatcaatgcatggttgatattattgtgttgagtcaatgcaaggttgatattattaccccagttttatagatggaaaaactgagacttaaaaaagctaaaaactttgctccaggtagcacacttgttcagtggtagagctagatttcttaaaccgggggctacctgacaccaaatttctcactttttatgttatgatggttgctttgtgagatggatatgcttctaaaatagtaaggacaaaaatatgaattcaatgcacatccgcatagattataacaaatatctgaagcacaagaataagttatacagacaatatggaaaacagacctacaatattcaatgcctgagcatataattggatgaatagaatacagaatgaacatttggttctctggcagggctcatgtacggtatgacatagagcagctgtccccagagaaagttctttgtttctagactggtactacacaagcagcatttgagcaattcaggatttctttctgctttcactataaatagacctcatggaattctgtatatcaaagttaatgcaatgaaaaggagctgcagaatatggaaataaaccttaactcattctataaactagaagcgtgtttggcatcgggaggccctaaaaacgctgtcattccttggatggattctgaggtcttatttagcatatgaaattgcagagtagatcctattatgtaaggagacaggaggacagcataatgtggttacaaaatgaagaactttgtgcccttcagggaagagttaacagggcagatatacatagagaaagatgtgtgataagaatgtggaaaatgaatgaatgggtggcatgtatctgtgtgtattgtcgaagccgggttgctggataatcctcagatgtcagatttccgtaaggccagcatgtgactcaaagcttgccactcaacagagaatactgggctgtgctgatattaagaggctggctggaagctaggctcccactgtgcactagcctacctccctgtcgctctctgcgtgtgggtgggtgtgcatgtgtgtgtgtgtgagggtatacattttatgcagtgggtgtttaaagagctaagcactgaagctggatttccacaaacgatcatcacgagcactccagacacaccaaacttcctctcttggtattttttttttttttttgctttcatcctttttaaaaagaattttaaaaccctaaaggggagagcccccaacatcctgcctacaggattgggattattttctcttacctgtctatgtgggtgccctctcaaggttagaactgaagctatgtgggaccggcatattctcgagcaccagatgagaggagctgcgtgaagcagtagcagacaccagaagaagagtgactctgccctgctaacatgaacaacagcttgcaggttaacctgcccagaagctgggctgctccaagtggctcgctccaggagaagtctgagcattctttttttcttttttattactataggatggaggatgaagctgtcctggacagaggggcttccttcctcaagcatgtgtgtgatgaagaagaagtagaaggtgagctttatgggtctgggaaagtgtctgttgacatacatatgtctctatagataataacattcatgcatttcatatatcttacatttttaaaatgaaacaccaaaccttttctatagagtttcatcaatctctacatttgcttcaacacagaaagtaattttaagaacttcactggaccatcaaaatctgattcaatatgggtcttgcctggtttaaaaaaagtcttattttaaagtaagtgcctatgttagctgtgcctcttcatcaaaaataaacattttaccagataatactaaccaccttccaatgactaattcaagaaagctgctcgatttatataaatatattcagcagcatctttaatattctttcttgtagcttgtagtgtaaagatatagatactacagaaggataatgataccattgttgcaggagaaatgggtttaagctgaagatgttaagagtgataatcatggatgactgtcagttaggaaaagatggacaagcattttttatttaaaaaacttcagtctcttttgctgatgtttcctagtgcctgttaaaaactaaagaagagttatgttttacctggtgctataatactttcagcgggcattcccttttcctgtctcctgacttatcaataatgtgggaataatgctatttatttgatagaaggcaaagctgaattaatatttattaaaataattatatgaaggcatcacagatatatgttattattcatatttataatgagatttttaaaaatcagggttataggcaatactcaaagttaaatgaaacttgcaggtgaatcatgtgatcaattccaccatttaaagtcacctgagagacaattcatttgtgttttggagattctgacctgaccggtgccatgtggtaagcatttagtgccagccccaaacttgaaccagaaggtggtgggcttgggaaaaagagagtcagtattgtatgttctggagtgattcttcaagcagactgagcaccaggtactgggcaagtgatgctcctgtgccacttggaacagtttgaatagtgtggctatcatgttgtttctcatgtttctttagtaagtttcttcatcccatgtggtgttagaggattggcgcctccacccgcccccctcaacttcccgcatttatgctcttgagactgactaataagaatttgatgcctaagtttcttaggaaaacggaaactacagtattttctttcatattgttttatgggttccttgcatttttgcaacatgctgtgggaaaatgtcaagctggtgaaagcaaaatagtaaaacttttgtcttaagattcttggaacccatgatgttaaatcatcattttagtgactctgtcactgtcccagtgtcaaagaggagataccagcaaagaggagatacaagcaaagaggagttatagcatatgaatataagaaataatgtagctttgagcaaatagcctatagttttaagacaattgaagtagaaaaagcttgggagtgacatatactgtgtgcgtgtgttttcctttgagaataatgttctagctaggttcacaagagatgtaaatcacttcttgagtttgtaaggtctgtaggattgacagtactctactgaaataggatattgtatactgtttcttaaggctttgactaaaaagtgcgtttcctgaactatttcccttgattttcaagcacaaaattaagacgacaatataaatgaatagcacacaaatctgtagccaggattctttaagaagaaacagaaacacaaccaaaggtggtagaaacatctgtaaaattcaagaaatgtgttggttttgtgatgattaaaccgtccaaatggatttgtgtgttttcctgtttttatgagacctctattttagtgactgtctttcatgttgattggcacctgagctgactacatttcttccaagacatgctcagatagttgccggttgctgagtcctgagccccataagaagattgcttatggattattttgtgggtaactttcaacagtgctgactgtcttacagtactagccttgaaattatagtaattgctcatttgaaatgaacaaaattgttcatttttaatttggtgttctcccaattgaccctccccctttttcaccttgctttattggtgggggtgggaggtcttagatttttatagtagctctaggtgatagtataaaacggttgaaatggacaggggttttttggcacatccatggttccagtgattgagaatgaagaaacagacggcctatgttaagacctctaagaagtattcacattttgaggggaatgttttttcccaaggatatgagtccatctcatatttttaattgcatagagaagagtgtatctgaagaaaagcaaactgttatctctattctaaagtagcttcctggcacatttatggcagaagtgaatgcctcagttttaagggtcagaattcaaaaggcaaggagctggaacactttatattattatttacattttcttttatgaaagtagttatttctgttgcttctaggataaacatagaagtttacaatgtttgtaaacattcttggcaaagtcaacttaaaataaaactttgttttttacagttatctgcataaataagatgtactcccaataagtgattattaaagtaactaaggtctgatagttcttgttactttgaaatatttgtgctttaaaagtgcttagggtcccctaatttggggtgattggagtcagctcaacctgaaggcaagaagagccagatactctctcttagttgcttcgaatgctgtggttctgaggagagagacttcaaaccacgccctcagttcaccttgttcaactttactctcagtgggtggcatgacacttaatccacattctaaaaacttaatagaaaaccatcaactgcaaaactcactaagcacagagtgagtcacaagaggagtcatctgtttaagtaatgaatttatctatgtggcatatatttaaaggcctaaacctcattgtcacataattttcttcatgtgttaatggcttaaagagatactctttcaaaatgaaaccaagtgccaattttaatctttaaaataaatagaagcctttaaatctgctcttccactggttaccttgtactatgcgtggttttaaagttaacatttttaggaggagaggggttactgtggataaactcattttaaaatgtcagtatttcagatattcatatttatttctttatcaaaatgccccagctcccacccaggcccttccacgcttccacagaattggtctgtagatgacaaattaacattaccagaatgatccataagtgttgaccacgaggaacaaccactcacttttcgtttcaaacatagatgggggaaattgctaattacgtagcaattacgtagtgattgctaattacgtagtgaatgaagattgagataggaagagtcagtcccaggtaactttttccaaaaacagaagaaaatcctatggatgttttattcctaaaaaagccagccagaattttggatctgtatgatataaacagattacttaatagtctcatattttgcaataggggaaaagagcaaactccaccttatcctttgagataaggctttggctctgcaaggctaggtaactcccagcaggccttggcaactctgacttcatgaggaggggcctcttcttaacatcaagttcaaccaacaactcagaaaatataagatgcagtaacacagtattggttgaaatgtgtctccatttttgaggcttggtcagtactctcctagagctattatgctatattgtgctggttttcctcttccattcaaaacttaatgcagtgggaagtatgcacccatctgtcccaatggaagaataattctacaaattcacatgtctactgatggacattaggagggagtgttgttgaaaatgcatggaatttacaggaggattgttttcaggaaaagtaaaaaaagtatgtcagggtctgggacagggtagatattcactaattatttgttaagagaaagaatgaataaatgaatgtataacataaactaaataaagcatatgtagaatcactttgtataatactctgacatattttttaaatttttttgttagaaatttggttctcaaagcctgacgtggtggtcatgcctataatcctagcactttgggaggccaaggtgggaggatcacttgagggcaggaattcaagaacatcccagaaaacatggcaaaaccccatgtctacagagaaataaaaaaaaaaatagctgggtgttgtgcatgcctgtagtcccagctactcaggaggttgaggtgggagaatcgtttgagcccaggagatcaaggctacagtgaactgtgattgtgtcactgcactccagcctgggtgacagagtgataccctgcctcaaaaaaagaaaagagaaaaggaaaagaaaaaagaagttttgttatcttagtactcttattctaatgaaatgatatagcctctcatcttatccttggtattactcctgcttgattttgcagagatcattatcatacttatatcatttatatatttatactgataagaaaaagaaggtcctaaacacctctgctttatcaaactttttcattctcctactctgttttttgaagagagagactaaaataatgaaatggtggcttttgtctttttggaagtcaagacctcaacattttacagacatgaaatcatgacttaaacctatttcttgctagaggatatgatgatcatctactcgtgtactggagaaggtagtatttttttctaaaaaaactggggcctggtagacattttttaattattacaatggtataaaacgtaatttctgagaaggagtgaatgaaaacctatcggatgggcagggaggggccaagttgggactggggctattctgagcgctggatataagtgtccggttgcattttgctgacctcttctctgctgttcactctaattgctcagaaaaacagtgtgtacagaggaaactcttgggcaaatactgctaaaggaaaagccttcttaaaaggaaacaatgtatccacacattggcccactttaaagaaatacagtgaggtttttaaaagttggtacttgaatagtaacataggtttcccagaacaggttgagcccatacagacctttcccagcttcctgctcctttctcctcatggcctcagctgaacgctggccagaggtcctcaagtatgcagcacttagctctgtagctgcctgacatctcttgctgtgtcagggaagttaaatatttatatatagatttctttcacttcaaggaaggctgatgatagttccgtgtgtttttgaaactagaatcagacatttcttctgagaatttgagaattttccaactgcagagaattccctggtagtatagtatcggccaaagccctcttgaagccatttcctatcctaggtgttggtgttctttgatggcaataagccataccaaattgcacgtggtacttgcattgtgtttggcaaggatccagaaattctgaaatagtacacttatagcagttttgcctatagattgagcttctttttagaagctttttatctggtcatattagtgagacatgttgtttgatatttattttggggagtctctattgtttattttattcaagtgttgtcaaagcagaggcactaagtatcagtttgagaataaaaatttaaaacttgctctattgccaaatcattgcataggtgaaggaagcaacttatagtttagattatgggtttttctctttgtaaaatgggagcaatggagcatgtcattcaccttagaactcttaagaacttccaacagcaattgctgctgtacctggcattaggaacaggagtgctttatactccaccactgtctgttgtttttctttctgatggatacagcctcaccaataattttctttggttattataatcttctttggttattataattttcttttaattacttaattaattattttcttataatttagttattataattttcttataattttatataattttctttggttattataatcttttctacaaatcgtaactggtgtaaatattgtttacttgcttaattcatttctccctacatctagcctttgccttcctaaccatacttacctactgcttcttatattggaaaactaaagccagaatgatccattgaaacttcccaaggcttactctctgtttgcctttggactcattctcatcctttaagctctgggtatgaaatctaattttcacagttagactgctctgatacacattatccttaatttgttaaattgtctttttttccaagaagagggatattaaccataattgtatactgggtaaaacgcaaatcttgtccattgtataataaagcctgcaatgttgcttcatttggaaaatggattcaagaatgtagtgtttttctgcgagtgagaaggattcaagagtctagtatgtgtatatgtatttaaacatgcatatagaaatgcatttccccttgtctgccacatagactagaatacttctgcttcctactggccattatgtaatttaggtgccaattaaatgagattatgcaacagtatggaaatactactatatattctaacctgaactaaatatttccccttttttatcaccatgagattagaaatcattgggagaactgagaattgggcctgatgagaatgagtaaaataagaatataataaagatcagttgaggctttcttgttgctgtcatgagcttgctggtgagattttattttattttgttttattttattttactcttttggctgattgcatttaggtgactgaggtgagagcctgcaatggcataggttcacgggaggttccaacattcatccctggatctgctgattgccaggtgggatgaaaggtgaaggtagtgagggtggtgagtgacatccactgaatcagcagtatagatgacttaaataattcatttctctgaatagctgaaaagttttcaaatctggtaaattgtttctgcctttccatagagttagaattagaaggcagctatccaaagggctatatccaatgtgtgtacctttcttcatattctgttgatttttggaagaacagactctacttagacctcatgaaatattattttagtgactattttcatggtggaatgctcagtaacttttaccaggccaaaaacttccgggaataaaaagaggttttaaattttagtaacattggccagtatatcagctttagaggaatggaattacattgttatagatgggttaaatcactacccaacccccaattgattattaaattttcaacaggaaatttgattcctactgaaaaataaagaaaatgtcttcaaggtagaatgaaagcccatgattgaatctaatggatacgtgtgtttgacaaattaaattagtatctgattattcaagtttttactcgcttttattccttctgttctatggtttagagaacatggtggtggaccagtagtctcaggacctttttctgttcctggtctgccactgcctttctgcataatacaaggcaaatcattgtcatgtggttatggttccttcatgcaaagtgcagtgagtaacccatcttcttagccacctactagaaatgctctaagaatttttggataatacctgaaaaataccttgatacttccagtaagccattaagaagttacttaatttctgaatctcagttttttgtacaagatagaatttgcacctctcatctcctacttttttctaggaatataagtaaagcaatttgaaatcccccaggattaaccgcataaatttaaggtattatctcccttgcaggtaattgttgtatgtaatttatctttatgtgcaacactttctcaccagtggttgctgtgactgcagaacactttcacactaaagctaatactaatatctggtaatcaacagattagttgattagtacttacgttaactcttcttactaaatttaagtaactgatggaccatgctttttttttttttctttaagccgatcaaaatggtaagaacagttgcaggtgtgacctctaatatgttgcttttccaggcttatgtgtatcattgaatgtgataacattgtaactaggaccatgattattgtttagtcaaataaaccagccattatttaaggacacaaggttagttgacatggtaattttagagatgtatcacatacgtaggtgagtttacatggaaggccagggaatatatctcctacagaataacattaaattgagacctaaaagaggaaaaggaatttgctaggtgaagaatcagggaagcattccaggcaggcatgtgtgaaggtccagaggtgagaaagaggtaggcccatttgagaaacagaaataaggctacagtagctggaccatgtgaacagggggagagttctgaggtggataggacccagataactcaaggtcttttatgttatgctaaatattagcattttattgagtgtgcactaaggaaacattgcagaagggttttaagcaaggaagtgataagaccaaatttgtattttagaaaagattcctttggctgctggatggagacagtgtcccaagagggcaaagacagaagtgtgggggctgttgccaagattcaactgagagatgattttgggttggacaagagtggggacaaaaaagatggagacaaatgtgttgaattgatgggtggatgtatggatggggatggctgcttctggatttctgttatgagcaatttaggggatcatgtaccattttgtaagatggggaacagtggaggaagagtggtgggggatgataggagtttagccttttgtatatattgaatttgaagcacctgtgagataccgcagtagaactctgaagccggtagttgactatacaagcaggaactaagaagaaaggacagggatggagatataaatctgggagtcctaggcatatagctagcatttaaagccataggaatggatgatattgcccagggtcaaagaatggagtgagaagaggactcgattggactctgcaagtgccaacatttggagattaacaaagtgcagtcatagaagtaggaggaaaactgggaagagggtgaagcctctgaggccgagaagagggcttttaataaggagctagcaattgacagtgctgaatgctgccttgaagtctggtaagatgaggattaaatagtagctactggatttggcaaaaagaaggtgattggtaacttttgttaacaatgtgggtgtcatggttagttgggaataagagtgcccaagagaaaactatcattatgagaagttaggaagagactttgaggtgatgctggaaaacgtttagcctttccctctatgtgctccacttcacttaactaattaaaacatttggaattattatagatgttttagaactagaaaggatcttagagaaaatttagttcaataggctagaggaaccatgaagaagttaaatgatttcctcgaggtaaccttggtaggagttggaataactaggacaaggatccacgtgttctgactttcccaaggctgtgctcatcccaaaagagtgtgcttgaggttgactccctctgcagaggaaaaggaatttaggtagggagatggatgagaactaggagaagcacctggaagaacaggaagtggaaagacctgaaaggaataaaaggtgttgaaagagcttacagagaggtgagagggaaagaagacataagactggctgcagcatttgaatgacccctggtagtaagtgggaagacagatgtcccagctagaacattgtcatattttggagcagtttatggaactaagggtggtggatttcaatttgtcattctgtatctctaagacaaacatttccagagaatcctgagcccatttttcccttctcaataattactaacttgaaaggattaatcgttattattcttttggctgttttttccagacagtggaggatgggagggatgggtggaggactggtaccatgatagtggaaaaatgggaaaggaaggcttatatatccaggggcactaggagtcctagtctctatacgtcattaattgcctatttgactttagttagatcactggtaaatgaagaggctgaaccggttaaagtgatttttaggccactttaaaagtgtgattatgtgctgctgtgtcaatgaatgtcgtccctctttttcctgggtgcatgtggaaaaccacagtattgaagattctgggattctaggttaacagaagtctctcatagcatttttcctagttctgggtaattgttatagccctatggtattatctacatctcatttacctacatatgtgtatatgaaggaagggaataatgtgaactttaatatttatattttataacaaatataaattaatatttaatatattaaatatttacatcaatattttatataagatataatatttaaaaatatgttcatctactaatacaatataagatatataaccatatgtaatattttgcatatatgatatataattatgataatagattaacatatattaaaatatataatatttatatattatattaaatagttgatacctgattagccatgagtgtattgactatattgcagattacctgtctatagcaaccaaggacccttcatcctattgcccagccagggcttaggccactgcaaaaagagaagccataatagagtcagagatggacaatgtggttggaatgagagtgtgaacgtgtgcatttatgtgtctctctaagctgcctctctggctgcaattgcaaatccagttatcaatgaccactgaattagctattgtttttttatcttccaaccctacttcccattcagttgtgcaaatggtgaccaaagagaaatgttggaaactgtcagttctctgtgtttggctcacaggtggattttgtctgacagcatgtgtactgcatattacaatgcagtagcccgtgtggggtggttctgggtgtcgggataagtggagggttcatgtcttcccgttgggtggcttctgctcactctgagcactgttctgcctagtgctggacttcctaggccttttggctctattctgtctcgttggagcaagtacaaggacttacagacctgtttcctgcagattggcagtgagccattgaaagctctgggggaaactttgcccaaatcagggtggagattgccaagcccttgcttctggacagagttagggaagattgaggttatggaaggtgctgcctttgttgaagagctcaactctgtaggatggctaaaactgccgattaagggacaagttaagaataggtctgaggttgactcttttgccctcctctaggtgaatgttctggagaacaaagagtgttcacaagttagttattatcagggctggaggtgggtgggaatgagaaaaaactgtgctctgtttttttctcctttgaaaagggaagggagaaataggatcaacatttatgcagcacctttgtgtaccagacacagtgggagactatgtttaattcagaatgtgcattaaataaatatatatttatatataatctctctataaagattatatagagatagatatatagatatttgtataggtaaatttatatctatatagatataattatatagatatagatacattttgtatctatagatatgaaagattttgctagagcaaagttaacattattttggagaatcaactttgaagattgaaaagctcttcaggaactgcagtttacatagggtaacctgatttctaattttgttaattccttaaggtagattcctgaagtaactttaaggggaaattcttgtttttctagctaagatcttttcaaataattgatgatcactgaacataataaagttgtatttctataaacatattcactaattcagactttatagagtgccagtcagtttttgcctttactatcagccattaataatggaaacttcaaaggaagcttaacttcagtatgtggtcttaggcgcctcaccttcatctaagactataattaatagaactgttttattaaaaatgagctcttggaagacagatgcatacgtttgctgagctaaaggacaggagtctagctaacaatcataagcttgtgtctcctttgagaccttttattctgtagctcttagttcttgcctagagattgttatcactattattatcatcatcaaatattaaatattaatagtgctgtgctcagtgaacatcaagtaacaagctaagatttcttatcagtcttgcttggggaacctcaggttgccttgaggatttctgggaggctttcagtatataaaattcccatgcagttcagtgggaagaaaagtatttccctgtttttcatcacatttgtcatttgcttgcatgcctggtcctgtgtaataggtagcgttaaaattaaaataaattacttatcagtattcaaaattatctatacataaatgacatatgtaatacgtaattatctattaataaacacattattttttatgtaaaaaaattgcccttatccatatataaaaatagaaatcatcccttgttctgagtctggaccctcatgcaaaatttcataaagggctggtttaccccctggtaactgcaaaattatgctgtgctttttgaagggggttttcttctcatgagctggtatttataccagtaaattagcaatgttactttgcttgtatcttattagagctgcttatggacactcttatgggtttgagaataataagctaacaaattacttgtattttggctgagcgtggtggcttgtgcctgtaatcctagcactttgggaggccgaagtgagtggatcacttgaggtcaggagttcaaaaccagcctggccaacatggtgaaaccccacctctaccaaaaatacaaaaaaactagttgggcatgatggcacatgcctgtgatactcaggaggctgaggcaggagaatcacttgaactggggaggcagaggctgcagtgagccgagatcgtgctactgcactccagcctgggcaacagagcgagactctgtctcaaaaaaaaaaaaaatcacttgtatattattaaagtgtttaggattatacatacttgtccatttcttgttaaataaaagtgtcaaccacacagtgtccactgtgcctggacttgatactgtagtttggtttaagttttcttatgcatatacttttaactgagatttttttttggtccaacaagtaaagtctttgcagcatctttttataatctgtcactcatccagggtctccgcctcttctacatttttcttttcttaataaaaaaaaataaatctcttaattttgttctacctacattcctcttggcaatagctacaacatgtcttgggcatcttggcagaagaccaggttatattagataagccagggaaggcagtatttaactcatattttgggaatattgctgattagttctgaaagaagtatataaaatgctgcatgttgtagaatctttgctttgaactggagagaacagaaattcagctgaaagagtaagagtgtggctataaatcaaatctggaacatccctcagtgtttaattagagatgtatgtaagaggctggaggtaggggatggatggtgggaggtggggaaaggtagacttctgggtaaagattttacctgtcctttggtgatcctttagatagaatacagtactgacatatcaggttaaaaaattatatactaccttattccaaaaagctttagggtgaagggaaagtaactgttgaaaagttggaagaatgaggttgtgtataaaatgcacgtcatgaaactctatatgctcactacgggtttgcctaaaatttgtctattctcttgttagcagccaatgaggaaggtgacataataagttattaaatttatgatataaatatagtatgttttacagaacacaccatcaaagtagtgatgaagcactgtactagtcttgatactgagaacagagacatatttctcctgtggggttttatgaagagaacacttcatacaaagttaaatggttataatgtccttggcttcctcaaactgtggtttttgcacctgtacaatggggataggagcaggattgcatgaggaggtagatataaaacacctcgcagtgcttggcatgcttgtaagtattcactaaatagttgctatcatctgtatgtacagtaaacacagcaacatgtttcccaggaaggagctaatagatgtatcttacatatagaggcatatgttgttaaccatccactcagctatagaatttgtagtttggctgatctaaaacccttttctggcttgaaggttttcatacttcaaagtgttaaatcatccttggtagcaaaatgtgtatttgtgaaagccaccttaatttgaatggctccagagttactaagtgtaagttttttgtttgccagaaaacattgtagcaactatgagaagtatgaagttaggttagaaatatttcaggaattgggataattggatgagttaacatcatagtacttcctacttgcaactggggtggagcatgtaaggatgggaagaaacaagaatcacgtagtgatcatttctgacattcagagatacccaggaaagccatgttttctttccagtagtactggctgtggtacggattgggagatattcccaagatatttagagtttgttgggaacttgcaccatctgtcagagaaaggcatgcagggtatttatttgaacacatgatactgaagccactgccaaatcaaggactgaatgctctttgacagcacacctaaatgaacactgtcaaatgtagattccagtagttttacttcatgaagtttcagtagcaagaatgtaacatttattttgataacatttaaaacgatcacttcttcctcatacattatagctcttaaaattttttccactcctcctttttacattatctttggaagcagtatttcctgagttttctagtggagaatttttttttagcctaaaaagttctgtataagaagcaggttaactatccctgattctttaatggtcttactgttttgtagtcccttgctgggttggaaagcttgtctgtcaagtttctccttttcatattacagggaaaacaatactatatcctcagctttgtgactcccctaagaacttgcagtcattttatgagttataattttaaaaatagtcatcagtcttcatgacatatcccttaaacaggtaaagagattttaatgaaaataaatattgagatccacatgtgatgttctcatcaatcatagcatattttcaacagtaatgatgcttctattgatcatgatgacagatattctgtgggggcagtgagaaagcttccattacagctcattttactttcggtgttttggttacttggcacatatagcttattaagtatttgattgtccctttgagacagcatgtctgtattaccccatccaccaaagcaaggctatcttgctctcttcttataggcaaggaagctgaagtgagagaggctgagaagtaactgatggagcagaaagcactgtccctgagcccctcaaggtttgcttaaccatggaactatgttccttgtcctctacctgaacacaagacagaaaaggaaaatttagttaccaatcacatgtgagaggaggaggatgctttaagttttgaattgctcagctcagtggcttgatttcctctggcagttgttggaaggcaatatcttcctcatccagggaatattgtattttattgtgctgtaaggatgtctacaaaaagttcattgccatatgagtactagagaatggtagcttcgcagaggccatcactaagagttttaaaacgtggtcaagagtggttgcattagacaggagtgggaacagagagtgactgcaaatggatatgagggatctttttggattggtggaaatgttctaaaattggattatgatgatcgttgcacaactctgtaaatatactaaaatcattgactgtatcattaaaatgagtggattttattgtttataaattacaccccagtaaaggtgattttaaaatgcctaaaatttggcatgtcttgagaggaacaacatttctgcttgacctctgggcaccatagcacttcacagtgcagtgtcaattctgaacgctcccacacctgtgtggaagtgcacagggaaaaccaagaaggaggagttggaggaaatggggatagacagaatctgttgctgagaggatgcctatcatcacgatgtgaacaaaatggcaccacttatgtgataatgacaactcaaagtaggttccaaaaagtcaagtgcatttctctccagggtttgatggctcactctctgaactggcctaactctttcattagattgaccatgatgacacttcctagccagtaatcttaccttagcatcttatccacccatatagactgtctattaaatgatttgatcaaatgtactatgcagatttgggtaaatataatttaaaaaacctttctatataacatcatatggcaatatagcttaattaccattttttgcttagccgccatatttaataaggtgaatagaaaatatttaatgtgataggtttaaaaaaatttttcaacctcttaatttgtgtgtgttttcttgaaaacaaccaagcatttcgtgtttgatttattgaagcaattggttggctttgctcacttacattgttaagacttgagataaaacttcaggactccctcagtaactggagcacaggaaacaattgacactgtttcttaattcacattgtttctgagacatttcctacttcctagtataatatagctttcccatgagaaccatttgcttgcaaatggttacacatgatagatacacttctcactggcacacattctgtggggagaatttcactgtgttttgtagtagctgagttgctgcgtgtgtgttgggaaggaggtcctgctttatgtaaagatgcctccaacttcattcaagcatctgatgtcttcttttgaatactaacccattcacttaggttctgcattgcttagctggaatatctttcctgaaggagcatataattctttgaagcctgccaatttaaggaaacacccctgccaattatggtgtttttagatataccccgtaggttactgtggaaagtagttcatgacagtttgtatcatacatactgtatgtacatgtatttgcatgtaggtacgtgatattggctgtggcattgcaaagttgtcatcaaggaataattccggaaatgggaaataaaacccatagatgagaaaatctaatctaatttgcagttcagacaaaaatgttcacattatttctcaaatggtagttcctaaaatacagaagttatgctgtatttaaagtgaaagtagaagtttttcaatttaaaaaatgatgtggaactttgagtttctttcttttttgtcttattagattttgtaaaaataataccacttgtcagttttgcagctccttccatctagagagctgaaagcatttcacaatcttttttcctcatgcccttctcttcaaggcaatttttgctgggctcggtttatttttatcattgcaacaaccagtttttagaaacttttggaaatgaaaaaagaaaaatgagaatggcactgtagctgacattcattttagctgtttcctagtgtgaacgtttgagtatttctaaaatcttttctccaagtatgtcttatttttctcagtttgtcccagttctaagtctctattttgctgattaggtaaaaaaaaaaaaaagttttaatgtaaagccttacccccagcaaaatgactttttgaactttgataaatctttatttttgcagcgccagcagctccttttccagcaggcactaaccctacccagtataatcatagactcatgtaaggctgaaactggagggccctctagggattacccagtttaagtctctccttctagaaatgatgagaggcccagagtggttaagagatacatgcttaaggtcagacaactaattgatggcagagtatgacaaacatgaaggattcctgatttccagtttgatattccttggttttcctaaacaaaagtagtctatctggacagaattagagtacactctcacagagtcctagtgtcagccactagcttgaattatactgaagctaattgaaaattgggaggaaattttatttttctagagtttgccaaatatagaatggtaacgttgaatttatagacattttcttctgatctgtgtatcttgtgcaatttgtctgcagtagagaatgtggtttgaactgactggtgatttgtgtaccttccttaggccaccataccatttacatcggagtccatgtgccgaagagttacaggagaaggagacgtcacaagagaaagacagggcacaaagaaaagaaggaaaaggagagaatctctgagaactactctgacaaatcagatattgaaaatgctgatgaatccagcagcagcatcctaaaacctctcagtgagtactctctgagcgttggtgcctctctctgcctcactcccacatctttgagaaggacacctttttgaatcttgtggctaaaggggagggacactgtaatactgagatgtttagaatctgttctaaaggataatgtctgtggagatgctttgcttgtaccagcaggttaatctaggaggtcatctggtaagattctgagttgatcagaaaaggcctgactaagtttaggcatagctgtgtattctacatttttatgtgtaatagggtagtattgcagatggtatttaactacagcaataaacagtaactggaagactcttaaagaattttttgcatggtttatgcttagaaataggttctgttgagacagcaggtgaagatgagagtgtatgtctatatatttacatatcttaccaaatgtcagcattacaggtgacataaaaccaggttatgagtcaggtcagtgatttaaataggaattgtggaaaatcatcctgtaagagagatctgtagagtgacacagttgttaagatgttgaatgtattagatgtcatacactggataaaagtgttactaagagcagaatagcaggaggtcaaagaacacccttgaattcaagtgataggataggctgtgtgtttagatgtatgtttatgttgctttttgtttctttaatgtggagaatatttggctacatgggccaaatattgtggctgaactgagaatgaatatgtgcagtagaaacacatgccaattttggaagattccccaacaggagttacacagtgacagcttttcatgttggcagagctctgtacattcttcatgtctttgctacagttgcagaaatatggaccctgcaataaaatgcattatggatggcacagataaagatcgggttcagtcattgcagttgatgacaggccaaattagaatgaacagctcaagggtgttgaaaagtgaatttacagagttaaattaaagagggtgtgaggcatagtgatgtgaattttttatagtctcaccgttggaactgagcaggtggcttaggaagctagagaagtgcggtgctaagaggagaaatacaggtggaccatcgaattaaagacagaagcttggaggggagcttgagatggatcatgaaatctaaattaaaagcattgaaataaatttaagacttagaaggaccagaaggcaggagactcaagttatgtacttttcactgaagtactgggggaaggtctgtctgaaagggatcctttacatatcgattaaggtagtggagtctgttttgagaaaaggccttaaaatgcacataaacatggcacagttaatagtctggaggaacaaaagataacattcttttccaaataaatgactaccatttatcttgatttactctgtatccatctgtcaaggcctgagccagtgtcaagtgttctgtccattgtgcatgtgattgtctactctctctctttctctcctctctgtgtcttttataacttgtctttcattcttcagattagaacaagagtgcatcatcactattaatgttaaaaagtaaagaggtgctcacctagacaaataggcccaggaattttgagattaaaattatatatcagcttttgagaagggcagtggaaacagtgccagcagcactcagataggtcataaggaatgaacagatcaggaagatgctgagaccgcatgtgtatcaaccatagaatactgttgcattctgtggcatttggggaccagtttgaatacagcatttaaaataaacaaggcaatccattctctttcccctcagaggtttcttcctgggggaatactgcattatgttgtatactggttttctgaagggatcctatggagagacagttgttaaggactaaattgttcagtgatcataaaaaaattatttataagtatgcattttaccgttttgttcctgctgatcaatgttatacactaatatgcctttggcatatttgatatgagttatccaatttgacatgaagattctcttagaaattgctgtatatcctcagctgctttgatggattggtagttaattatttggtacagttctgtttaaaagtcagagtttttgcacctagatatagaaagacatttaaccccatgattttgggggaagccatagggctctggcaccaacatgatgacaaaattgttgtgggaaaactgaatgaaatacttgcctactatactattattgtctctcaagaacagccacataacagtttctgttgttctgtgacctatggtgtttgagttgcttatgtccatagacataccacgtcccatagacaaggttcccacatgtgtctggcagtgcgcgatgtgatgcttatacttctgagaaaaacaaaaaccaaaaagcccacatataaatagtaacttgatgggagtcatctttgattctttccttgctctcaccctcatatgcaatccttcaatgatttctgttggttcaacatttaaaatagatctgaatttttctgttcttttcagttttgcggtcacatttttgtccagggaatcatcacctcttgcatagacactgcagcagtctctgctttttaagtatttcttcatagagaggcaccattgatcatcataaagtgtaaattggatcatgtccttcctctgctgaaaacttcccattgtcctaagaataaaacctcaattgggcatcatggcccagtgtctttctagtcctgtgatgtgccattctctccttgctcactttactccagatacattgatattggagttccttggtgctaaaaccttttctgcctcagggcctttgttcatgcaaacttgtcttcctgaaatggtcagcccattcttgtcctggttagtttttctgttcctgtatgttctggcttttaaattttacctcttcagagagtcctttccttactactctctctagtgcagattccccttcattattctttcccaacgccttatgtttccttcagaatatatgttttaacatgtgatttttgagagcttacaggtttgtcttgagctgttgctggattgtaaactccgtgagagcaaagatcaggttgtcttgttcactttgttatctttggcgccgcacaatgcctggcacatagtgtgtttttcatacgtgtttattgaggagtaactgaatgaatgaattactacagagaaagacgtaagcattgctttaattggtctaaatatttcttatatcctagatagagatccagctgattttcttgtttttaagcctggaacatcgtatttatatttccctgccctgcctttctcccttggcacataaaatctggtcttcgcttttaattatcccactttggaaagtgcctcattattttgtctatcgccaaagtgggattttggtctgggtaggtaactcccaagtgtgtgcagctgcttgttaaccacaggtgagggatgaaactgaaccgcaaggcacattaattttttatatacacttaaaaatgctcactgttccacagagcaggcagccccccttcagaagccatattaaggtgacatgagctggcaccgtggcacatgcctatagtcccaggtgctccagaggctgaggtgggaggatcatcagagcccaggagtttgaagctgtagtgctctatgattgcccctgtgaatagctgctgtgcttcatccgtggcaatatagtgagaccctgtctctacaaaaacatgaaagggcatttataagaagtaaacgaaatatcttccagtatttaggcacattaaggagatggcataattaacaggttcatttagtttataacctaacgctttctattttcttcatggctttggtgtcaagaccgggtttctaaaaaataaatgagtgtttgatttttacacatttggagctctgaggaggaagcgagctagcttcgtatccccctctgagctcagcagcagctccaagtcctttcacagctgctattcccagtgtggcgtcagagctggtgtcccagctggggacacagagaaggaaacgtgtgtgagagcgtggtgcactgagccatggggagagagaagctggggaaggaaagtgaaatggaagaacaagcaggagagacaagggaatgaggaggtggtgtggagtgggtggttgagagaaaagttagattgtgctctttcttaaaaataatccttttgcctcctccactgtgcattttttttttctaagttagcagctgccatcctctgagggttgcccaaaaagtgggtgggaaggtggtcctggctgagataggctttggaaacacagcataccttcccagcctacatggttttggcctctgtgcctcccattttgttagtgtccagggatacttatgggggcatcacaggctactttgtgactgtagagatcctgaagatgtgtaagatggtaggaaacaaagctacaaacagaacatcgtgttcagcattttgatctgatgtgtaagatatttcttgacaagcatgaacatgcattcatgcttggaggtgctaactgcctctcacacacaggtcttgcccgttgtggaatcatagcgctaggtatgtccatacagacactcattcagtcttgtggtattcttttttagctttttggatgtgtaccagaactgatggatttatgctagtgaacattgttctgtgagcctgggacaatggatgctggttggtgatccagttatattcaggaaactgaaacagagaaatgggcagctgcttttgtttggtgcttccgggtaaatgaacagagtagcttttcataagagccaagaatatttggtgttgtgtcatttgacttccccttttcccagtgcacacccctcccaacctgacctcatacttcttggtacatttgtactttttcttgatttttaaaatgttttcaggcaagatccttaattttgataccataaaataaggtttctttaattttctacatgccattggtattctcaaaaatcgatctatatataggagaaaaggctttggaaatgtatgaaaatgaggtagacctgtcccagtttaaaaaacaaaacacaaacacaataaaactataccatctctttcatccccttctctatttttcaccttatataagtaggaggaagtactttgtctttaggtctgagtacaaaagctttttatattaaaaaatgttttaaaacttacagtttgccttttcagaagggacacttgtgttgtaattttgctggaaagggagcatatcagagtggttaagagtgcatatttgagccagattacttgagtttgaatcccagttcataccagcagtgtaaccttggttatttacttaacttctttgtgctctagtttcctcatatgtaaaaaggggatgatcgattttaatcatagtattctgaacatgaagtgagcactgcatgtagtcagcaataatggttagcagttattattttgagttactatgattgccttcttcaagcttatcttttcctatccatcatacacaggtaatgccaaaaacttgaggctaaaactctgtagagcttaattccttgtaaacaataaccactattctttaagctcttctggtcttttctgccacaaattctcactaggcgttcttttgctttagctgtcggcttggctcttggctcctaacggcatatttgagagaagcaacctaaattcagtctcttatcttgccagtgagtgtcagtctgcacgttggctggcaggtgagaggaccaagggaacaaggacttcaaggggcagaggtgctgtctcttgtgctgctcttttttgtggaatactgccaccagcaagtggcttggtgtaccaagggtgtccttgaatttagtcggcagttgtaattccccgttctggatgcctgaaatcaaatagactgttctgtcttttacaggaaggatctctttctggctctttctttgtgtttctttgtgaaattaatctggttaagaagggctgttgggtgggacaagtcagcaatttggaggcagtgttgtgcagaaaggaaaaatatttggcatacttgtgtttttgatggcaatgggttggctcaacaatgttgtgttttgtgtggtacaaataattgttgtttattcctctgtgatgctgatgaatacaagaggactgtgtcatagtgcttctgcttctttagccagttaactgcataagtctcttagagagccttgagtttctgaaatgcagctctcttgaagtcaccttgaagtgcccttcaaatggcagattttacactattcatttcttgttgccactggctattctattctaatagttattccatgttatcatgccatgagatgttatgagtagtgtgtttacacgtgtcatgggagagttgatgttgttgctatttatagtgacttatgagttcaggagacctcaaagggttctagtgtactccacgtgctggggtgctcagggctaaaaagagattgtgacttagggtggaaaatggggggaaaccagaatactgtgcagaatttcagtgtgaaatttactttagtgaagtaaatggggtataaatgactgtctgccacaggcattaccacctaagcggaaggcaggtcacatcctgtggtttgggattcaaatttacaaggcaggaagcttgaatgtgtatttgtgagtttgtgtgagtgtgtgtgatttgaatgcactgaaaaaaagaaaggtattggcaagggtcttcttgaaatagtattctgtttaggaattttttcatatagaaggaaataattcttaaagaacaagggttcttaataccagggatttaaattcagggctttatgagtgtgaactcataaatgcagaagtagttggggtgagggaccacgggcctactctataaataaattctgcggaattcttccatgaccacaatctggaggcaggaatgttaggctcttttaataactttcccatggataggagtcttacttgacttttcatcacttttatagaggtgttgcgagcaaggagtctccattttcctggttaatatagaatcaagatccaagttatcctttatccttctctgttgtttttcttccatagccagccatgcactgagcgctgttggtttttccttcaaagtttctcttatgtctgccacttcctttgaattcctaaggcaatacttcttatttggaatttcagcgttaagttcatccttgaaatagaagggagttatttcagacaaggctgccagacatctaaaatattagttctatagtctctccttaattaaataacaaacaaacaaacaatcctttttttttttctagcaaacagtatttattcccctttccccccgggtgtcatttctttgggaatagaaaaatgaccttgttttgtgtatctagccaacaattcttttttttttgttatactttaagttctagtgtacatgtgaacaacgtgtaggttagttacatatgtatacatttgccatgttggtgtgctgcacccattaactcatcatttaacattagctatatctcctaatgctatccctcccccctccccccactccacaacaggccccggtgtgtgatgttccccttcatgtgtccatgtgttctcgttgttcaattcccacctatgagtgagaacatgcggtgcaaacaaacaatccttctattgctcatcattacttaaagtaatgagtaaagcaacaatgtaacaaagtttcctctgctactttcaatattttatgtagtttaatgaaaattatagatgtactgtgtctcagcaaggccaccttaagttcatttttatgaactcataataacttccccagtttttgaactcttgcagcaagtattatctacatcacacaatctgatacttagatatgtaatgcttcaaatggtgacttacctctgtcattcagatgtatgtcatctcttcagtattatcattagagactcaaaggcagaggcaatattgcatgcttcttttgaatcatgttctgcaatagcatatttgttgagtggataggtaaataaaatgcccagaaattacccattaggttaaaataatctggtctatccaagaaaatttacaactatcttggttaagaaaatgctgtccctttaacctaaatccttactgaaaagtgattaaaatataaataaccaaagaactgtccactagagtgagttgaatcatggtgcaatgaaaagagagaataccaggaaaagtcttttttttatgctgtagttctacaatttgcaataactaatttgtacataattaaaatagaaattgtgcatgtttttaaaacagagatgaaagtgctacctgtgtatttttttttcttatgggaaatatattacaatattaaaatgcctgaaaacatgaaggtaagtgttggaatgcaaaatattataagacagcatttctttaaagaactgtatagctttctgagttggaataagcctgcctttgcttatgattatttatttagggttcatattccactgtgttgagtgaggatagagcataaaagaggttacttatggcagtgatatttgttaattactgaatgtgtcactgaggctgtttgcggagttttttttacatggagaactttaagagttggtactatatgtgtatctgggatagatatacagattaaggtccatgttgctttcagagatgaaataagatgactttagcacccttgtcaggattatgatttactgattctgaaacaagagcataactggaatgttctattcttttgctatttgccaattagcagaattctattatttaaaaaaacacattgcacatgatatccttactttagaaactactcctgatggtgatggtattgttattaaacactttgtatcaacattatcttttgtcatttatcaaaattttaccacaaagaccacaagataaaccaattatatttaactgattctacttcatttatgaggctttgtgtaggaataatttaagtgtaatggaaaatatgacttctggatgcaaatgtttaataaacatgtgggctgtctagctagctgtgttcgttcaaagctgaagctgttttcctcagaaaatagggcaatttctgttaccaaggtatggaaatagcagtttctataactagaaatttactgcagattcacccagtatccagaacacatgcatgagcaactataaaatcctaagtcaattatttgtctaattgtactttgttacttcttgtgacactgctgaatgccacaaacaacaacaaccaagcagatgggcaaaaacgcttcaaaaggattttagattattttttattgatgtccacacacagacacagctaatactcttccttggtcctctgattcctaaatataggttttgagcaaaagatacgctggttaagaaagactgaagataggtagctggcattccagtggccatttcagttagatcaaatgctaaccaaagttttcaaaaagtgtggcggaaagttttgtgagctattgtttgcatgctccaaccacacttggaaggtttatagattttttgctcttcgtgaaactgactttggaaatctgtctatgctatattttccttaaacctcttttatcctattattttatgattctttctgacattagtaaaaacatctaagcagttaatacaataggataaatttgaggatgttctttgtacatttttgtgtataggaagaagtggccaagatgctttcctcttctggcagatggagagaaggtgctgtctttagtgactgagtgcgagtggggaacctttgattttgtaaaaggctcatacaagttcagatgaaaaagaaatcaatcagggcaatgtataagaagaaaaaacaacctggagactatatttatttttaaataacaattgagttttaaaaatgtcattgatttctgtattttggccagtcacagggaatagagggggaagtgcagggataacactgaaagtaaaaggagagagaggagatgatttattctgagaaagaagcagaggaagtagaagaatgccatcaagaaagacaatgagattaaagaaaaatcactgggtgaatggcaagggctaacatcttacctcctcaaaatagagctctctataacttaataggaccagctctctacatccaatcctcaaaccggtttcaagtggcctctacctgccttatctttagtttcctagggatagttttttcaccatgattttcaaatgatcatagtgattctctaacgattttccctttattcttatgttatcattacctctttgtgttggttttagactcatctctaccagatgttcctcctataagaaacttgggccttgtcttatagttatgctagtccttttcctaatacctgatttttaaaattaccagcataccatatgataaatatctttagctttctaaaatttctttttaaacataccctagtcttctagcagattatttaatataactttcaattctataatttaaaaagtataaaattcagtttatactttttataggaggtgacctcaagtctttgttcagccacaagataaagctggactaaggtccagctttaacaaagatgctaccctgagcgtccacaccaaatccaaggctgtcctcttggtagtctgcctgatgacagaggaaattcagagtcaggcagtgggacttttttggaagacagctgggtctaggggaatttttgtaagcaatgaaccattctttaattgtgaaaccactggatgtggttagtagtttattttaaaaataccatatgttagttcattcctatatactgtgacaatcatagtttaatcaaaagttgcttgtgacatttctgttagtgttcataaaagagtggcttgcttccttgaaatcctgaactctgtgccaaatgccagcacattgacaattacagtttggcttttaggcaattgtgcagctttttgagtatgtggtaagtttttatttatttttgtcactttcactaatttgtcatcttcttaaatggaaaaatattttctcagcactttgtttggtaagtagggacttttactcttttctccatggttccccgagaggaaataagctaatgtaactgcttttcgactcttttttttctggccagaaagccaaatgaatgcatgatctcattgagatacgatctatttgtatgaactgtaagcttgtaagcttgtcatcatccttcatggtcctggggcaggcgcctggctagccactgtaacaggatgaggaaagagatacagcaagatccctgagacttcaattcagtgcagtgcaagtcaattcatttcaattcagctcactttaatccaatctaagaaatatttatggagtactttttaggcatagtcctgggcactggggctatagaaatgaaaatttcatgaaaactgacattttggtgggggaaataacacaaatcagataaatttaagagaatgtggtaattactaactacatcagtatcagtatcaggaaggatgagatgcctcattcatccatccatttcttcatcaaaaatatttattgaaggtctacaccatgtaccaagtactgtgctagatgttggggtgatgatagtgaacaaaattaaagactttctacccttggggagcttgtagtcagtttggagagacactaactaatcaaatacccatacaaaaaaatgttaagttctacctttggtatgtactgttggagtgtggcccatggtgctgtgagatttgataaaaggtaggttctgatcaaggtagggaggttaggaaaggcttctctgagaaagttatgcttgagttgagatctgaaggatgagaaaaaaaaattttggtgaaggctgtaagtgaaaaaaatactgcaggtcacaagaagagcacaaaacaaggctctgggccaggagaaagcatgatgagtacaagagtggttatctaaggcaggccatcaacactgaccaagtatgtgaggcctcattgaggagagttccatctaaaaaataatttcattatctttgactaatatttgaggaaatggccaaggtgggtggatcacccgaggtcaaagtttgagaccagcctggccaacttggtgaaaccccatctctactaaaaatatgaaaattagctgggtgtggcagtgtgtgcctgtagtcctagctactcaggaggctgaggtacgagaattgtttgaacctgtgaggcagaggttgcagtgagccgagatcatggcactgcactccagcctggatgacagagtgagagtctgccaaaaaaaaaaaaaaaaaaaaaaaaaaagaaaacgaaacgtaccaatttcagatgaataattatgtgtattaaatgccatgataaaagcacatctatatataaggcatacagtaagttgaagtactgatttttaacctgagtttaaatggagctttatggttatgattctgtgttttttctcaacattgtttatctgcagaaccactcccaacttctgcttacatcttataaccttttctgcaaatatttattcctatgatatcagtgtgccaaataaagtagtgttttttttttttttttttttttgccactagtgaatctcagcaaaagcttttggcattgacacgtgaggtgcattcttatcttctcaagtggctctatgattttgtctattttcatgtactactccactggcagccaagataatcccttaaggataccaattctacaattttagaagtatagaaggttggaggggcaattcattctgggtgaatatttcagtaacattggctgtaaatcatacccaggccttttctttctgtgactcacgtgatgtaaggaagagatcagatgacgaggtcaagaggacacaaaacctcagccctgcttctgctccctcaatgtcgtccatccaaaatgactttacatatgtcaccagagcatggaagtgtttatggcgatttatactttggttttggtttgttagcttattttgtcatagttaggacaagaggagacatttctgatgcaaagggagattttctttagccagaggaattttgaaacctttattactaagtacaacagagtatttttgttcattgtacttttgaagtctgtgatcaggaaatgtattttctttaaaaataaatcagaaaaggtctcaggagggcctcaatgactgtaataaaatgtttctcagagcactttttatgttttcacactttgcttttttctcctttgctgcaagttgcagttttccatcaaagttattttggatggtgttgaaagttttctctgggtctttgtgcatagttcagagggcattcagggaactgactaagccgcgttaactatatgttgcaaaatgttttatttttgtgtagtgctgtataacatatagaagctttcatacacagaaccctaactgttccatagcccttgatgcaatcagaacaaacattattcctgttttagaaatgcaaatcagaggttcccacaggctaaacaatttgcctggggtcacacatgctgtgttgggagtcagaattagaacaaggtctttggacttctggtctgaccctctatactaactatatggtgaagctgacatagtggagttgttgggctaaaaatgaggagcctttgatagggtgcagtcaaatcttggaggattccattattcatttctccaaagctgggtatattcaaaattagaaaattacagctatgaatagttgttttccacttgattggtctaaagtcaactgaattctagagaaaactcctttgaaagtgtgttgccttggaaatggatgatcgtagcagtataatagcttttaccgtatttgaaattccagcagtttaggtgacagttgtgtctttctgaagggtgtgggcagattctgaacgggcttttcccgttgctcatcagcttggccatggctgctcttattacagcagtcactcattttcacagatgtctttaaaaatttttttttgtttttcttttctgagttcagaacatgtagaagtaacttctttttggcatattgcattgcgtgtctttgcctagcaagtagttggtgttaggaaatgtgcatggacttaagtgggaacacataacatttgtcatgtactatagacttaataaaggctgtcatgtccatgattatgtttaatcctcgtaagaaccttgtgagaaatataatgccagtgttatttttcccatattttacaaatgaagaaagcaaaatttgttaaaaaactattatacagtggttaagaccataggtttggaatcgtagtttgtgtttagatcccagtatactttacttacgagctttttgatggtgggcaagtaatttgactgctctaagtctccattctcgtgatctgtgaggtaagatgataaagaaatatacctcaccaggtggctgtgaaggttacctgagtataaagctttcaaagggcactggcaaataatacagcttagtgtatattagttattatcattaagtaacttaatcacattcacacattagcaaggagaagagctgggacttgaacctatgacctttggttgtttttgagatgaagtctcgctcttgtcccccaggcaagagtgcaatggcgcaatctcggctcactgcaacctctgcctcctgggttcaagcgattctcttgcctcagcctcccgagtaactgggattacaggcacctgccaccatgcctggctaatttttttgtatttttagtaggggcggggtttcaccatgttggccaggctggtctcgaactcctgacctcaggtgatccgcccgcctcggcctcccaaagtgctgggattacaggcatgagccaccgtgcccggcagaacctgtgacttttaactccagcttctaccttgttatttttccaaaatactaggaatttccttctttctcttctctatggcaagtggctgctacattaagttgttagtgaaggggatgggttttggaataaaagacttggggattctgtgagaacatttgacctcctggaataaatcagcaaattacttaaaaatgtagaaacacactccttattattaagagctacttggttctaacccaaactgaacttaaaaacatcccctactctgactcacattattagtatatgaatacttttggatgtaccagttatgtgatgtatccactgtccttagtaggggattaaggatagatgttgggttcccacattataagcccccttgctcccctcaacctttccttgcatggacctggtgagagtgaggggtggagctcataggctcattggggaacaaaccatggtctcatctgcactgtcttctaagcaaatcagttagattaaaagcaaaagaacaaattagcttgagatacttactgaatttggattgccccttgaagtgtttacatttatttccatcctgcctcttctcttccagggatccctgctatagctttttggacagcctaggtaagcatggtggctgctgtgggtgcccaccactacacatctttcacgtttgcctgcaggggtcctcagtgctgcaccatagattatgtctatgtggacaccttcacttgtttaaatgttcacttctctgattataaaaataataatacctgacctttacatagtgcttgacaggttacaaagcatacttgtatacataaatgattctgagggatatttagaggttattatttctgctttacatgagaaaatatagatctgaaaggtgaaatgaattacctccagagaggggacaagtatgagaagtagttaggacttgaacattccaaatctggtgctctttttacagtacctacagtgatatcttctcccagaaatgaattaatgtgttggctagttaatagcttctcacattctacaaaagatttgaggggtcttgaaataataaaatatgggtggaaatagaaaccaaaccagggagaacacacaatatccagaaccactaggattaatattgttcctacagttgaatttaatttgtctttgagcttcctggcagccaagataaaaagaggcacaatcagttacatatttcttattagaaaaggaaaaacatgctacagagaagtggagattttactaggattgtattcaaaataattgttttgcttgaggccatagataaggagcaataagaataaatgaagataatgctctcaacaaaaatttgtagctactcaataacataaaaatgcattgcaagggggctaacatttgctgggtgcctattatgtgtctggcactctactagtgcatattttattttattctgcatattttattttatttaaccctcatgaacatttaatgatcacaactatcttttaaaggtatcattgtgaccatttaatgataaggaaactcatcctcaaataatttaaactatttcttcaaggtcacgtagctagtaaggagtaagccagcaattgagatccagaccttgtctgattctacagcctgtgtcctcaccattctattcatgctgcctataatgtgttagagacataaattaactaaatgcaagtatatataatcttctagtgtttctactttatccaaggatatgttttacaggacccagattataggttggtcttctgtaaacatcatttctctcatctaggcttcagtaggaggtgagttgtagaaaagctcatgtagtggtgctgcttgagagtgtttccccagagtgttaactgtggctatgtgttgttgttattgaatattaagcactttatacactaccttctttagtcttcccagaagcccaataaggaaggtacttatttccattttgtagataaggaaagtgaggctcatggaggttaaatgactgaaagacatacaggttctcagtggcgggattcagacacagatcttcctggctctaattagcatgtgctttaccattgtactagagggcgtcatgttaagcaagtggtaaagttgttaatctcttgaaaaaatggatctggactcttgtttggaagaaagaccatcttgcctcagcactgagatgactgcaggaggacctagagacaagtttgaattttcctaaaaaggcagttgggtcagcctcggcatgtggtcgagctttatgtgcacagttccacatcataacgcatgaaggatatgactttgacatgaaaagtgttcaaagatgctgttcctgatgatttttcacaactacaagaaaaccttaaaaatatttcagtggattttattttatggggtctctgaggaacctactaaggtgaattaagtactagatatagcaatgtcacaaattgatttgaacaaatttaattttgggaaatgcagccaaaataataattttagtttagaatggttaatttagaatggttctttttgacagtcattaaataccagaataaattatgtgaaagatgtcactccaattttgtgattgttctcataataataactgccacgtctaccatcactacaataagaataggtaatgctcactgagttttgttctgaatgcttgataagaaatagcttagttaagcctcataacaaccctatgaggtagatataattattaactccattttatagatgaaatgtagagaagtgagtaatgcacccaagggcattcagcaggtaaatggctggctcactgcactagtctgtctctacatatatagtggatcagataaagatatacatgcccctcttcttcactgtgggggagcatgaaaccagttcatatgcaagtacttttaaatcattaaaagcagaacttaaaaataattggggcaggaattcagaagaagcataatattgcttgcttagttatgaggagaccattcccgaccaccctaattcttgcagtgggagaaatgtaaaaagactggatgtctctattgagctcctgtagtttggttcatagttggtttcagtccccagggccaaaagctagttaaagtttggaaaaggtcagtctcatgacattgttcttgatacgtttcctcacaaggtaatgcatagtgtttgtattactgatagtagggtggttttgggtaaagccgacttgctccttaaactgaatattagactgaggattctagaattcttttttttttttttttacaaaacaaaaaattggcataaagttttgaaagcatagataagtagttgagaagtagctctgagaagcatatgtgtcaagcgttgcatgctggaatcagattgacctggttcagatgcatgcccttgaaccagttaactaacttctttaagtctcagtttctttatctgaaaaatggtggtaatactgtctgactcatggaactgttgtgatgattaaatgagataatcaatataaagtgcttagcctaatgactgacatataaacttaaagtaaatacagttgaaacttgaacaacatgggagttaggggcactgacctaacaccgtcaaatctgtgtgtaactgttgactcctcagaacttaactactaatagcctactgttgaccaatagcataaacagttaatgaacacattttatatgtgtattatatactgtattcatataataaagttagagaaaataaaatgttattaaaatgtcattaagagaatcgtaatgaagaaagaatatatttactactgattaagtggaagtggatcatcacaaaggttttcactgtcgtcatcttgacattgagtaggctgaggaggaggaagaagaagagcggatggtcttgctgtctcaggggtgacagaggaagaagaaaatttgcatgtaagtggacccatgcagttcaaacctgtgttgttcagtggccaactgtatgtgccatatgagatttcccattaaaaatggtataaactaggtactgagttcattcagatagaattaaacatgaagaaataaaacaaatagtttgacaagcagtgggggtcactaaacacaacattcctaagtaattcagttgtcagaagtgcagttcccaaatgcagttagtatctttagaggagttagaagttctgattatcaggctctgtagaattttttttcatcctgagagagatgagggtgatcccatgatagagcagagaaaacactcaagaggtggagttctagcctagctgtgccttttactagctctttgacttttggacacttcgtttaatgtttggggcttcaagttactgagcagtggaatgaagagtcagtgtggataatctctacatttcctaccagctctcatattcttttattctaaattagtttaggtcataaaaaactagataaattagtcagtgaaaaaagttgccagaccttctccaaatagtctcaaacaaaacagagaggaaataaatgcaaaataaaacaaaaactcaaaagtagtttgctgaagattctgtttttttttctaaaatgtccatttgaggccaaatgaccccttcttgtctttcattgattcctttggagaaatgtcctcagctcattcataggcctaggatgttttgcttccttccttgattgaaaaagtttctttaaaaaattctttcactgccacagcaggagtgaacccaaaggactcaggcacaggaaatgtctttgctttaattgttgccagtgccagtacagcccttttccaagttgccctgagctgtcagcagagtgaaactatgaatgaatcaaatgaatagggaagataagtctaaatagcagaacacatttttttttccctccaaaagaacaactttgtcttgagcaaaggatcatttaaactgaagatgcagttggcatggtgccttggaaaggcttgtcactttctttctacaatacttcctgaaaagttttcctttcatttgagacttgttcaaactggttatcataatttaccttaaaatattggtgacagggggtgatggttaaacgtaggatagattctataactggttctttgcctttcaaggtttcaaggtagtaaggttttcctcagaaaaggagctcttttttctttgatagtactttgagaatagtagtatcttttagcaggcagacacatcacaaattacctatttaaacctccacatttaacaggtgaggcaactgaggacaagtgatttggccaaggtggcacaaacagttaacttaggccttcggccctcaagcaaatgttttcagtaccacaccacatttccttcctatattgggctgcggcttcctagttcttacataataactcaaacttactgcatcagtaaccatttcccaccaacattagaactttagaagagtagaaagatttttccatctttctgaaggcatgcttctaaatgaagttgaagctggtgatttacctctgttaaatccacgagatgtggctgccaggctctcctgaaacgaatgaacatgagaataacaaagtgtaaacattcatgactgaactgcagtttccaagacaattagcaagccagatccaagtgcagattgaggacccaaagaaggggagacagtatggcagtcattctggagtaatcctgcagcactacaaactggcataatacagcctttttaattttgagaaactttttattttaaaaagattatagatttgtaggaagttgtgagagatagtacagaaaggtctcatgtatccttcagtccatttccccaatggttatatcttatataattagagtgtaatatcaaaaccaggaaactgacattggtacgatgtgtgacatcgtatgatgtgtgacattggtgcgatgtagttacatataattttgtcatgtatacattcatgtaactactaccacaatcaagacacagaagagctccatcactacagagatcttcgttgggctatctctttatagttacaccccctcctttcacaccatccctatccctggcaactaccaatctgttttccatctttgtaattttgtcatttcatgaatgctatataaatgaaatcatatggtatgtgaatctgctttttttttttttagatcttcttctttttttttcccactagcatagtgcccttagttccatctaagttgttgcaaatcgttcattatttttgttgctgagcagtattctgtggtatggatgcaccacagtttgtttaaccgtttacatattaagaggcatcttggttgtttctggttccaggcttttgaaataaagctgctggccaggtgtggtggctcacgcttgtagtcccagcactttgagaggtggaggtaggtggatcccttgagcccaggagttcgagaccagcctgggcaatatggcaaaaccttgtctctacaaaaaagacaagaataagccaggtgtggtggtgcacacctgtggtcccagctacttgggaggctgaggtgggacacttgagcccaggaggtcgagtctgtagtgagccaagattgtgccactgcactccagcctgggtaacagaatgagaccctgtctcaaacaaaaaacaaaaaacaaaacaaaacaaccccaaaacaaataaagctgctatgaacaattgtgcacacgcttttgaatggacattagttttcatttctctgggataagtgcccagtagtacaattgcttggtcgtgtggtgaatgggtgttttatttttaaagaaactaccaaactgtttttcagagtgcttgtatcattttgctttctactgacagtgtatgagtgatctgatttctctctactctcaccagcatttagaattatcattatttttttattttagctgttctgatagttgtatagtgataatcttgtagtcctaacttgcatctatttccctaatggctagtggtgttgagtatcttttttgccatctgtgtatcctctttggtgaaatgtctctttatatcttgtgcccatttcctactggcttggcttcccttcccttcccttccttttccttcccttttccttccttccttccttctctttttctttctttctctttctctttttctttccttccttccttccttccttctttctttctctctctctccttccttccttccttccttcctctctctctcattcacttctctctccttctttctctgtttttctttctctttttctctcgctctgtctttttctgttgagttttcagagttctgtatatattgtaaatatgaattctttgttagatatgtgatttgcaaatattttctgccagcctgtagcttgtcttttttctgcttcattgaggtatagttaacaaataaaactatataaatttaaggtgtacaatgtaatgattttatatacatatatgttgataaaggattactgcaatcaagttacttaacacagctaccacctcacctagttactgttgttttcttcagtgagaacatttaagacctacttgtagcaaatttcaagcataccgtatgatattgttaactatagtcaccatactttatgttacatcccagaatttattcatcttataactgaaagtttgtatccttggaccaacatctccccattctcccaacctcccagcccctggtaactgcccttttactctccgtttctatgggtttgactttttttttttaattacacataaaagtgagttatacagtctttgtctttctctttcttacttatttcacttagcacaacgtcctcaaagtttattcatgttgtcactagtagcaggattttcttcttttttatgtctgaataatattccattgtatatatatcacagtctatccattcatctctggatggacactttggtcatttcgtgtcttagatattgtgaataatgctgtggtgaatatgtgagtgccaatatccctttgagaaactgatttagtttcttttggatgtatcccagtagcccagaagtgggattgctggatcctatggtacttctgttttaaattctttgaggacattccatactgttttccataatggctgtaccagtttacatttctgccaccaatgtctaagggttccctttgcttcatatcaacacccacctcttgtctttttcataatagttatcctaacaggtatgatgtgacagatgtcttattgtggttttaatttgcatttccctgatgattagtgatgctgaagtcttttcttgtacctattggtcatttatttatatgtcttctttgggaaaatgtctaattaggtcctttgtccatttaaaaaatgagattgtcattattattattgttattactatttttgctgttgagttgtatgagttcctaatatgttttggacattaatcccttatcagatatatggcttgaaaatattttctcccattccataggttgcttttcatttttttccagctttattgaggtataattgacaaataaaagctgtacaaatttatggtatacagtgtgatattttgattaatgtatataccgtgaaataattaccataatcaagctaatttacatattcatcactcatgtagttatcattttttgtgtgatgagaacacttaagatctattcttttaggaattttcaagtatacaataaattattattaactatagtcaccttgctgtacgatagatctccagaacttactcatcctgtctaattgaaattttgtaccctttgagcaacacctcccattcttcccacccatcccaccagcccttggcagctgccattctgctctctgcctctgttgagtatgacatttttttttctttaagattccacatataagtgagatcaaggaatatttgtctttgtgcctggcttattccactaaacataatatcctccatgttcatctgtgttgtcgcaaatgacaggatttcctgtttttcaaaggctgaataatattccattggatattatatatctatgtatgtatatatacatatatccgtatatgtatgtattatatattttatccatttatacttgtgttgattccatatgttggctattggtgaataatgttgcattgaatatgtgagtgcagatattaatatttccttaagatagtaattttgtttcctttggatgtatacccagaaatgggatttcttgatcacatggtagttctacagctgattttttgaggaacttccattctgtgttctataatggctgtctaatttatattcctattaacagtgtatgaggattctcttttctccacatccttgccagtgcttgttatttttttttatttatttatttttttgagatggaatcttgctctgttgcccaggctggagcgcagtggcatgatcttggctcactgcaacctctgcttcccgggttcaagagattctcctgcctcagcctccccagtagctgggattacaggcacctgccatcatgcccggctaatttttgtatttttgtagggatgggatttcaccatgttgggcaggctgtcttgaacccctcacctcaggtgatctgcccaccttggcctcccaaagtgctgggatcacaggtgtgagccaccctgcccggccaatcttttgtcttttggtaataaccattctaacaggtgtgaggtaatgtcttatattgcatttccctgatgtttagtgatgttgaacattttcagatatctgttggttatttgtatgtcttcttttgagaaatatctattcaagttctttgaccattttttctttggctattgagttgcatgaattccttatatattttagttcttaaccccgtattagatatatggtttatgaatattttctttcatttcataggttgcttattttgctaattgtttcctttgctgtgcaaaaacttttcagtttgttgtagtcccatgtatttatttttgcttttgttgcttgtgcttttggtattatagccaaaaagttattgccaagattaatatcatggagtttttgttttcatctaggagttttatggtttcagggcttagatttgtctttaaactatttcaagttaatcttgtgagtggtataaaataggggtccaatttcattctttttcccagcctgtagcttatctgtacattctcttaaagtgtctttcacagagcagaagttttaagttttggtgaagtctagtttattgatttttttcttttatggatcatactttttgtgtcatgtctcaaaaccctttactaagacctagtcctgaagatttttttctctgttatcttttaaaagattttttagttttacatttaactctataatctctttcaagttaatttttgtattaggtgtgaggtttaggtcaaggtttatttttaacatttatttttcacctaaatatgaaaatatctatatgaaagtgcacaagtaataagttctcataaagttattatgttgcccacttttttttagataatgtctgctacaggaagtggtcactgcaaagaaataaaaaggagagaattaatatatatttgatactttttttgagcagctgaatctttacataagtgagagttaggagatttcaggcagagcaggtatccaagaggtagctctctcaccccaaattttgtttcctgacttgcgtttgcatgctgtgtacttaactttgagttagacaatggatgctcatcacaaagcagatgctagacgttgtgtttagcactgaatatcctgcagtgggcctggagtcacattcaacgctctgcttaagggctgcaaattggggtctgagtccaactttgtatttaatacaatgctgaacaatgattaggcaacaagagtacgtttggttttgacggaaagcataataatataaaagaacactaggatatatgtcaggaggcctgggatctaatgccacatgtgcattaagtgagtttatgtctttctgcaacttgggaaactagtatgagccccggttttctcctgtgtaaaaacaaggggccttgaccctaggcagtctctgaaatctcttctaggtttaaattacatggttctaagaaatttttaaaataaaatggactctggtttgatcttcattttctcttgctaattagaatataaaaccttgatatgagaagtgataattgaagtttaatattgcatttaagtgtaacgtgttagggaaattctccctttggaatacataacacaacatgtattatattaagtgtttaaatatttctaatgctacagtgggttattggcagattcttcctccttcaaaataatttgagagattataatgccacactaaatatagtgatacgttagtattgccaatgaaatgtgaactgtggatttgtcttgaacaatacgtagcactggtgactgaggcaagggtcatttgatctcttttttctctttcttttttttttttttggtttccctttaattttctgaatgagatgactatatgatacaagttatttctttcttacatttatttgggtgacctcagtttttgttcatgcatacaagttctgaaaaagaacatttacttctttttagtgaaccctgttaaaaaaaaccttgagaagtttggcttgagatttgagcagaaaataaattaaaaaatgatctgagttcttaggaaagaaaaagtagccatggctttggtaaaattaaaagtaggccctgtgaaaagccagaaaataattcatttggccattgcagtatagtttatggcaagtggacaggcaactaactgagttaggaaaaagggcatccctaaagatgattttttttttttttgagatggagttttgctcttgttgcccaggctggagtgcaatctcagctcactgcaacctctgcctcctgggttcaagtgatacttctgcttcagcctcctgagtagctgggattacaggcatgctccaccatgcccggctaattttgtatttttagtagagatggggtttctccgtgttggtcaggctggtcacgaacacctgatatcaggtgatccgcccacctcggcctcccaaagtgctgggattacaggcatgagccacggcacccagctgatttttttttttttaaagacaaggtctcactctattgtctaggctggagtacagtggcatgatcagggctcactgtagcttcaacctcctgtgctgaagagatccttccatctcagcctcctgagtagctgggaccacaggtgtgtgccaccacatctggctgatttttttttttgagacagtgtctcactatgttgcccaggctggtctcaaacttctgggctcaagcgatcctcctacccgggcctcccaaagtgctgagattacaggaataaactcccatgcttgctcagattttttaattagaccaaaaaccctgggaatctgtactaatgagtgggacatctgtgactggtgactggatttttccgcaacgataaagggactattacattgagagctgaggtctgaaaatgctgaatagacttggttagtaaatttgatgagtgaaattttattatgaaaatacctgccaagtgttctgtcatgcatttccaaaaaggtatgctactcttcatcttttatgatcacccaaaactgtgatcagtgtagcaacaatgaccagaattctgctgatttgttttatattttggaacatcattgaaaccttcattccgctatctccctcctcccatgatcctcatttctctttcattgccttttgaagcatttgaatgaaaagctgaattccatctttgtgtgctctttcatggcaatgtttttaggagtaggaggagaatctaggtacagagtgtctgcaatagctgagatgtgggcattcctgacatttgacccacggggagcttctctttcttgttgtcagagtcacacagggttgcactaggtttgcctcagttgctttgaatatcttgatttttgtgggtgggaagccaacagaatcttggcaggatagggtgtgaaggccactcttctctaatatgtgccaggtccatagcctcgttaccccagtttccagagaagaaaatgttaggctgtcaggggagtggtttttgagtcaacattatttctatatctccactttctttccttaagagtaattgcactagatcatcagattgtatccattaagcatgtattgctatttacagaaatgggagaccaaatcagattgtgtatgaaactttgattacttttcctctacaacatttccgctggttttgcatgtgttccagagcctagggaacttccctgcagagttcaatgtaagctgatcccaggctggtccatggtgtcatcctttcagacccaagtgcttgatgagctttttatagtcctcctgctgcagatgcctcctccttttgcttccttatgctaaatgaggagagtgaacaatcatcttacaattttctcagcagtcagctttcaggaataaagtcatttttccccctttgtcttgacttctaaagtctaaacttctatgggaaacaacccacggtgataagggtagtaagagtaatgctaggagtagtatgatgtcataggtaaaaattagcctctatcagttatatttcccagaatggaaataaatggcttctacttgtaatttagactgggatcattttagattttatactctttgccagattcattactactcctttaatggtagaaagacttggtttctacttaaaatgtttttcattgaatttgagtataaaaggagtttaaagtccagctaatctctctgtcaccaaaacagaatccttgctgtgatttttctgactgatcataattcacactcccagggccagagagccagttgctttgcatggtggtccgttccatgtgtggatggttttatttgctaaaatgcctttcattacattgactcagagttagccttcctgagattttgaccctttggtcttagttttgctcttcataatgcagttaatccttcttccacataacatcccttgaaaattagaataaattgtaacatctcttagctttgggtgatgtgatgtttttataagctatattctatttatttatcttccttcaagtcattgctaataatgttagataaaacagtatattacttcttcaaggtgatcttggcttaccagtcaactctgtttttacatctttttggctgtttgcatttaaacaaggatgatgaactcacctgtgcaccttggtcttgtaatcattttgctccgcattcttttcttttatatatctgtattcttacattttgggttctgctgattattttgagctttatgttgtcccctggttacctctggtttcctgatgttccctgacttagacactttgggtaactacgtgcccacctacttctctaacagactggtgccctcaatggggaatctgattaggccgttatttagtcatggagtaatattccttagagtgagctttccaactggtgtcctgtagcagtagattacagatgtgctgagaaattgatctctgcagctcttgaagagctgggcagagtctcagtagtctcaggtgtcaggtgcctcagtgtgacattcagatgccattatgtgctccatggtgaccaaagccttaagcactgcatcaaggaatcaacatagagcactggtaagttagtagggcatagggttagatatttgcttaactcaagataaatgatgccgtcatttagtcaaaaaaggaaataaggctttcttggcataacaagttctttgtgaacctatcctgactctcggtaacctcttaggttgaaagaggtgatggtgtgagtgagatgggtgctgtcagtggtgctctgtgtggcgattacccccactggctcacctggggagactgagggcaaattgcctgtattgatcacagtcctctcattcagtgtctgtagcctcaaaaagatgggtggtagtatttcagtcaagtttactgggggctggggcttgatgaagcatcagaacctggaagtatgctgatgtttaacccctgcttatcttgcaggcacaggcaagtgggcaagtgttaggaaaagtgaagtcaacatctggagcactgagaaacctgactgtacaataataaccagctataaaacaattctcagaaaacaattctcatattactctatgagatgtcattgaaaagatgcatttaaaggagaaattaaatattttttttgaactttggctactctatttcaaagtttgtatttagattaaaatgtcatctaatctgtttggtactcttttgttttctagtgaacaatttttgtgtagtgacaagtgttagctatgtttattatgacttttcataacaaaactttgaagcaggaattctcaaatttaaatgagcattggaatcactaggaggtcttgttaaaagttcagatttctggccaggcgcagtggttcacacctgtaatcccagcactttgggaggccgaggtgggtggatcacgaggtcagaagatcgagaccgttctggctaacacagtgaaaccccgtctctactaaaaaaatacaaaaaattagacaggcatggtggcgggcgcctatagtcccagctaccagggaggctgaggcaggagaacggcgtgaacctgggaggtggagctttcagtgagctgagatcgcgccactgcactccatcctgggtgacagagcgagactccatctcaaaaaaaaagttcagatttctgggcttcactctcaaagattttgcataagtaaattggggtggagcctggaagtgttttctaaaagcactccatgtggattcagttggaagtcaacagaagaccaaacgcttaaaagcactggatgtaaaggaccatatgcttttgtactgatcagctggtggatacttagttttgtattgtcaaagggccatttgctttggagacttaggattcttccctagcatgtgtctcttcttgggctgtgttgaaatacagaaacaaccaaccaaatggaattatcacaagcagttttctataactttgtgcaaagttaggccaaacattacatgttgttatggattatgaaattcagaaaacactgcctcctatttgtgtatagctataccattaaacagtattttcacttagtttgtctctgttgatctttataacaatcttgtgtggttagtatttttatttccagtttatgaatgagaaactttaaggttacaagtaaatggtagaagtgttactctaacctttattgttactacttcgaaattaggcaggttttattatgtgccaggcactatgttgtacattctgaaattcattctctctctgaatctttataaaacactgtgaggtaaatgttattattatttttagaattattatgagttttttttttttaacttggctcttgatgaggctaagtaacagtaacttcttgaggtcatgcctttagtcaatggcagagccaagactttagccaggtttgtctgacactggagttcatgctttcactctgggtattgttaaggcagattgcctggcctgattatagtcttctaattagatgtctgtgtcctaagaaggatgagtggtagtgtttctaggcaagttaccagtacacattatacattatagcaggctgccagtatacattatataaagccatgctatacaactcattctagaaagaacagaaagcaacagggagatctaataggaaggaaagcagacattcaaagtataaaaattaaaatgaaatgaaatacaattgtgcatttttagaaaacttgataaaaataggatttcacacgcttcagaagtacaaagagtgggaaaggcataagttgtgatctgcatacattctgataatgttagccattcttcttgaagaagcagtaggattggcctgtgttttataggcttttgagtgttgtttggtgtttcgtttatgggcttatttttccattactaataccagctggcatttgacctttcatgctcatgcctttggcagtatagtctttctaacttcaatgtacagtatggcctttgtgttttaaatcagaaatttattttaatcaaatacatcttgtagtgttgtgctagtgcttttccctcattgacagtaaagtctcattgatgctgtatttactctggatttctttatgcaatttcaaaatgaaaaattttgattctggtggttctggttgtagtccagtgattagtctcaacacaaaagaaataacaaaatgttaattcattttcccctgaagctgactctggactagaagtcaaaacaaaatattttctattaactaatttcatgagaattcaatatgaataaatgacttggcagtatctttttttttaatcccaagttaagcttttctcatgactttatatcatctactactgatggtgatgaaaattcccaggagttaatatgttaccttatcctgatatctttcaattgacatcttgaatgatcagaatgatctttcaatcatttttaaatctctatccactgagatgcatttatcagctgtccatattcatttagcttctaatacttaccaattgcattttaatatcacttgtttctggtagtctaggggaggctgtgtcagaaaggggtagcatgcagaatggcctttcacctaaatggattctatcttgcatggtgacttacttgaaagccatgagtgacggatctgggatatataagtttaggcctatattttgtaagtgattttctttcagagagattccctgaaaatgtcagagcacctgctttttgatagagacagtctatgcagcacttgatggtctagcctgaaatcaaggagtcagagaacaaatatagggtaggggattttttttttttacagagtttcacactgccgcccagcctggagtgcagtggcgtgatctcggctcactgcaacctccacctcctgggttcaaacgattctcctgcctcagcctccctagtagctgggattacaggtgtgtgccaccatgcctgcctaatttttgtgtttttagtagagacgaggtttcaccatgttggccaggctggtcttgtactcctgacctcaggtgatccaccccccttggcctcccatagtgctgagattacaggcatgaaccactgtgcctggcctagggtagggtctttagaagggctttgaagggtgttgtgagccatcaggccagtatcctcatttgagacattttgtgtagttcagctatttattcagttaaaaaaatctccatggaaatgatatgtagaagtctgtggtatttctctcattccatcttatgagttaaaaaaatcaatcctaattctaattttttcttttttttgtatgattggaatcaaaatatgcataacctttgtatctttcagcagaatacaggctggttcttgactttttggtgggctgctggaattacattctaggttctcagactttagggacttaagctgaggcctgggctgaccttgggaatgtgctttgttatacctctgggagtagcactgagcaaagcaggttgggagccaggattccagtacaggcaggaaggagtaaataattaggttagataagaaattatttgccttcctttcagcaggtggacaagctaacaaggaaaacataataaaggaaataaagctcacttaaagagggaaaaggccaataatggaatcacttaaaactttttattgaagaaaatgggattcccttgcactcttgtttgaaatgtgttttggatatgcattgttttatatcagatttggatatagaattatgacattgtccagccataacaactactttgttaattacaactagttagtggatacctgctggtactgcactgtaagtagtaccaacatattctaaatgttcttatataagaactaaaatgttattatgcaagagaaattccctgcttccaaggagttttataatctagcagagagagaacgtgtacatccaacacaagttgagaacacttgcaaagtaacatatcaataagtggaaaaaaaacagtgcaaatggaagtattgagtgattaagagagtgatgccaaagatatggggctggctgaggaaggatctgaattttgaattgggtaacgaaggaggagagaaacaaattggcagacagagatgaggaagaaagatatatgtgaggccataggtttggaagtgaagcaagtcacatttgacatgttagtgacaataagcaagacaacaagcacacaggctaggacaaggcggaacttccatggccgtggataatttgggatgaatttgattattgatttgattcaagggaacagtaggaaaatgccatcgattcttgagtatatgcaatgtgctgaaaatgacagatactggtaattatttaggcagcaacatctatgataggttggagtagtggagctaagggtggagaaagtattagggagctgttttgtaacctagatttaaagtaacgaaggtttagaggagggctttgggaaagtctgctgggttaggaaaaaaaatgagctcagtttttgagatactacttttcagatgtagcaatcatatcctgagatgaccggtcagttactagacaggattacagtttgagagctcaagtcttggccatcgactttggaggcatttgtgcaaggtgatagttcagtaatgcatgtggagtatgtatcatggtggtgactattgagggagaaatgcagaaagctgagtttggaaccttagaagcagctgccagccaagggggtggaggcaggcaaaaagtatagtcagcaaatgagacaaagaggtagtagaagaacacagagaacacccagggaaaccatgcgaggagagaatttcaacagtgctaactgaagcatagaggtcaaggggattgaagacttgagaaagacctattcgacttctcaagggaaaggtctttggagacttagaaaaatttgtttccagtgaagtttcagtgcaaaagtgcatcagggattttctagatactctgcatgacaaggggattaatgtttaataaataaatcccttctgtaattgctttagcacatatgactgggtatctgggttttcaatatttcaagggaaatggtgaggtcactgcagaaaggaattgaggttagatttctcatattatacaaacccatcaggtgatttttatattatgtgggagagaaactctcagagctaaactattgggcctatttagattcacaagatcctagtggctctgggaaaaatctttgggaaaatgtaaaacctgagcagtgttagaaagcctcttctttggtcctgttatttggtttatgttaatgaattagcttggagtatttgtcagagatgttgagttgtggaaaataataaaaatcagattcaaatttaccaaaataattaatatcaatttacatggaagtggaggcaccaaagaattttggtcaagacagaatcaaagctccaaatttaatgacctacagttaacatcatgccaaaagaacagagccattttgtaagaaacaacagtctagttgaataaatggaggtgataagttagatatggtgaagaactcaaattttaaaaggcaagagacactttctcatgactgaagaagagaaatttgtattaggagatatacctaatgctaaatgatgagttaatgggtgcagcacaccagcatggcacatgtatacatatgtaacaaacctgcacgttgtgcacatgtaccctaaaacttaaagtataataataataaaatttaaaaaaagttagttataatgtgggatctgaaataatagtgataagatattcataactgtggccattaaaatccattgacctatagtttttttgttcatgcatgatttttttttttgagacagggtctcactctgccacccaggctggagtgcagtggcaaaatcatagctcactgtagcctggaactcctgggctccagcaatcctctcgtctcagcctcccgattagcaaggactacaggcatacaccaccacagctggctaaatttttgtctgtagtgaaaagggaaaataatgtcttagttttactgtaaaatagtattgccctcataggcaccccaaaagggtcctcagcccacactcctagaattgatgccttaatactatgcaattctcaagttgttattactaataaattaaaaaattaaaattctctttgctgtattttttaaaagagtgaaaatgtactttacaattctatattactttattatcaaattgtgaatgagttattaccaatgttgtagttagaatttcttttcctctcctagtttttatttctgtgggtatagtcggtgtatctatttatggattatgtgagatattttgatacaggcatacaatgcataataatcacatcagcatttatcctttctttgtgttacaaacaatccagtcatactcttttagttattttaaaatgtccaataaattattgttgactataaaaaaaaagaagagaaatttgtagaaagaaaccaaacttctaaatttatcttcgattcaactaattagcagtagtctcaattataaaacctgaatctataatacggtctaacttaggtgtaattagatgaaaatgtagtacttttctggtgagttaaatatgtgatttttgatttataatcacatcacaacaaattggttgagaaagaatgaaggtaaagaaaagattaaattttattttggcctttagctcagttttatgttcagatggtagtttcccagttatagcaaaactgtacttagcccctccttagttctaggaactaagttctaggaagtaaggagggactaagtacagctttggcataattgagggtgtgactttgatgtttctatagattttcatatctctgcaataaaacttaaattgcttatgctgtttctctgatataaaatacagagttttccaatgctctataaaatgtaatttagacagacgaacatgaaactgttcttaaacttggattgcctgggattctgaaatttttctggttatttgttcaaattgatacctgactatgatattcacaacatttcttgattttcccaacagctgctatacaatataggatgtatattgaattgaaataataaataggcgggaaaaaatgagaggaaaaaagataggtacaaacgaaagaggaaagaacaaatgtaaatcatcgaatagttatgatcacatagtgtgagtatgtcttacttttggttttttttgtttttttttttttttttttgagacagtctcactctgtcacccaggctggagtgcagtggtgcgatttcggctcactgcaacctctgccctctgagttcaagtgattctcctgcctcagcctcccaagtagctgggattacaggcacctgccactgcgcccggctaattttttgtatttttagtagagatggggtttcaccatcttggccaggctggtcttgaactcctgaccttgtgatccacccgcttcggcctcccaaagtgctgggattacaggcgtgagccaccgcacccggcctcaattttgtttttaagatttctacctgccaaggcaaaatatgaaacttgactacttacttgattaatacagaccacaacttaaaaacaaatcacttgcttaggagaaacacaagtattatcaacataaaatccagaaggaggctgggtgcggtggctcacgcctgtaatcccagcactttgggaagccgagccaggtggatcacctgaggtcaggagttcgagaccagcctgggcaacatgtgaaacccagtctctactaaaaataccaaaattagctgggtgtggtgatgcacacctgtagtcctagctacttgggaggctgaggcacaagaattgcttaaacccgggaggcggaggttgcaatgagccaagatcacaccactgcactccagcctgggcgactccgtctaaaaaaaaaaaaaaatccagaaagaaataaagaagactttgtataatgcaattaatgacaccttaacaacatcttgattagagaatagtcaagtttcccaaattccactgagctggtttcatgagttggtagactgatggtatcacataaaaagtcctgcaaggtcaattcagtagtggggcttcaggtccagttagataattcttttagaacttaagtttgggataactatttttctttccacctcatgtgttttgaactttcagggcatatattacaacttataacgtatcgctgtcactcttagtctgagcgctcatgttgaaagcacgcactgtgtgagctgtcatctcactgtgaatcagcaggaagggtgagttttcataacatcagtgaaggatgaggtaattattacagaattggtttttggaatacatgataaagaaattctgagaaaaaagtgaaggtcttcagttccctaatggataacaaaggagaacttaacctgacaaaaacgtccaggaagagtttgtatgttcccctaaaaatggaagcatgttagtaacgaccttcaattctttctggaatgagggggaaattccaaaaataaactaaataaaataagcagtaagatttctttgaatttaagggagaagcacattctcccagttaagaaaggtgtcttctgtgaagctgcctagggctacagtcaaacagattccccctgacaggtgtggaacttgtcttcactctgcagaatggcctgttcattgtatttcccttggcatgtgattcaggttgttggagaccttggtaaactcatcatattagatcatgggttgatgtaagttcatgtttggatgttttaaaattggttggaacctggctaggggaagaacgtatgtctacaactggccctgaaagagattaaacatgtttgaaatgttttcttaatggcagtggagtgggtagtaatgtttcttttgctgtgagccagcaagtgtgcctgttaggagagcattcccgaactcatgatgaatcaaagactgattaactgtactttaagtacggcatctggaaattgcttgtgagagagattttgccatcaattacagaagacacatatgtcactggatttaggaccaaagacagggacaaccctttatcaaactgatttctactttactgtgggtcctcttttaatgtaaactttcggacttgctgcttcaaaagtagttggctttcttctgctagtgatatgtaaagaatgaatggtgcccataattgttataaatataatatgcagagttatatttaatttataacataagtcaccagtcaaaaagacagtttagttttttcctatgacaaaaatccaatcttactcagtaaaacaaatgatttacaactcattgcttttctgagactagtatttactgtgctataatttcaggcatttaggtttactgaaggcataaggtatacttttttagatgttaaatttttagatatggttgattgggggaaattaacaatttcaatgtttgaagtggtaaacagctcatttctgcagggagtgataattgggaatgtagatcattggagatggactgaatttaggaacatcatggttgtagatgtggatttaggagctatctgcttagattttgagtcttttcccatgatactctaactcacaggaacggaactgttgctgtatctctctatacttacaaatggtgagggattatctcttgagctgaggggacagattagaccctggagctgcaaaccctaggtgtatatccagcaacccctggactggtactttcattgtgggatgtatacatccttttaaatatcaacagaagaaattttcagaggttttaccttgattttcctaaaagaggaagcaatcatagaactgaattccttttcataattcttcaaaattgattggagaagaaaattgccttttctctcctgccttttcattttgaggaacccttaatgatgtcacttattttaaatcaaagatgcttatttattgcagcatctgctcagtcctccatttcttcctttcctctcctctcctctcctcttcttttctttctttctttttttttacatggagtctcgctctgtcacccaggctggagtgcaatggtgtgatctcggttcactgtaacctctgccttctgggctcaagtgattctcctgcctcagcctccagagtagctgggattatagacgcacaccaccatgcctggctaatttttgtgtttttagtagagacaggggtttcaccatgttggccaggctggtctcgaactcatgtccttacgtgatccaccagccttggcctcccaaagtgctgggattacagtcatgaaccaccgtgcctggcctcagtcctccatttctaaggcattgtatcattcagtggttgtttaataaccttagacaaaatctaaggtttaacaaccactgaatgttacagtggttcaagaatacagtgatacaatggtccaagaattgaaccaactctttttaacctgttttttttttcattttctttctttttataccttatacaaataaaatatgactgtgtttttattttcatagtataaacaatatggaaaataaaaagctatatgatacagagcataaataatggagcagaaagtgaaagtctctcttcaaacatttgccctgagcctactgaagagttattcatctactctcttctctttggatttacacgcatttaaatgtacatgtagaaagatactaacttgtgttttgcaatagataaattgacttgtctcatgtataatgatcaataaactgttaacctgaaaattcactttgtacctcttaatggctggcagcatttctatattaaaagaaacgtggaaaaatagcaaaactctacattcctgaagtttatttttattcagagttgggtgtatttttttgggggggaaccattggtactttttttatacatggtagactaaattataatgttttaaaaatcaaaaggtatttggagagatggaaatatgatttgatgatttctactaactatatgtattgtctccataatattttcttaatttaaaaaagtggttaacttatgtgtgtttggcatatttttgagttgataatctcaaataattcttcacttattacacatacttgaaaatctgctctctcagtttttcaagttaaaagtattctgtccttgtggatctgtcatttcacagacatacctgtttgctttgttggctaggtgatagaaaataaagggcagaacataagaaattatccttcattggatattagttcgttctctcatctggattttaaagtattactggaaaaaaatcctctaatcttctattaaagataagataagttcttacaatgtataggttgtttgtaggactgagaagtattggaaatatgtcttggctcaactagttggccacccttgagagccagtaataccaagtggctaagcttagttgcacccagtggcaagagacattctgaggtttcccatgtattgggaggaggcccaagacaaagaggtccttgtaaaactcagctagagacttggctgtgggacagagtcctagaagaatctacattaactgtgccctgcccagaggcatgctgctacagcctttgtgctgggaaccaccaggatcatggtatgagtttgcgtctccaggtagacactctgagcttcttttgcttactgaccctgttactacccctgagcactgcagctgccgtgtagcatcatacatcttctctgcaaagtcatattacactgagattgttagaaactgtctgtcctttgttttcatgtgtgtggttgttgctgtagaagataattacttatccttacatctagctttctggcttgatacacacacacagacaaacacacacacacacacacacacacacacacacacacacacactctttggcaaaagaaatgaatgtattggtgaatcttttttttttttttttttttgagttagaatctagctctgtcgcccaggctggagtgcagtggcgtaatataggctcattgcaacctccgcctccgaggttcaagtgattctcctgcctcggcctcctgagtagctgggaatacagggatgtgccaccacccctggctaatttttgtatttttagtagagacagggtttcaccatgttgattgggctgatctagaactcctgaccacaagtgatccgcctgcctcagcctcccaaagtgctgggattataggcttgagccaccgtgcccagccagcattggtaaatcttatgtataattttaaaattaaccaatacattcatttcctttggcaaagtataaaaagcataggatttgaatttggaagaccttggttcaagttctgcttctgccacttaatagtactgtgacctttctgaggctctgtttccattttcattccccatcttggttgaggcttgtgagcttcaaatgagataatatatttaaaagcattttgtgaaccataaactgccacacaaatgttgattattgttaatattttatatttagtcttgctggtacaataaaaagttagtaataaatgccccatgagctgtcttaattccagagaagacatatgaactaatatacccagcttgggtcatcaaaaggtatatttatataagggttactgctaagcagtgacaatcacgggtgtgctaatttcatcctgggatctgcaagcagccttaggtggagaaaagaggaggcacagaacagagataaataaaggcttagtttctacacagccttgtgaaagactgtgttttaagggttgagttcaaccattaaggttgatggtgttttatagtacttattgatgcttaaaagtaaaatttatcaatttttaaaagaatagttttatgagtcaccaaatttataaatatggtcaaatgtgtattccacacttttcagagaaattatgtagctcttctggtaacagtgagagtcctttgcttacacagtcaacaacataggaaaagagattcagttttcctatggcaagtttcacatcctggaaaatgttttatcagttggatgctggggccatctctaggttagaaagtgtcaatgggaagtagttcaggttcagatatgggtaggatctgtgcttcctagtttggagaagggtttctgatgatgagttgggatttggttttcattcttctggcctcgtagatgagtggccagtttcatttcattgattggctctatcttcagtttatgtgctcattctttccattggaaactcctttaactcttctgctgaaaatgttctctagggttcaactttagggaaatcttagcaaattttatttattactctagctattatgtttattttcataacagcttttctgaaggaggacatctaacacatctaggtgttcataatgtgagcctcatttgtattttcagagaaaagttttatcttgagtttgaatgaactgtggaattagctgagttaagagactctcatttttgctatccatgaggcagaaaagtggtgtgaaggatatatgacttcagccaattgactactgaccagtctttctattgtttaggccataggaaatagggcatttggagacaggtgctaaggaaatgagtagcacttttgtgtgtgtgtggttgtaggaaccactgtacaccctagaacactttattaagaccttactgcttatgtaattgaaaagacattgattgagctacaggtacctggtcagacattgagagacctgtacttggtctcaggatgctctgtgtagagcttccccaggctgttgggagctgggagactgcttggcctggacaggacccagaataagaagcatggtacctcctataagcctccgagtaggctgtgggcttcaagatggctctcaggatgatcagagaggtcaggagtgtaggcttaagccagggcccagggccaatattctctgagatgagtcaagccccaaccctctctggggtttccagaacaaaggcttgatttggggagccagcgttgtggagagggcagggggcatgtctctaggcattgctggaactgagggagattgtcagagtggctggggtaatgtttgtataatccgtggcagttggtccttcctgcatgagagtgggaggttgaatgtcccttatgggagagtcatacaccagggctgggctggagcagccagccagagggcgttggggcagtggctctgctggggtgaccaaagtagggaaggaaagccacttgttgcgcacaccccattttgattaactgctttcatgcaggatgaggcagggataggatcatttctcaggcccaggtattgatgttttcttaattctttagtctggaagaacttgatgagagggcaggaggatgttaagaatttccttaatcaaacccatttttcatgtctcctagggctaccccttcatctgcacatctgcagagaataacctgactcctctcacttctccagcttttctcacaaggcagttgttactggactgctgagggaagtggaagggaagcctgggagggggctctgatggtggcacccaatatacagggtctggagtcagggtgaaggaggtcagggactagcgtctgccatagcacgggcacacggccaggctaatgatgagcagcatggccaggaagaaggtggctgtgagctgcagccacagcaggactgctgagagcacggcattgaccaccagtgagcaggacacaacgaagaggcatgggatgctgctgctgtgcttcatgacagcggacatgacaggagcagtccatttagccctgcctcagcaccacaagttctgcccatgctgacaagccttccaggaggcctgggccggggccactagcggcatgcagatctagattcaggagcacaccaaaggtgtagaggaagacattctgaagtgccaggggcagctgccgtctcttcatgagcagctctgtatgcagtgacgacaggcttgagatgaggcagtccaggatgaggagcagcaggcccagcggagtgatatgtaggggcatggggctggcagcagcttctggagggggcctgggaagggtgtttcgaaggtcttacaggccatctggtggatagcagacccccgcagccatctgcagcagcagtgcaaacccctgaggtgcagagaagcagtgctggaggcagagacagtggaacagggcccgcttccaatcttgagattgctcagcacgtggtaggtgctggggtccatgtcacactgaagatagatcaccaggttgttgttagtgccatagatcagggctgatcatgtgaagggagcagcttagtgccagagtgggggccccctacagccatgcttgccagcccactagaagggagaaggtgcttaacagtagcttggtcaactcagctccacagctgaggagggctggaaggacacctggctgtccacatggcacagtgccagcatgggggatgggcaccacacgtggcagtagataggagcagcatcaaggtccattacactcatacccacaccagaccttgggtggctggtgtagttagcaaggggagtgggattgcaacatatttacgggaaatcaagttatggagccacctcccagtagggaggagccgtggaacattgccagagaggatactgaggatcagagtcatctgccaactccatagtcagggcttgaagagtaagggactggtggcccttgaagccacagtcttggggccagtctgacggagttaggagagggaagaaggaatctagggtgcaggctgacaaggtgctgtgcacactctgcaggaagggaggcaaggataaaggcggcatgaaagttggagaaaaaatggatgacagccagggaatccagatagtagtgtctctacctgcaggccccagctccttattctgcctccctcatagcatctagagctattcgggctcttgcatagtgactgcaaatagtcagtctttcaatgtcatctccatgttgggcacagcatagcctgagctgcacagattgccagcgcaggtgccccttgcaaagcccaatacagctgatgtcttcagtttggccaccacagccagccaggaatcccttgaggaatggggaggacaatagcgagccatcccagccacctctgctgttgactttgtcttccatgtgccgctgcaggcaatccagctggttctcgagaaatgccaggtccttaagcttaggcagagaatccttgtcatctgtcatcttccccaccaaacttctgaagagcactttctataagtcaaaagtaaggcagtcttagttttattctctatatttgatgtttggtgcactgcaaaagatggcatagcttagtaggatgttattttatttcagttgcaagataggaagggcattgataattgtagaaatggggaggggttacatatatgagtctgaggctgtatatttagtcttctgagctttggaaatagagatgattttttttcagtcttagcaaaggaagtattttaaaatttcagaaacaatcaggctattaataaagtatgtttaagtggtagagagagcaatgcactaagaataatgattttttaaaaatcttgattctgctagtaacttgctgagcctggacaagtcccttaatgtttctgaacctctgtcttcttacttataaaatgatatttctatataacttaaaaggtcccttccagacctaaaattctgtgactctgatttttctctatgctcataatgattctttgcttacttccacagagtatgaaggtaacaggtatcccttatcaatgaaaattacctttaaaagtataaagcagcaaactgtgttgcaaagggaaggtatggaaatgagctgtgaatcttgaacctaatggggttgcctgtagctcattctctttgatgtgcgctacctgcagtgttcactcctggtgtgctgtgattctggaagagaggcactaggtcttgaatgtgtagtttttgacagcctgtttctagatgggacacacatctagacacacatcatttcaatggtgaccttcaagggcaatgatgccccagccttcaatgtgtaactcttaggtaacactaaaattggaacttggcaatcatataggaaaagaggataatgtcatgttaggcctaaatagggtattttggggatggaaaacatcaaagtctatactctacccaagtatagattttggtaaatggattttagacagattgtttttcaagctccgttatgtctccttagactttttcactttttgtagtaatcacttttttctgatgtttacaatattctgttataaatggggcttaccatctgccattaaggaaagtataaaaatcaggctgtgccagtctttttctctccataaagtaatttccatcagacctcattttcctctgctttagtctcttctgcgaatgtggtagtgatcttaagttatatagcttgtaaggtgaggcacattacagatacaaatctgaggatttagctgggcaagggagggagagaaatggtaagaagggaggtagaggagtttattgattactcatgtaatgcttcattgtgagtaaagaaaagcagattggtcatctataataaaatgtagcccaaatggcatttgcacagttgtaaggtttatttcacagcaaatcagtatgcctattagcatttcacacatatccctgtctctctgtcaagaatgtttgcagattctttgttgttcatgcttaaaggcactttttatcttctgttgtcttgctaatggacctcctcttgaaaaacaactcttcctgtctacacagatgaatctcttcatgactactgtgtttcagtttttgattagctccttgggaatcacagtttctgttaggatgagcagaaagaataagatgggaggccgtaatttaacattgtaattcaggatcaaaatcataggcttttgtgtgactttgaagtcttcctgctccttctaaacagaattgcagctatagcatcccagctaggtgtttttcacatctctttttcttcccttcgtcttcttcttttacttccctttcttcttcccctccctcccttttttccttttttccctcccttcctccctccctccgtccttcctttcttctctgtatttaagtacttgcaataaaaacactgacacttgcctgcatcttgaaaaccccagattcagtttcatcaacatctgttgaatgcctattatattcttgattctgtcctaggcctattcctatgcattgtcttatttaatccccataacaattacttgaaaaagctatttcattcccattccatcgatgaagaaactttggcctgattcatagagctagtatgtggcagaggctgaatgtgaaattacatcttctgaattcttcctttactgggtagaaactctgtttcatatgggaagttgtattagggttctccagagaaacagaaccaagagggtatatggagatatacatgtgcgtatatatatttattataggaattggctgttgtaattatggaggctgaaaagtcccacagtctgctgtctgcaagcttgagaccagggaaagccagtggtgtaattcattctgaatccaaaagcctgagaattggggggccaatgtcctggtgtgagtctgaaagcccaagaaccaggagtgctgatgtctgagagcaggagaagatgaatgccccagcttaaacacaaaggtgaattcacctttccgccatctttttgtttgattttgtccctcaccaaattggatgatgtccaagcacattggttgggcaaccttctttactcagtctactgattcaaatgctgatctcgttcagaagaggcaaacctagaaataatgttttaccagctgtctgggcattccttagcccagtcaagttgacacataaaattaattgtcacataattgctgttataaaaggaactataccttagtgtggaagtaagccagctatgattaagtgagaacatgtgaccaaattctgggtccagattctcaatgactgattcagccttgggcaaggttttgacctttgtattttagaatctctactgattaaaaagagatagtaaaagttgtcttagaggagtcttaatctatagctgtctgtatttactgaaaaaccttacttttacaaaattttaattttgtggacaacttggaactctttagttgggaaataaattccagcatagttgttttaatagcactgcaattaatagaagttatattatctaaatcaattgttaacaaatatgctcagttactgggcagaatcttatttgatgggaatatcaatacatatttgttgaatacctactatgtgactgacaccttacattcatgagcttatttaacccttatcatttctgtgagttctcaattacttgcctcaaagaatgaggctcagaggaattaaataatttttccaaggtcacataactagtaggtggtgaagttgggatttggatctttgaatgcacaaaaatagcacaattattactagtgtgggattttcagttagatttaagttccagttctgtctcttactagcagtgtaacctttggtgattgacttaatctatctaaaccttcatttttagattgagctacttaagaggtctgttccattctaaagattcaattgcaactgtccctttagcatggcctgacacagtgagtgaggtatgcaatggcacctgtttataagggtttagcatgttaaatgaaagatgaagcataaagatgaaatgtgagcatttttttcataatgtatgctaaaatgttaaatcatgcagttttagcaaaagatactagtgtgatgcatgtgttatattagacagaactttggagtagagctgggatatgcaaaacctttccccatctttaccactagcacactgtgaatctcagagcatattatttcacttccgtgtcctctgtgtttcatctgttcatgcattcataaaacatctacagagagacagcagtgtgtccaggcacactgtacgaggaatctaggaactggaaaaggagctaacacgtggcgtctattcccgcatgggccaaggaacttatagcctaatgggaggagagacagacatatgaagattttataatgcagtgtgaaaagtggtattacagtgttcagagccaggggaggttttatggaagagctgacaattgaagaagcaatgaagatgagaaggcactctgccttatttatctttatagtaatatttcctaaagcattgagtgcagtgtccaacacatagtaggcactcagtagtgaattggatactgatttgcaagctggacttgttttcaacaaccattccttcctatgtttcttgttatagctcctctacctctttagggagctccacagggactcagttcaagtccctaattctcttagtgacagtacaccagggtggttaagagcataggttctgaagtcagacttcctggtttcagtttctgtctttgctatttgttagctgtctgaccttgagcagttagttagctttctgtgcctctgttttcttgtctataaaatgggataataggctgggcgcggtggctcacacctgtaatcccagcactttgggaggctgaggcgggtggatcatgaggtcaagagattgagaccatcctggccaacatggtgaaaccctgtctctactaaaaatacaaaaattagccagacgtggtggtgcttgcacctgtagtcccagctactcaggaggctgaggcaggataattgcttgaacccaggaggcgggggttgcagtgagctgagattgcgccactgcactccagtttggcaacagagtgagactccgtctcaaaaaaaaaaatcataataatacctagcattattaaatggaaaaaattaaatgcaaagaactttgaatttgaatggagactaagcactaaggatagtaattgcataatgaaagttagcaatttttatttttcattttgatacattttatgctgagttcatttattagagtgccacttcacaaataactcagttacctgcaaaaatagaatttttctgattgacagtgatcaaaaagaaaaggtgacttattttaggaaagatgttgctttttcttcgcctgctcttgctttaaagaatggatcataaggttctggttaatgtcataaggagctcacatgtattttgctaattataagtcatgcttctcagtgacccttttaactgttaaaatgacctccagattctgatttttcttcactctttattaatggttaacaaactgtttaatgcgcggtaggaaagccaagtaagcctgaagcatttagaaaatggcatgtgaattagttgtaaactgtttcagtaaacattaaatgggtggcaattacttaaagtgattgcctaagtttcattaaagtatttaaaagaaaaaatatgtgcttaatgctgccttaattataaggaacttactacagtagcttccatctagggtttaccaaattagcctaattcataacctcacccagggcattgtatgcacatgcattttatacacatttctgatttcccccttcaccccatgcctcactgagactcagacctggtaatctgtgtttttaattatttaaggtgaatcgctgatgagacctggttggaaaacacaggtgttgtctggttaaaagcttggttttgattttgcattcaacaattcaaaaagctcttaaagatacttcagtataactggttaccaagggttaattgtggtgaatatagaatgagagtagctgaggaaatggaagtctgtgatttttgattgccttgttaaatcgtcaacagcagcagcaccaccatcattgattgggttatggcaggaaatgctatagttagatttgctacaaattagtttagatagagagtatgggtgaaaataaggtaatcttttcagatgttgtctgataaatggaagcagtgcattcatgagcagagctgcaaaataaatgttgagtacacctttgaaacaaggttgcctaccgtgaattatagcaaacaaacggaagtattctcaaggtgtgtggaatcaataaaaaccaaagtgtcaagatgcaaagagcagtcagcttgtataggtgcccacaactactaatcataacttgataggtgtggaaagaactgctgaataccctccctcttacactgccccaactatggcactgccctagatagccttctaaaacacacacctgattctgccactccctgcttgcagccctcaatacttttctattcatatgataggataaagtctaaatgccttatcaaagtatatagggccattcaggatttatctactatatactcttatagtcttctttctcttctcttgccacattttcatgttatatgctcaagccaactgaagtctatacttgtaggcttccgaagtgctttgagaaaaaaaatcatataccacattgttctgttatagaccctaacacagtgcctagtaggggctcaatatacatagtagttgtttaataaatgtttattgacaaatgaataaatcaaaacacaattactgtaatgatctcattacatgtggatttttcccttttgggatataagcccatccagagcactatagtgtgcacagttactggcacataatagtcattaagagtttatggagatctggcaaaatggccaaataggaagagctccagtctgtagctcccagcgagaccaatgcagaaggcgggtgattgctgcatttccaactgaggtagccagttcatctcactgggactggttagacagggggtgcagcccatggagggtgagcagaagcagagggggttgtcgcctcacccaggaagtgcaaggggccgggggactccctcccctagccaaggaaagccgtgagggactgtgctatctggcccagatactacgcttctcccatggtttttgcaatccgcagaccaggagattcccttgtgtgcctacaccaccagggctctgggtttcaagcacaaaactgggctgctgtttggatagatgccaggctagctgcacgtgtgtttttttcgtaccccagtagttcctggaaccccagtggtgcctaggaaccccagtgagacaaaaccgttttctcccctagaaagggggctgaagccagggagccaagtgatctcctgcagtggatcctactcccacagagcccagcaagctaagaaccactggcttgaaattcttgctgccagcacagcagtctgaagtcgacctgggacgctcaagcttggtggaggcaggggcatccaccattactgaggcttgagtaggtggctttcccctgaccatgctaaggactggacgtaactcaacacagcacagcaaagtggctgtggctagactgcctttctagattcctcttcactgggcagggcatctctgaaagaaaggcaagagccccagtcaggggcttataaataaaactcccatctccctagggcagagcacctgggagaaggggtggctgtgggtgcagcttcagtggacttaaacattcctgcctgccggctctgaagagaccagtggatcctgacaaggagggttctcccagcgtggtacttgagctctgctaagggacagactgcctcctcacgtgggtccctgacctgcatgcctcctgactgagagagacctcccaacaggggttgacagacacctcatacaggaggaaggagcaggcaggaatctttgctgttctgcagactccgctggtgataccaggcaaatagggtctggaatggacctccagcaaactccagcagacctagaggagaggggcctggctgttggaatgaaaactaacaaaacaagaagcaataacgtcaacatcaacaaaaaggacccccacacacagaaaccccatccaaatgtcatcagtctcaaggatcaaaggcagataaatccatgaagatgaggaaaaaccagcgcaaaaatgctgaaaattcccaaaaccagaatgcctcttctccttcaaatgatcgcaactcctttccagcaagggcacaaaatgggacaccgaatgagtttgatgaattgacagaagtaggcttcagaaagtgggtaataataaacccctctgagctaaagaagcatgttctaacccaatgcaaggactctaagaaccttgacaaaaggttacaggaactactaactagaataaccagtttagagaagaacataaatgacctgatggatctgagaaacacagcacgagaacttcgtgaagcatatacaagtatccatagccaaatcaatcaagcagaagaaaggatatcagagattgaagatgaacttaatgaaataaagcatgaagacaagattagagaaaaaagaatgaaaaggaatgaacaaaacctccaagaaatatgggactctgtgaaaagaccaaacctatgattgattggggtccctgaaagtgatggggagaatggaaccaaattggaaaacatacttaaggatattatccaggagaacctccccaacctagcaagacagaccaacattcaaattcaggaaatacaaagaacactactaagatactcttcaagaagagcaaccccaagacacataattgtcagattctctaagcttgaaatgaaggaaaaaagaatgttaaagggcagccagagagaaaggtctggttacctacaaaaggaaacctatcagactaacagcagatctctctgcagaaaccctacaagccagaagagagtggggcccaatattcaatagttttaaagaaaagaattttcaacccagaatttcatatccagccaaactaagtttcataagcaaaggagaaataaaatcctttgcataaatgctgagggattttgtcaccaccaggcctgccttacaggagctcctgaagaaagcactaaatatggaaaagaaaaatcggtactagccactgcaaaaacacaccaaaatatagagaccagggacactatgaagaaactgcattaactaatgtgcaaaataaccagctagcatcatgatgacaagatcaaattcacacataacaatattaaccttaaatgtaaatgggctaagtgccccaaaaggcacagactgccaaattggataaagagtcaagacccattggtgtgctatattcaggagacccatctcatgtgcaaagacacacatacgctcaaaataaagggatggaggaatatttaccaagcaaatggaaagcaaaaaacaaacaaacaacaaaacttaggggttgcaatcgtagtctctgataaaacaggctttaagccaaaaaagatcaaaaaagacaaagaagggcattacataatggtaaagggatcaatgcaacaagaagagctaactatcctaaatatatatgcacccaatacaggagcacccagatttataaaacaagttcttagagacttacaaagagacttagactcccacacagtaatagtgggagactttaacaccccactgtcaatattagacagatcaacgagacagaaaattaacaaggatattcacaacttgaactcagctatggaccaagcagacctaatagacatctacaaaactctccaccccaaattaacagaatatacattcttctgagcaccacgtagcacttactctaaaatcgatcacataattggaagtaaaacactccttagcaaatgcaaaagaatggaaatcataacagtctctcagaccacagtgcaatcaaattagaactcaggatgaagaaactcactcaaaaccatgtatgtggaaactgaacaacctgctcctgaatgactacttgggtaaataacgaaattaaggcagaagtaaagttctttgaaacctatgagaacaaagacaaaacatactggaatctctgggacacagctaaagcagtgtttagagggaaatttatagcactcaatgcccaaaggagaaagcgggaaagatctaaaattgataccctaacatcacaattaaaagaactagagaagcgagagcaaacaaatttaaaagctagcagaagaaaagaaataactaagatcagagcagaactgccctcactcagcaatgaggagcctgagcaaatgtgcaaggctgtgagagagagagagagagagagagagagagagagagagagagagaaggagatagagacacgaaaaacccttcaaaaaatcaatgattgcgggagctggttttttgaaaagattaacaaaatacattgactgctagccagaccaataaagaagaaaagagagaagaatcaaatagacacaataaaaattgataaaggggatatcaccactgatctcacagaaataccaactaccatcagagaatactataaacacctctagcaaataaactagaaaatctagaagaaatggataaattcctggacatgtacagcctcctaagattaaatcagggagaagttgagtccctgaatagaccaataacaagttctgaaattggaggcagtaattaatagcctgcaaaccaaaaaaagcccaggacctgacggattcacagctgaattctaccagaggtacaaagaggagctggtaccattccttctgaaattattacaaacaatagaagaagagggactcctccctaactcattttataaggccagcatcatcctgattcgaaaacctggcagagacacaacaagaaaagaaaatttcaggccaatatccctgatgaacattgaggtgaaaatcctcagtaaaatactggcaaaccaaatcaagcagcacatcaaaaagctcatccaccatgatcaagttggcttcatccctgggatgcaaggctggttcaacatatgcaaatcaatgaatgtaatccatcacataaacagaaccaatgacaaaaaccacatgattatctcaatagatgcagaaaaggcctttgaaaaaattcaacaccccttcatactaaaaactctcaataaagtaggtatcgatgggacatatttcaaaataatgagagctatttatgataaacccatagccagtatcatactgaatgggcaaaagctggaagcattccctttgaaaactggcacaagacaaggatgccctctctcaccactcctattcaacatagtattggaatttctggccagggcaatcaggcaagagaaggaaataaagggtattcaattcaaataggaaaagaggaagtcaaattgtctctgtttgcagatgacatgattgtgtatttagaaaaccccatggtctcagcccaaaaactccttaagctgataaggaacttcagcaaagtctcaggatacaaaatcaatgtgcaaaaatcacaagcattcccatacaccaaaaatagacaaacagagagtcaaatcatgagtgaactttcattcacaattgctacaaagagaataaaataccgaggaatacaacttacaagggacatgaaggacctcttcgaggagaactacaaaccactgctcaaggaaataagagaggacagaaacaaatggaacaacattccatgctcatggatacaagaatcaatatcgtgaaaatggccatatggcccagagtaatttatagattcagtgctatccacatcaagccaccactgactttcttcacagaattagaaaaaaactactttaaattccatatggaaccaaaaaagcccacatagccaagacaatcccaagcaaaaagaacaaagctggaggcatcatgctacctgacttcaaactacaaggctacagtaaccaaaacagcatgttactgataccaaaacagatatatagaccaatggaacagaacagaggcctcagaaataacaccacgtatctacagccatctgatctttgagactgtacaaaaacaagcaatggggaaaggattccctatttaataaacggtgctgggaaaactggctagccatatgaagaaaacagaaactgcaccccttccttacaccttatacaaaaattaactcagatggattaaagacttaaatgtaaaacctaaaactgtaaaaaccccagaagaaaacctagggaataccattcaggacataggcatgggcaaagatttcatgagtaaaacactaaaagcaattgcaacaaaagccaaaattgataaatgggatctaattaaactaaagagcttctgcacagcaaaagaaattatcaccagagtgaacaggcatcctacagaatgggagaaaatttttgcaatctatccatctgacaaaggtctaatttccagaatctacaaggaacttaaacaaatttacaagaaaaaaaaaccaacaaccccatcaaaaagtgggcaaaggatatgaacagacacttctcaaaagaaggcatttatgtggccaagaaacatataaaaaaagctcatcatcactggtcattagagaaatgcaaatcaaaatcacaatgagataccatctcatgccagttagaatggtgatcactaaaaagtctggaaacaacagatgctaatgaggatgtggagaattaggaatgcttttacactgttggtggagtgtaaattagttccactgtggaagatggtgtggcgattcctcaaggatctagaaccagaaataacatttgacccagcaatcccattactgggtatatacccaaaggattataaaacattgtactataaagacacatgcacacgtatgtttattgcagtactgtttacaatagcaacaacttggaaccaacccaaatgaccatcagtgattgactggatatagaaaatgtggcacatatacagcatggaatactgtgcagccataaaaaagaatgagttcatgtcctttgcagagacatggatgaagctggaaaccatcatcctcagcaaactaacaggggaacagaagacccaacactgcatattttcactcgtaagtgggagttgaataatgataacacatggatgcagggagtggaacaacacacactggggcctttcggggagtggggtgcaaggggagggagagcattaggacaaattcctaatgcatgtggggcttaaaaccaaatgacgggttgacaggtgcagcaaaccaccatggcacatgtatacctatgtaacaaacctgatgttcagcacatgtatcccagaacttaaagtaaaataaaataaaataaacagtttgtgaatttatcaataacctgatagaattacagactgcagtgcgtactcataaggaactcttatttattcatgctgttgaagggagattggataagctagacatattaaataatagtatgtttgattttcttggagtttataaagttatcaagctgaacagtaactatctgaatcttgagagactggaaatttggctgacttcttttaggtttcttcctttcccacagaattctttgtttctccctctattctgtgccaattggtatcagacctaaaactgatgcagaccctgtggatttaggcagagctgacctgtccagagttactctcctaatagtttacagcccacctaggtttagaagacagttgttttgaactatataattactttggcttgagttggattctctaggaaaacaaaaaatagacaaaagacattgaatagtgattacagtttttaatcatagttttattatgataagaaactgaaaggatgcaaaagagttggtcatacttacctggattcaggtcaagccattgccaagccatggtacaggcactgatgtggacctttttcaatagaggcagagaagacttaattttcagactgggctctaagtacttctggggttgagtacagtataaatatatttacctgaaacatcccttttatttgggtatttggaaagagtatttttataataaggtaaacctagaactattaattttaaatatgaaatgtgaaagtctttaaagacaaagtatggaggtttacagagatattttgaggctgggtggatgccttagttattctgtctgattaaagtgttgaagaacacacacattatactaaagtattggtttgtaacatggaagatttaatgaccatagcatagacattaagtctttgttttttgagttaatcactgagggaaactgaagttccatttcaccacttcctgggtagtgacagtggtacaatctttagcttcactttgttgcataagaaaccagttaggatccaaagctgcaaagaaagatgcatttctgcctttaagaacaagtttaaatcatgaactgctttatttagagccagttggaggtagcatactgctggcaattccaaaccatttaaaaaacaaaagttatggttattaatttttgaagccacaaaagcatgaatcaacattatagcagtgtcagtatctcagtaggaactagtttcaactgaactgtggcagcaaaataaatgtttgcagattgttttgacaaaatgtcatcctctgggcttcaatttatttgccaacagccttacttttgaaaaagtcttgctgcgcttgaagtttagaagaaaaccctccctctgaacattctggaccttaacaaataactctatctgcaagcatttgtaatgtggatctgcaaatgttttaataggaatggaatatgttgctaagagatgtgtctgtaaacatctgtttgacatatttcaccatggtggagattagggatccctggtacccctggtggtacaggccgtttttttaaaaacagaattcacatgtggtttttgaaaattacttatttatttattatgatttttaaaaatttaatttaaagttccagatacatgtgccaaatgcgcaagtttgttacacaagtaaatgtgtgccatagtagtttgctgcacctatcaacccatcacgtaggtattaagccctgcatgtattagctatttatcttgatgctctccctcccctcacctccacagtccccagtgtgtgttgtttccttccctgtgttccacatgttctcattgttcagctccttcttataagtgagaacatgcggtgtttggttttctgttcctgcgttagtttgctgaggataatggctttgagctccatccatgtccctgcaaaggacatgatctcattctatgaatttttttaaagagatagaatcttgctgtatttctcaggctggacttgaactcctgagctcaagcagtcctccagcctcagccactcaagtaacaggctacaggcgtgcaccagtatgtcaggctcacatgtgtttataaagttctctagacagggctgtaacagggttgtgtgtgtgtgcgtgtgtgtgtgtgtgtgtgtgtgtgtgtgtgtactgtcagatgattttattcgtatttttctagtgttcacccatcatttgaagcttaggcacatgcaactctaggaggtgagtttagtccctgaaatgagtatcttttttgaaagttgcttgacaagtgtgaagaaaatcattttccaaagcattaacgtcaattttatacaaaattctgcctgcgtgtgtttatatgcatttcatctgactcttaaacagatctataactcccaaagttagaactgacaaatttataggctaagttgtttgagctctggaatgaatttagatagttcttaaagccatttaaaatcagaagaaaataaattaaaaggaatagaagggatggcttgttgaaaagtaaaggaataatggctcaatcccaagcttagtgtaggaaaagtttaatactcattgcaaagtatttggtaatatatagtccttggatattttaaaaagaaaaacaagcattgttattatcaagattttaacatgcctcattttcaaagagttcaaaccaatggctagatatgtttttgaaatctcctgtttggacagtgggatttagaagggtgccctatgttcacaaatacagtagaaatagaaatgatgggggaagcacactatagcaggaagagtacggactttatggtcagacaaagctacataactgctaagtctagatctccccactactagatatgtgatctgggtaatgtatgcaataacctcattgaatacatatcatatatgaatatagaaataatacttaggttatgggaatgttctgaggattaaaggagatatgttcataataagcgctatttattaatagatgttcttattaagtaatatttctaatctagtgtccttaccaaattgcttggccaggaaaaaatagaaagcaagctgtgaagaatctcttcaataaacctcataactgtcttttgaagaggtcttgcaagtggtgatgaattgaaagaataaaaataaaacttgtgataatggaaaatagaagtataagttttggaagaaaagactgcagtggatgtgtagctcagtttgtacacaccccaaataacattggaaagccaagttattgttctcaaagtctttgctcattttaaatagtaatagattcaagatagaggagaaactgatttctgaagtgagcttgatttcagcatgtaaaaggatacattcttttgacttagttcagaacatgctaatttcataggcaaattaaccaattgtcattcacggcaggacataccatgcagacatttcagaacaattttaattgcagttgacatttttgaaatgaattcttggacataaacatctatatgacatggatgtgtcactgtaggagaaaatttagtgttagctgatttaatagctaaagaatacattttaatatttaggcatattttatattagtgaccaaagaaaaaaaccaattagaaattgactttcagaattctgtttagggaattcatttagctgacatcacaagtaactcttaaatagcccctttggtgtgttttaaagtaggattaggtgaatataacattacaagaactaggcattggccagcttttctttgagtatacaagacagaagtttagagtttacttaactataatttatttttatgtaaaccagtaatggagtctgtaaaaatatttaggttcttgttctgaaaaattaagtttttttttttttttttaaggaacatggttaatggctgatttacatgtgttattttgacatgagttttgttctattgtagtagagaattagacttcctaacatctccactatgcaagagtagagagtggctggacatatcttaggctataacaatcttaatatgtgtgtgttttgggtgcagctcagagataaccaatgttgtttaatattcattggtgtctcttggattgctgattctgttttgtttttaagtcagattactacttaaagaggaaaacttaaatggatatcaataggatctgtgaatcaaaacttgttctgtacataaaacatctagattcatttcagtaagttacccttgtgcatagcttagttcctttcaccacatattctttttatctgtgaaccatcgtgcatatttttccttttcattctgtctttggaaatcctcattctattcatgtgctttatttttccattggattttcaggtttacttaggtctctggagttggttatatgcctttacctctttaggtcactttcactgaggtttatctatcttggccacgattgattggaaattcattgaaaaattcattcattatgcaacttctttaggtagttgttatttaaatactgctagttagtgctcactacacatctttgactaaataacagggtaaataaagggtgagaatatttcttggcattattttttccctctaagaatgtcagattcagttttttcaatctttgtattgaaaatttgttggtattacttctcaaagaaaagatgagatcaaaagtgccagaatcaataatacatcagtagattgcttaatataatagcattatctggtctttctgaatataattttataagccagaatcgcaaaatttgattcctccagccatggatgtacctttagtattctcttcactcttcctgttgttattatatgtcaaaaagttggggaagctgagtcagagggagaaggagggatttgctctgtcagaattgaagctgagcaccagattctggtcttataattcggatcccatcactccacctgtgattactgttgactcagggctgtattatctcatgaagtgagttccctgtgctgccactagataggagtgcatttgcagaatcccatcttttgaaatgaatgtgacgaagatccattttctctgaggatataggaatcagctgctgcaaacacttcattgattacttgggggaaggattggagggtctttagtatcttatgtgaattctcctaaaacttattgggaacaatcccttccccttccacaccacttgcaagcaacagcacttctttaattcattttcatattactagacaacttaggtattcatatttaatatctgccttgagctttaggttctttgactcctacatatcaacactgggttgcttttatctcagcttaccctagcttttcagtcttaaattgacagcgtgacctcaagtcttccttctggtcccttcagatttgctgttgaaatttgctgctctggcatttgcactgtggcctcctcttgtggattttggcttatctcgttcatcaggcccagagcaccttccactgcatttgtaggagttccctgactcattctttatacatttctataactgaatctcagacaccccactttgctgaagatttttcctgcccttctcacgaaagagaggtggcagagggatttggacaattttcaggtgaatgcgtaatctctactttacaaggttgctaaagcgttttaccagtgtaattctaagaaagccagatttgagcttatgcaggtcttaaagagtgtcataaatagtcaaaagtgtttccaaactagcttaagctggtacttgatggatctaaacaaggggttgtctgagaaggcaaaggaatctaagttttatgatcgatagttaattaattggaaattcttcacccagttaaggaatagccaagccttacacgttaccccaagccttagaagtgactaaatactttctctaacagttctttctgaacaggatgctgttaataatcaatctcttttgaaatggcacttacttatctcgccactgatgaactgaggttatctctagatgccttgaagtgttatatataggcttctaatataagggattaagaaatgttgtagagatagaatatagtgaaagcggattgtgtcaaagggggtgaattctttacttttgtcagtattactctgtagaatgcataagtttatttgtagcacacttcaatagaaaattaatatccttagccagcccacatacccactctaatctaggttttctatcagctttgtgtagttaagtgatatgaataatttagaaggaagtttatttctataacaaattatgaacctctgcgttaaaagttggtcctaaaaacttagctgattcaattttattatttactgagaatggatttagcatatctctgttggtcatttgggaaggtgcttaatgaggaaaagcatcaacatttacttgtgtttatatttagactcttgtcattcatatgccatttctcaagcagtcgaactcagtttctacaagtggtctttcagcttctggcctggtttttaggtctttgctgattagtagacatatgttgctggtgtgctgctgtgtgctgctaccacagaataccacagacttggtaatttgtaaagatcagacatttattggctcacccccagttctggagggtgagaaatccaccatcaaggttctggcatctggggagggcctgcttggagtgtcataatatggcagaaggcatcacaaagcagaggggcaaagaaggcaaaagagagcaagagggggtgaatccattccccagataatgtattagtatattcctgggggcagaaccctcatgacataaacacctcttcaaggtttgacctcccaatcctaccacgatggcaattaaatttccactgagttttggatggaaaaaacttctaaaccatagcacaaggcaaatgaagcattatgttgtctgagaacagtgaaactatagatgtcaagtaggaagtgttggaggatctgttatatttattttttctttactgagaatataattaaacttcacaaaagttgaggatcactgccactaattttggaccctcaactcagaacagatctaaataagacagaaaagaagaaaaccttattgtagaatcttgttgacatttctgtattacattcagagttccagcaaaatctttagagcgttaatacatctgtggggaatgtcaccttttttcaaataagaaagaacaggcatccatgtaacatttccttgaggcctccattcctctcccgattttaaaagaaattgtatttttaaaccacacttctcagtattgctatccaggtaatatgggtagaatttttttggcaatgtggggatgaagtcagaagtcctaaagattctttaaggttcggtgcctctatattcttatgcattttgacagagagtctataggaaggagaatgtcttcttttgtatgtgaaagcatccaatggcagcattagtgtggcgcttgtgacagtaatattggagctatatatttagctactctctatagcaaatagttgcactcgaacaaatctgtagagtttattttgggaatcttgaagatttcctaatgttgatgagaattgagtctgactttagaaacctcggggtataaattgttctgataattggtccaagttgaacctggagaaaatgctgatgtgttcactcttaagcagagtgattcatcatgtaaaccttatcatagcagctctggcagaagggagagaagtgatgtagggagtgagaaattaaaagtaactggaaatggtggttataacatgcacaagaaactttcaggtccttcaggaaaaggttgctgggtagccatattctttaccatttcaattaataagtgttttctgttctgtttatagaaagtgtcctttctttccatgcaacttgcttgaaattcccttgaccctcatccccattgttctatgcccatgggattattttttggctttcgtggcttcccagttaagtagcgttcagaaccatggccagtcctggttcagaactggctattctagtccctaaacagcagtaaaggcaagtgctgtaagattatgtttgtgttgaacatatttttgagaaagataattgagattctgcagtttcaaatattgtaaggaagtgtgtggcactaatttgacatgactattctcaatttagcaactaaaaaaccttaattggcttgttttccttataaatatgattttaatgctaattttagaaaatttagaacttgcacataaagaaaacaaggaaaatgagaatcatcagtaattcttccacttaaggataataattgttaacatttagtgtatgtccttctggtggttttttttctatacatattatataagttaataagcctgttgttgcaagtgcaagaaactcatttagaactggaataaacaaacaacaagaaagaatttttttattcactaaaggaaggatctgggtatagctgggtttttggggaaagtaatttgatctgaacaaaaggctacaagaagctaaacacaacaactagaagtaatgattatttagatacttaaggcactgggtaccttgtaattttaacaaggcagatatgccctggtggttaaatgtgggtgaatggatggggttgcatgaattcctcttttttgagtcctcacttagcttttcttctggaaattctctggcatgtgatatgtgtcaaaagacgtaatttgggtctcaatcaggacagcacaatgttctgaactctgtacttacccccaaaattcctgttatccattatgtccatctagacttctttgtctcctggttttgttttcactactgtgttgttttggcatccccaaactactgtgttgttttggcatccccaaactactgtgttgttttggcatccccaaactactgtgttgttttggcatccttgggaacgttgggagttgacatccttggcagagtattgagagtttcatgcttgactctgatgatggtgtctgtgatgcggtaccccttccaggtgtttttttgcagatagagggcatcaacagagggctgtagccaaaagaatcaatatgtgtgaaacatcccttggggacccagcaaattcttgggatgttaatttattagggggaatgcagtcttacgatatgcagatggcgcaattgggtgattaccgtttctgtgaacctatttcttctcaaagcctcatgaataccatgcaaacttggattaagtgaggaaaatggtatcatggaaggtgaaattcggaaaaagtcaaaatgtttagtttcatcattagtttagttacttagtttaggtcaccattgaggctgctaaaaactaaatgattgatttgaattttacttttctctctgatagtcttggaatattgaaataatattaataatatgcttaatataattacaattaatataattgggataattaataaaagaagcagcagaccaaaaaggctgtgggccaataattttttaaacatggaatttcatggaccaaacttactttactgctgtaccatcattgagactacccctttgagaatggcttagcagcgttttaaaaagaaagatacatatttacatcactgacagaaatcctcgttttaattttttaacccactgctttggcagaagttaggaaagaactacacagaataagttatagaatacaaggagtactacctttatgttctaaagaattctaagtatcttatagatatgacctgaatccatgtaacgtttttgtaatgtaaaccccaggtagattatttttctacatttttaagataaaaagctacggtacagatatttcttaaaaatgtctgagtaaactctagtttttatcaccacttgctggctgaaattgaacttactctgctcctaactaaggtagtttgataatattatgaaactcaggctcttaatgctgttgactctctatagctgaataataatatcatggcatattaaggataatttgtgataattgacagcttttcttgagtgggagcttattaatacttggatacctaaatatgtttaaaattatctattttaatgaatactacttggctgtttcagtttcttagctaatttgaaagagaaaaagtaactgtctaatttacttgtctatagcttgctaacatgtaaattgatggtaattttctggattggttggggtaaaggtatgttaaggcatgaagaaaatctaggtaacttgtacacatctctccaaaacttggattccattaaaaaaaaaggttgttcaatgcaattagtttggtgatacacttaacacatggaaattagctctactttaacctgttaaaatggaataataggagggtatatcaggactgttggttgcaaatggcagaaaatttagctcagattgctttaaaacaattttgcttttaatttaaattgtaattgtcaagtatgattgaaacatagctgacttcaggcatgggtggatctaggcattagaaacctacatctgccttgcttctgagttattacatgtttaatttattcttaggtagactcttcccttagagttgcaagatggccatctgtacttcatagcttttattgccattttagcctctcagcataatgattaatttcttagtagttctagcaaaaggctgacatttatttactctgtttcacctatatcaggtcaactgcccactcaaaaatgaattgctgtgtgtggcaagaagttgtgatattctcattgctcagacctgggtcatagggccttgtggattaaaccaaatggttatacaagtataaagatggttctccagaagaaaatgggatgctgtcattagaaaaagagcttaaaggtggttactaacagatgaccactacaatgtgtgtgtgtgtttgtgtgtatgtgtgtgtgttttaaacatttatatgtttataaaactttattcatttagttattctcatttcttttatttataaaggtgaaaatgaagtttgaggattttatatatatatttaagtgtgtttttagagtgttacagtggtctggtaattattattaataagaatgcactaccttatgtctacttagcctccctccatgcctcatgccccttcttcccttattcttgatatcctggaattgcacatcccaataaacattagcacataagctttgcctgagtttctactttctggggaatatgaatggaaaatgatatctatcagacttacttagggggctgtttcaaatgataaatacaccaccgtgacagtcctttgatacattgtatgcttcaagtttataaggatgagaaaaggtgtaacaccacgacattagacttagaaatagttgacctaagtttgatcctaactctgctacttactgtatgacattgagtaatttgctgaacctctctgagcctcattccttcatgtggtcaacaaagggtcagcatgataacatgggttctcagggaggactgcttggggtgcctgtgaatcattaggcaatttacatgcatctccaagcctcagttttctcatgtgtaaaatggagatagtaatacaatctacctaacaggtttgttttgaggattcaatgagattgtcattcatgcgaagcatttgtaaagtgccttatctattatcatctctgaaaaagagtaaaaagctgcctctttgaaagattgtgaagattagctgcattctctaggcagctgttggagccatttggtttaggtctgagcacctgagctattgtaaagcatgacataggtataaaatgatgtctttttctaggggaaacaaaactactgtgatatatttaatacataaattgtggaagttttaacaaccatgatatctacctacaaacttttgtctcacaatgaaaaacagaaatgaatacttaaaatgataactatgtaaaccagttgagaatagcacattaataacttaaaaatagttgtttctttttatactttggtttgaaagctgagattgtaccagattgtggactctgcaaagaagaaaatgtgaaatccagaagtcctcatttaacttgtttaagggaatttatatgtagacttgtcatgctcagcaggaattcttcattgtgatcactatttctattaaagcaatttttttggaagcctgcagggtggccacagtgggatgcttcctataccaaaaccaaaagggtacattcgcaaaatgccttttggtgaataatgaaccaaatttcaactaatttactttctgactatttcatatgccactgtgatttccgtgtcttctgaaatctaatacatttactgcctatattgttcatatagcaatctgatcgtgttttcctttaattcttttaaaaaatgagattaaccattagagtgtggcagctaacaaatgggcttagaaacaacacaaatgggtttgaagtcatatcacttagtagttgtgttatcttgaggaagtcccttaccttcttaggatgcattttccctgtctataagagtaatgtaagggaataataaaagtaactatttcatagacttgtgtaaaattaatgatataacaaatgcaaaacatttaacacatttcctgggatagcgtaaccattcaaaaatattagttattgcttattatagttttatccatagcatttcccctactatgtattatcttttcttctttttattttttatttttatgggtatataataggtatatatatttacggggtacatgagatattttgatacaggcagacagtgcataataatcacatcagggcaaatggggtatccatcacttcaagcatttattatttttttgtgttataaattccaattatactcttttagttatattaaaatgtacaataaataattattcattgtagtcaccctattgtgctatcaaatactaggccttatttattctaactatatttttgtacccattaaccatcccccaccccacctgctcccaccaactaccctttttagtctctggtaaccatccttctactctgtatctccatgagttcaattgttttaatgtttagtttccacaaataagtgaggacgtgcaaaatttgtctggcttatttcacttaacaaaatgtcctccagttccatccatcttattgcaaatgactggatctcattcttttttcatggctgaatagtactccattgtgtgtatatatcacatttcaaaaatccattcatctgttgatgctcacttaagttgtttccaaatcttggctagtatgaataatgctgcagtaaacatgcatgggagtacagatatctctttgatatactgatttcctttcttttgagcatatacctagcggtgggattgctggatcttatggtagttttgtttttggttttttgagaaacttccacgctattctccatagtggctatacattcccaccaacagtgtatgagcgttcccttttctccacatccttgccagcattcattattgcctgtcttttggataaaagccattttaactgggtgatatgatctcattgtagttttgatttgcatttctctgatgatcagtgatggtgagcaccttttcatgtacctgtttcttagttgtatgtcttattttaagaaagatctgttcagatcttttgcccattttaaactagattattagatttttcctattgagttgtttttaactccctatatattctggttattaattccttgtcagatgggtagtttacaaatactttcttccatcttttggttgtctcttcactttgttgattgttttctttgctgtgcagaagctttttaacttgatgtgatcctatttctccatttttgctttggttgtttgtgcttatggggtattacccaagaaacctttgcccagtccaatatcctggagtttccccaatgttttcttgtagtagcttcatagtttgaggttttaaatttaagtctttaatccattttgatttgatttttgtatatagtgagagataagggtctagttttatttttctgcatattaatatccagttttcctagcagcatttatcgaagaaactgtttttccccaatgtatgttcttggcacctctataaaaaatgagctcactgtagatgtatgagtttgtttctgggttctctatttattctgttccattggtttgtgtgtcatttttatggcagtactctgttgttttggttactgtaggtctatagtaaaatttgaagtcagataatgtgatgcctctagttttgttctttatgctaaggatggctttagctattctgggtcttttgtggttccatatagattgtaggatttttttttctatttctgtgaagaatgtcattggtattttgatagggattgcattgaatctgtagattgctttaggtagtatggacattttaacaatattgattcttctaattcatgaacatggaatatctttccattttgttatgtcttcaatttcgtgcatcaatgttttatagttttcattgtagagatctttcactttcttggctaagtctgttcttaagtatcttattttatttgtaatgattataaatggaattactttcttgatttctttttcagattgttcactgctggcatgtagaaatgctactgatttttgtgtacttgatattgtgtcatgcaacttaactgaatttattagttctaatagctttttggtggaatctttaggtttttccaaatataaggttatattatttgcaaacaaggttaatttgagttccttctttccaaattgaatgccctttatttcttctcttgtttgattgctcttgctaggacttctagtactgtgttgaataactggtgaaagtgggcatccttgtcttgttttagatcttagaggaaagactttcagttttttgccattcagcatgatactaggtgtaggtctgttcttctattaatattatattgaggtatgttccttctgtaaccagattttagagggtttttatcatgaaagaatattgatttttatcaaatgctttttcagcatcaattgaaatgatcgtatggtttttgtccttcattctgttgatatgatgtatcacgttaattgatttgcatatattgaactattcttgcatccctgggataaatttcacttggtcatgatgaatgaactttttaatgtgtgttgaatttggtttgctagtattttgttgagaatttttgcatcagtgttcattaaggatattggcctgtagttttccttttctgatttgcctttggttttggtatcagggtaatataagtctcatagaatgagtttggaagtagtctttcctcctctatttttagaaatgttttgggtaggtaaaacagagatatagaccaatggaacagaacagagccctcagaaataataccacacatctacaactatctgatctttgataaacctgacaaaaacaagcaatggggaaaggattccctatttaacaaatggtgctgggaaaattggctagccatatgtagaaagctgaaactggatcccttccttacaccttatacaaaaattaattcaagatggattaaaaacttaaatattagacctaaaaccataaaaaccctagaagaaaacctaggcaataccattcaggacataagcatgggcaaggacttcatgtctaaaacaccaaaagcaatggcaacaaaagccaaaattgacaaatgggatgtaattaaactaaagagcttctgcacagcaaaagaaactaccatcagagtgaacaggcaacctacagaatgggagaaaatttttgcaatctactcatctgacaaagggctaatatccagaatctacaaagaactcaaacaaatttacaagaaaaaaacaaccccatcaaaaagtgggcgaaggatctgaacagacccttctcaaaagaagacatttatgcagccaacaggcacatgaaaaaatgctcatcatcactggccctcagagaaatgcaaatcaaaaccacaatgagataccatctcacaccagttagaatggcgatcattaaaaagtcaggaaacaacaggtgctggagaggatgtggagaaataggaacacttttacactgttggtgggactgtaaactggttcaaccattgtggaagacagtgtggggattcctcagggatctagaactagaaataccatttgacccagccatcccattactgggtatatacccaaaggattataaatcatgctgctataaagacacatgcacacgtatgtttattgcggcactattcgtaatagcaaagacttggaaccaacccaaatgtccatgaatgatagactggattaagaaaatgtggcacatatacaccatggaatactatgcagccataaaaaatgatgagttcatgtcctttgtagggacatggatgaagctggaaaccatcattctcagcaaactgttgcagggacagaaaaccaaacaccacatgttctcactcacaggtgggaattgaacaatgagaacccttggacacaggaaggggaacatcacacactggggcctgttgtggggttgggggaggggggagggatagcattaggagatatacctaatgtaaatgacgagttaatgggtatagcacaccaacatggcacatgtatacatatgtaacaaacctgcccgttgtgcacatgtaccctaggacttaaagtattgaaaaaaaaaaaaaaagaaatggtttggataggattggcattagttcttctttaaattcagctgtgaaaccattggtcccaggcttttctatgctaggagaccgtttattatggctttaatctaattacttgttgttagtctattcaggttttgagtcttttcttggttcaatcttggtaagttgaatgtgtctaagatttgtccatttcttctaagtttctcagtttattggcatatagttgctcgtagtagtttgtaatgatcctttgaatttctgtggtatcagttgtaatgtctgcctattcatctctgatttcatttatttgggttctctctttttttctcttaggctaaaggtttgtcatttttgtttatcttttcaaacaaccaggtttttgtttcatggatcttttgtattgcttttttaaaatttcatttattcatgctttgatctttattatttttcttcctttactaattttgggtttggttttattttgcttttctataatagttctttaagatgcattgttcggttttttgtttgaagtttttctactttttaaattatcgctttgaataaactttctaccccaatctttctctcccttctctttatgccaataacccttagctttgcccttttaggctgttttctagatctcacaggtgtgtttcattcttttttcttttgtctcctctgactgtgtattttctttttttttttttttttgagacggagtctcgttctgtcgcccaggcgggagtgctgtggcgcgatctccgctcactgcaagctccgccttccgggttcacgccattctcctgcctcagcctcccgagtagctgggactacaggcgcccgccactgcgcccggctaattttttgtatttttagtagagatggggtttcactgtggtctcgatctcctgacctcgtgatccgcccgcctcggcctcccaaagtgctgggattacaggcgtgagccaccgcgcccggccgactgtgtattttcaaatagcctgtctgcgagctcactaattcttctgcttaagtctgctgttgagagactctgatgcatccttcggtatgtcagttgaatttttcagctccagaatttccacttgatttttaaaaattatttcaatctctttgttaaagttatctgataggattctgaattccttctctgtgttatcttgaatttcattgagcttccgcaaaacagctattgggaattctctgtctgaaaggtcatatgtctctgttacttgggattggtcattggtaccttatttggtttgtttggtgaggtcatgttttcctagatagtcttgatgcttgtatatatttgtcaatgtctgagcattgaagagttaggtatttattgtagtctttacagtctgggcttgtttgtacctgtcttgggaaagcttttcaagcattcaaagggaattgattgttgtgatctatgactttggatatgatatcgctgcagccatgtctgcgttaggcagcaccataagcccagtaatgctgtgactcttacagacttgcaggtttaccacctttgtggttgtgttaagatctgagagaattccctggattaccaggcagagactcttgttctcttctcttactttcctctgaacagaagaagtctctctttccatttgagctacctggagttgggggaggtgtgactcaagtacccctgtggtcattactactgggattatactgggtcagactcgaagtcagcacagcattggatctcacccaaggcccacagtgaccattgtttggctaccaccaatgttcagacaaggtccaagggctcttcagtcaccatgtggtgaatccagccaggcttgcgtccttcccttcagggcagtgagctgagggcaggtacagaaatgccatgcaggaaccagggcctggagccgggaactttaggaatctatttggtactctattctgctgctgctgagctggcacccaagctgcaaagcaaagtcctttacactctttcttcccctttcctgatgcagaaggagcctctctgcatggcagccactgccccgtgcctggctactgctgatgttcagtcaaggctcaagctggctattcagtcagcttatggtgaatgctgccaggcctgggtttctaacttcagggaagtgggctcttctctggcccagggcaggtccagaaatgctgtctaagagcgaaggcctggaattggggatcataggagcctgcttggtactctgctccactgtggctgagctggtgcccaagctgcaagacaaagtcaccttcattcttccctctcctttcatccagcaggcacttctccccatggccaccacagctgggaatgcactgggtcacacctgaagccagcatagctctggatctcactcaaggtccatggcaagtacttcctgggtacccttgatgtttattcaaagcccaaggtctcttagtcagcaggtgatgaatcttgccaagactgggtccttactttcaaagcaggaggttccctttagcccagggtatgtctaaaaatgtcacctgggagctagggcctggaattggggccttaagactctgcctagtatcttaacctactgtggctaagctggtatccaagttggaagacaaagtcctctttactcttccctctactctcctcaagcagaaggaaggagtttctcccagagctgcactgcttggagttgggggagaggtggtgcaagcactttcttggcttcccaagctggtgtctcgctaagtcatatgcaccccaagtctcttggctctgagcccagtacagcaccagtagaaacttccaggagttgcaaactagtttatgacacacgattttggaattttaatcccccaaaattgatatactggttgctcaggtgcctatatgtaataaataagacaacctatgaaaggggttaggcatggtacctagagaggaagacctggaggtagtgttacatccttcttccattccattttgcagaagtcaccactgagttgctgtctaatgagtagtgattcatgttttgctaaattgagaatgccagactacagagtaatgctctgtggaggagagccgagcagggatatgtagtatctatgctgttttttaggcaggagaccaatttatttttttctgttagaggtggggacaaacctacatcacatctttagaaatggacaaaaggttgattatctgactctagacttctcccttctagaagctaattctatggagtacgtatggacacaaagaagggaacagacacaggggcctacgtgaagtggagggagggaggaaggtgaggatcaaaaaactacctattgggtactattcttattacctaggtggcagataatctgtacaccaaacccctgtgacacacaatttacctatatagcaaacctgcacatgtacgcctatatctaaaataaaagttaaaaaaaattaaagctagttctgatttagggatctttgatgttgaatgttgatgaaaagtgatttatatttgtgattgctagtttcagaaccactacgatgaaaaaagtgactaaacttttggtaatgtgaacacactactccttagaagtattgtccagactccaaattctgcctgtcatttcttcattttcatgccctcctgattgcctaaaatagttagacttcccatttcatgattggaaaggcattgcaaatatttttacattaaagtcctggaactgtagattattttctaccagggatattaagaaatttcaggccaggtgcagtggctcatgcctgtaatcccagcactttggagggccgaggagcggggatcacaaggttgggagatcgagaccatcctgactaacacggtgaaaccccgtctctactaaaaatacaaaaaattagccgggcattgtggtgggtgcctgtagtcccagctactcaggaggctgaggcaggagaatggtgtgaacccgggaggcggagcttgcagtgagctgagttagcgccactgcactccagcctgggcaatagtgtgagactctgtctcaaaaaaaaaaaaaatttctaatcacaaagtaaaacatattcattgtaccttgtatcagtatgtactcaattaccttattttaatgttctgcatacatttatatttagcagatttttttctggtattggtttatgtgctaatttacttatttatttaaagaataaattacttagttaatatttattttccctacatacatgtaaactctgtaagatcagagatctttttgtcagaggctgaagataaagcctgttaagccaattaagagcatagacagtgctcagtaaacatttgctgaatggaatacatgagtgaattgtaaacactttggaatttatagaaaagtgaacataagaaaacagaagccctagaaataaaccatataacactgaaagtgtacctgtgtatttaaatatgcctgtatatgtagaagtccttgctttgtaccgtagtgcatgactgtaaaaaaaagactttgcaaactgaaattatgcaaaacaatcctaataatcaatgaaaacagttactattgctctttgacctttaaaaatttttaaatcactacagtctctcttgttgttagctataaaggtatagggaaatggaaaaaggtaaaactaatatttattcagtacacagtaatttaaaacattagaaatattgatattaaaattgtttcattgtacagtcttatcaggagtagtttgaatagtgcttgccttcttcctgttgtacaacttatgatacagagcatgcattttttttcaatgcctagacaaactgtcatgctctctaaatgtggatcagcttacattttatcctgtgtgctttccatgtcaagaaatgtctcctaaaactccttgaatgtgaagtttttagccagtatcactttctctaggacatcatcatccttttcattacaatcactttccttgtttatgttgattaattcaccttcactaagttcctctaactgcatatacagagtctttcaatggtgaatggcagcatcgtttacattccatgattagctacgtcgtctccatttacgtttgatacaaattttacttccaatagtattaatttttgtttgtgtacattgccttcattcttgttgtccagttctgtctttgattatccatgtcacttgcatttatctttgggagacaagaaggcaacacagctacacactttgctgtctgtgtgtgaactgaacaacaaacacgcagtgatcaatcactgacatattttaaagaaacaccccatgattggtcaatgatcattatgcacacatgttagttacgtagtgatttatggactgaagagctagctgcaaagtttgtactttatgaaattactattaatataccatgttaactgaaatttgaactgtattgttagggactatgttatttaatctaaattgtggtgactgaaatgtacacatatcagactgagcaccgtgagggctgcctcaattcctagctttattttatagaaatatatatttcttgtttctttactaaaatgggatcatttaatgtgtattatttttatttttaattttatatggtatacatgtcaaaaaagtccagctattttgacttcatattttatgattgagtggtatttcattgtgtagttgtaccatactttatttaaccaatcttcctttatggatgtttaggatttttctgttttctcagttataaacaatgctagaatgatcacctctgtcactaaacctttgagataactcttatttatttagaatgaatgtatttctagtacaagaattgttggctcacaggatatatacactatttaaaaattttcatgtcccaccagaaattttcatgtccttcaagcatttccctttagagagatgtttccatttaggctcctaccagtaacataaatcaagaagtgctgggtgcatgattcccaaacccttgcccacgttgggattatcatttttttttttatttttgacatttaattaattaattaattaattaatttatagacagggtcttgctttgtcacccaggctggagtgcaatggcatgatctcggctcactgcaacctctgtctcccaggttcaagccattttcctgcctcaccctcttgagtagctgggaatacaggcacacgccaccacgcctggctaattttttgtatttttttagtagaaacagggtttcaccatgttggccaggctggtctcgaactcctgacctcaggtgatccacccgcctcggcctcccaaagtgttgggatcgcaggtgtaagccaccgcgccctgccattttttgacattttaataggtgaaacacattttattttaatgattagtttcgatttttaattaggttgaatatttttcatgggtttatttgtactaaataaattttgatctatggaattttattctgtcctgtattataatagttttcagatggtagggatttttggttttattgggtcatttgtgtacatatatttctacaaatttatatatgcatgtgtgtatgtgtgtctatccataataaatatatttgtgtgtacttgaactgcattcacatgtatataacattgttggttttacccagggattttgaggagtatttgtgggccttaaatttgtaacatgaccatcaatttccaactgcttttctttctctctctctctttcttttcttcttcttcttctttcttctttcgtcgtcttcttcttcttcttttttttttttttgaaagggagtaacccatgacctgggggaaattctagttaatttttcattgcatgattttcaggagatagggtcaaaaggagctagtagggcattcaattatgtgcttgagtgtgttggaaaatgttttttttttttttctctctccctcaagtgtacaatattttacttgggcttgtttttcaagtgcattgaagtgtgactaaacatttttgggtactaccattctgtaaagaagagggcccatcttgttaaatattccttcatcaactttgcagttagccagttattggcagggagaagcctgcgagggcatgagctttaggcattggacagagggagggtgggtgggaggcggggacttgggggatctcaggattggggtactttgttgtccctcccactgctgtatgaaaaagtgactggttcaagctggcttttgtcttataattttggatgagtcataagtggagaaggaggggaagtgagtggttagacctcagctcatctgagggctaaaggttctttgtgacacatcacacagaattggagtgctgtccttctggagagtggtggagaaccaagatacagttcagaaccaaaggaatagagaagggctttgatttctttttggctttagattggggatttgggaggcttagcaggaaagatgtccactgaaaatgtggaagggaagcccagtaaccttggggagagaggaagagcccggagctccactttcctcagggttgtccagccaatgtttaaccacagtattttcacttctgcagtctctcctgctgcagaacgcatccgattcatcttgggagaggaggatgacagcccagctccccctcagctcttcacggaactggatgagctgctggccgtggatgggcaggagatggagtggaaggaaacagccaggtgaggcatagctgactgtatgtagtactgacccagggaaacaagggcagggcaagatgcttgatcctggagtgccgttctttagccttagcactttgaatggccaatgggcatgatgttggctgggataaggagtaaataattctatttcttcttttcttttttgttgacatgaatgcagggcacctcttatttcactattggggcattgtttcattgatccatgttgctataattttggcttttataaggaattagaaataaagctcaatttatatactatttaatagtaaaatattttagagagataataaactcaggtacccaaaaatgacagccaagagatatgtttccacagtgtccacatgccaagatctcttgtgagattttgtgtgacttattactcattccctgtcaagaggtgggttttggccaggtgcagtggcttgtgcctgtaatcacagaattttagtaggccgaggcaggtggattgcctgagcctagggttcaagaccagcctgggcaacataatgggaccccatctctacaaaaaaaaaaagaaaaaaaaatcagccgggcatggtggtgcatgcctgtggtcccagctactcaggaggctgaagtaggaggctcacttgagcctgtgaggtcgaggctgcagtgatctctgatcatgttactgcacttcaatctgggtgacagattgaaaccctgcctcaaaaaattaaatgaaataaaaaagagattattaaaacaatgaggaaagttgctcttatggtagtccccccaaggttatccacagtttagcttttcatggtttcggttactcactgtacagtacagtaagatattttgagagagttgccacacttatataactgttattacagtatattgttgtatttattctattttattattaattattgttgttagtcccttactgtgcctaatttacaaattaaactttattacgttttatatacaggaaaaaaacatagtatacatagggtttagtactatccatgccttcaggaattcactgggggtcttggaatgtatcccctgtgaataaggggactactgtatttcaagtataaacctgtaatcttttaaatatccagctgaaagtagaaggttcatctgagtttggagtttagaggcccgagtttactttgactctgttgcctcttagtgacaagacactcgatttcctagagctttggtctcattatcaataaagagtggataataatgcctattacatattatatatgtatggtatataaaacatatatgtaaatatagtatacaatgtatttataatgtcacatatatacatacatgtgtatatgtatatgtatgaaaatgctttgtaaattgttaagcattacacaaatacctggggtttcattaatctcataacagagcttttcttttacatacagattcagagatattctccaggtgaatcttctgtgacataaggcaattatgtaatacaaagactttgattataatgcagttgttggtctctcattgtcatcattatgtgctgattccaatgtatttcactttcataaacaagataatgttaagataaacctcttatagtctgtaatttaattccaatcaattcaactcaaccagtgttatttgaatgaatagtttatgtcaggcactgttttaggtaccatgaatatagcagtgagcaaatgaggatcttacatagatctctatcttattaaaaggtttgaagtaagtttaatataataccttacaatatgagaataagggaaaccaaatcattatcccagctttgagtttaagaaaaacaaagcaaagatagatgaaagtcttcttctgtggttatagatggaaaaagtatttatggctgctattttttctacatagacttagaaagaaattctagagtcagaaagaaaatatttttaaaaatcgctttaatcaattagagcagatgagctataaaggagcaataagccaatagcctttccctttatggatgaagagtcttttaagagttagaggaataatttttattttctgaggcatactttaaaatttcttacatcataccacttgtaatcaagtgtttatgaagttaattggattttttgtagtttagttacttaggcttatgctttgtaggcttatggatttatttttatttccacaattttaagtaatattgaatgtctttagccctttgggatttttaatactggagaagcttcataaattaatttatttgataatgggggagaagtttttattcctcaccaagagtttctaggtagcttagtcttgcagaaaaaactgctttaaaaatgtttagaactgatggagaatttcttatctttcataacttaaacaatgcccagaaaaaaagtaattcggctttactcctagccccaacagtagtattagggaaagagacctaatttttaaatactttattttcaatttactgggtaattctctttctaatagacatctacagtgggtgtgattgtttaactcttctgtttgatagctacttaatattttcttcttctaattaaaaaagctttcataacacatttccactcctcatctgtaatactttcttttgaagcttttcattctttgctcttttggggcttcctcccaggatacatcaactgtttcttgttcccctctctcagaaccaataacctgtatagaaaaaaatcctctgtaaagtaaaattttagttcctaaaacatcctccaaaagaaggcttccaaagcaaaagctttttactagtgaatctgtttcattctttcttttccttctttctgatagaaaaatacagtgtgagaattgtcctggtgcagcctgaagtgttgggagattttggtctagtcttggctttgctgctcactagctgtttcactttgagcaagtcatgtagtctttctgagcttgaatttcttttttatcagatgaaggtcgtattgagttgcctcctccctaacattatatatatttcatagctctaaaatttaattcctgtgtgtatactgctacactcagctaagactactttgactttcttattttcatcttgaagttctttgtgagttgttatcatagagtataattcaggtgtagttttctgtttttcatttcagtcaaatgcagaccatacgttattttacataattcctggtcccagaaaggtagagagattatagttcattgtataggtaattcaacattgaatgataggagcataggattttcactcaagatttttaaagattaagatggttttgaatactttaccatccttagagacgttatttccttgggagcacgtgtgccattttgctgatgtagtctgtccccaagacaccctactgctggagaggaagagtgttgggagtgtatcgtgtgtcacgtccacgctgtataacttctctttatagggcttaccgtaattgctgtcgattaattcattatgtatgtgatattattgttttcatatggtctccctcattacattaatttatctgcagagagactaccatgtctgttcactatcatatttctagttcctggcagtgtctgattcataataggctcttaataaacatttgtttaatgtgtgattggttgagaactgattgccttcgacacaactgttctgaatataatactttcttagaaatattaattgaccaaatcagggttctgtataattattctctttctgactgataaaaagctatggaatgaaagacccaaggtacccagaatgccattgataaagcttagaaggggacctatgtttaaagtttcaaactatttcattaatatattgatgatatctgcatttataaaagcacggatataattccttatttaattggaatcaactaatcggagggctaataggattctcaaaattgacatgtctaaaactgaacttcagatctactcttcctaaagatttcctcttctcaatagacaattccattcttttagttcttgagccagaaacattggagtcttccttgattcctgtctttctctacacccaatatctgaccaattggtaaattctgttttacctttaaagatattcacatattcagagatttcactacatctcacattcagtactactacaactctagttcatcccatcatttctcactgagattgctgcagatggctcctaattagttgatctcttttcatctgctcttacttcctttatgaattatctgccatcatctctttgaccttgtcttccttttcatttcctctgcttcactctgcttgagcctcactggccagtcatgctaatctgtcaggaactttggacttgttgttccctctgtctgaaatgttctgtcttccctgaacccccacagttatctgcgtggcccatgtcctcatctccttcaggtctttattcaaatattacctgcttagtggttgtcctatctataattgaaaccttcccccaatgcttcctatccctcatctttcattatttttgtccttagcacctgtcatcatttagcataccatatatcttgttattgtctcttcccaatagaattaaagctctgtgagggcagaaattttcagttgttttgccactgtattcctagtgcctgaaactacctggcacacaggtcatgctcaacaaagactggttaatagaatcaatgaatagagaaatagaaccttgattcttggtttgctgctccacctacattctttggagaggcgtggagtgaatatgcttctggaaatattcagcttttcagtaacctttactatctgggacataccctgctgtcagaatgtttttgcagtaatttttgactcccatttgtgatgtctagtttccagatatgatagttttttccccccattaaaagccctcagacctaccagactaataaaagtttaatgcttagaaggaatccattttacatatgaagatgtgacatgaatctttttctggccaacttataaattgataatattttgattttctgtgaaagtcgcaattgatagcctattttatttcatagagagctaactctccagacttctccagctccatgtaggttctgttataaatctacagcccacagaactcaatatcatccttctttctcttttaagacctatacttttcagttggctaatgatttcttacatattattgagatggctaatgatttcctacacattattgagatgaggaaatctgtaggcagagtagatctgaagttcagtttaggatattcttgtaggatcaggataataatgcatcagcattattatggctgtagtactacttcaggaatttcaggttggccctgtgcctaaaaaaatgagaattgtttcaataatagggggagatgtccccttttaagtcatggaaagcacagtagttatactatgaacaagattaagtatttatttatatgaagtttaaagtaactctcaactctatcaccatcccttttacgtcctttacctgttcttccctttcctaaaagttagaactttgaattttcagtggttcttccaaaatagagcacaagttgaatatggtaaaaagggtagacttatcagacctgaaaaatcgtttggaattggtgaagaagcctgtgcttccattaagaatgtctaggtgactaggtgtcagctaatgggttcataaagcaaactggtaaaagaataattcatgatccaagtttgatgatggcccaaagtcaggagaaagggactttttttttccctgcccaaattctttattcatttgagtagggatatctctgcaaaaatgattattagctgtcagtttctcttcagtgaattttcagatggacagtgctggacttaaccactgttgtatgaatgtttgttaaagataactcccccagcgtaattcaaactgtgctgccaaacttgggtataaaggaaagccatcacaagtttcaacaaacacaagccaacaaaggaaaggggtattgatgttttacttccaactggacaccacaaatgtacacccacttgtgtttctgcttggcagatttacttcaggtaaatctgaagtacctgatttaagggcatggccattaagcaccaacatgtgcacttatactgtgggtttgggcaaagactgctctctcccagtctacactgacttctctgtcttttctctactgaattactttgggaaattctatttcaggccaagttaatttttctgtaagaaaaagactcaaggaatttaatcatctatgtaatcatatatagttatgtccatgtagttgtgtacaataactttaatagtggatctagaattttaagaattctccttaaaaacctcatttttcccaggtacacactaacgttggcttcttttagggtgataaggcacttgttagttagcaagacatttatcatcatttcaatagttgtacgtagttggaatttatttagtgtaaaggtcatgtctgttttccactgtacaactgatatgttattaagttagaggtctttttttttcttaattatatttaatcatatgattggaaagttgcaaaattcagtgattcccagtgggtcttttttttcttcaacaaacgaatgaaatgttgtttgtttggcagtcactgaaaatgtcttaaactgcaaagtattttatcattattcttctaagaccttggaataaacttcacctaataaacccctcctccaaggttaaaacggttttgtaattgcaagtatttaaaaagcctgcttctgaaacaaatttttctgtaacatgtcaagtactgaagcaaaaagaaagtgggaaacttattgcaaatatgtagttattcatagttattatgaaggggagatagtggcttttagtatactattgcaaatatgtagttattcatagttattatgaaggggagatagtggcttttagtatactctacagtaaaaagtctgttttttttttttaaacgtaattgcatggttctaaagcacctttgcagattcattggcacttgaatagggtgaactttggtacttttgccttagccttttctttaatgggctctgatttgaactgagtagttttcagtttttgtttttattttccaaatccaaatttgtccttgatatgcgaggaggctagacaaagcatgtgccatttctggaatgaaactacctgaaaatgatctgtttaaatgggaaagccagtagtttatgtccaaatgcatttgttggaagtataatcagttccttaaacaattagagcaatacattttaaagcaatttaataggcatttttccagagttctccttatgctgtaagctgtgctgtaatatgacatcatcaaaatattcaatatttactgaacttaaagtaaaataaatgctaaactgagctatgagataatatttatcccttataaatatagattttaagaaactggctagttttgagaatttatatttccattcctttatggttaaatcttgacctaaagagctggtgtaatccagaagggtgagtaatactatttcataaatccaccctagtttggatttatgttttgcaaatgcactttttaaatgtattcaaagtcatatttaagtctaaccaggttgcctacaatataaactatggagaggaataaataaaagatggaccacaaagaactgcagtggttttgcttctttttctttttagataaaatcttattaaacttatattatttggacagttgaggattgtctgagcctattcaggctgctataacaaaataccatagactgggtagcttacagacaacagaaatttagttcttatagttctggaggctgggaggtccaagatcaagacattgtcagattcagtgtctggtgagagcctgctttctcacacatggcaccatatcattgtgtctttacgtggtggaaggggctagatagctgtctggggactcttttataaagtcattaatccatctaatcacctcccaaagggcccatctccttataccattcccttgggggataggatttcaatatatgaattttgtggggacatagacattcagaccatagagaggatgatggcagaaaagaactactgtatataagtgaggcttagtttttttttaagtaatagaattggcagtacaggctgttggcagctgatagaagtgggggctcatttaggaaagataagaaggaagtaaaggccttgtaaaacactcccctttacagggcttctagctgccctgtgtcattcatcttgggcttaaattctatgaccaaatattctatccctcagaaaataagcatactcttaggaattcaagagaaatcaaggagtcattacactctttatagatagatgacataattctagataactctgacttgctttcatatatgatgatatcttcctttttctagagtcttatcttgagcaataaattatagcatcatatataaatatgattcatatgcctattaccaacaaacatgcttagcgattctatgagcaagcatgaaaagatgatatacctaaagttaaccaatgtaacattctccatcaaaaataaattagtttcaaaataactctaatcaccttattaccttttacagttttggttaaacccatagaattctttgagtgtgatataaaattgtcgttttttttctcccagttccttttatttctgtggtctaacttgaatcaaagtgaagaaatactaatttagtcacacacacacacacacacacacacacacacacacacacactagaagtctttcattctgttttggaatgtgtcacagctacttttgtagaaataaaccaagtccagttctgaagtttcagaacttctttggtgctatcgttgactttttaaccatgaggtaaacagtaaaaatctcccttcctgcatttttggggaggatacagggagaagaaggagggtcttagaattgtgggtaaggttgatacaaggttaccactaacatgggagttgcctggctgtgagagccttcctgagaggcacatggaggggaaagtctttagatacggctaaaatacttctgaaacatatgggtgctgggcttgattaacattctaaattttctttgacattgtgggctgatcgcttgatctattttcactcctggtctactaatgtgtttttttttcccctcctctgggggtggtaagaggtctataaataataccctatgtagagcttcctctgatctctgccctttgttctcatctttagtgagttaggtgagcgtttagctttctctaggaaaacatttttcaatcattaagcctttgggtgaagaatgtagaaaaacaatttttattccatctttatctctttcaatatctctcagaaggtttaaagtgaaagaagcctttttgttagtatcatgatgaatagcaaaacgatgttgctttcccattttcctttaacagtgtaggaagtgtctgtgtaatatgtgggatataaagtctgtcaaatgtgttttgctctcatttccattaaggttttttattgctatatattgctaagttatcaaaatgtctaggagtcttagaaagcagaagctagaaaagagggttgttccatcgctaaggttaataggatatctcatattatcagaataatctgttgttcaccgagcttgtgtgtatttaaacacacatggaaccagacttgaagggtaaagcttttaaaatcacaataagaggggaatatgcatcagctgagatatgtatattaaaggaagacacaacaaaacgtgccggtcttccttaagcatcaataaaacgaaattttacattcatcttgccacttcacgcatcatgttttttatgtctgcgataaatattggttcatcactgatatttcaccttatttaaacttgcctcatgaaatcacaacagaatcctcacagtggtggctatttttatgcactgtaggctgtacccacatggagaattttgaaatgcatatttttctaccttattaaaaaatttagttaaataattggtcttaaggatctcatggttacatataggcagatataaaaccaaggatgctttggcttctcttgcttggcttttttcttctctaacttcaggggaaggagcagtctagtgcttctctttgggtgtgtttatgaagattatgtaattaatgatctaataagctattaatactccacaaaaagagacattttggaagtgctggaaggggtgaagatggaggggttgagactgctatttctagaggaagttagaacacttttaattgctcttcactaatctcatcttcctaggtggatcaagtttgaagaaaaagtggaacagggtggggaaagatggagcaagccccatgtggccacattgtcccttcatagtttatttgagctgaggacatgtatggagaaaggatccatcatgcttgatcgggaggcttcttctctcccacagttggtgggtaagtatgctgtttgaattttatcctatttttttcggctttccctagccacatgtctccatcaaggcagatgactagtactgtaagcagagttaaatgttttataacatttattctctctttttgcattataacattagtatgatttattgcaagaaaatctgaaaaatacacaaatattaagaaaatagaaaactatcttccataacatcttcctctggtcattgttggcattttggaatatttccttctagctttgcttctcaatcctttccctatgtttttgattttttttattttattttattattattattatttttgagacagagtctcactctgttgcccaggctggagtgcagtggcgcgatctcagctcactgcaacctctgcctcctgggttcaagcgattctcctgcttcagcctcccgagtagctgggattacaggtacctgccacttgtaccttatgtacttcagatgcatgaaaagtgtggggcttctttgcaaatctaactaacaagctctccgaaaaagaaccaagtatatgtacatcagccagacatatgcctcacttgacagctaatctatttcttccaacacaaatgctgcagcattcatattatctataatgtaaagaaatggatgtcatagataagccttttgtctacagatatacaaagaaactttgcagtaagtctaaaattagacaagaatgttacactggtcaccttctgcaggtctttgatccacatcttcttccccataatcccagggtaggcacactgcagaccccttggaaaagtgcagccatccctacaggtccagtgctcacctggttatggaatttcctaggaataagaagtggagcccctgcacttctttttaagaaaaaacatgatctttggcacacctagatctgaaggataatacggcagtttaggccaagctactgatagaaaatggaaacaatggctccagtttggaatgcagtggtgtgtgcccaaggtgttcagcatgatgagttagcattcaacgcacaaagtactaactacaaaggaagccaaagctgccctgcaccatgaggttcagtgactttgatggtggtgatacaaatgatgcttgacaccaatgtgacctgactcaatcacttacccgtaatgtcttgctggatccctgtcccacccagcctttcttcacatgcagctaaaggggcttgacttctgcctacaatcaaccctaacccaggaactagactacttctcttcttacagatgatttaagtcctactttacagatgatgaaactgaggtccagagaaactcagtgcaagtctaagatcaaagaattctagaaatctagtgtctggacttccagtccaatataaccaaggatggatgaataaagagactccatttataatgttaatcttatgctaataagtgaaagtgaatgtaaatctgtgcatacagaatgaaaaataactaaaaaggaaaagtatcgctgggcgtggtggctcatgcctgtaatcccagcacttttggaggccgaggtgggtggatcatttgaggtcaggagttcgagaccagtctggccaacatggtgaaaccccactcctgcctctactaaaaatacaagtggagaagggagaggacttatgtaaagatgctggatggacagaaataattattttatacatttattcagcagtagtacatgggcttctacaatgtgccagacactgttctaggccctgaaatcagggtttgtaaatctaccactttgtaaatgagacaaggtacatgtcaacataggtacaaatctgcatttgtagttagaaaataatggaggaaacaattttatatagcatttttcatattgaacaaggcaggtgaagctgaaaatggaaatctgatatatgagaagagatcttggattatggtacccagggagatcggaacccatctacaaaaacagaagcaagcagaaagaattattttctgggccatctgttccattgtcttttttcattcattaaaagctgcaagaaagattgttatccagaaaagtataatgattggcaacaatcaatccagtttttgagtgaaaattgtaatttctgcattctcagaccttaagaactaacctggagcaaagatgtcaaaaattacacaagttgaaaataaatcaaatgtgcataaatgtagggcaaactggagaagaaaatcatgacttggcagagtataggcagtctaggaggagaataagggtcaccaggaagagtcccttattaaaaaaaacacaattttttaccatagatgatcattactgcctaaattttccccacttagggtttcatgccactgtgctcagggtttgtcctctattaaaatatacttactctatgggaagatgtcatatattaattcccgtgagatacagagtgatgttgaagaaggaatgctggatttaatgttggggagttttaattaaagtctagccctattagcatgtatgaccatgggcaaggccagttactgaactcttttggagtcttcattccctcatctataaaaagaagatgaaggtggacctttcagggttgttatgagcattaaataagatcatcagatgtatttgctgtctacttacatgtctatcccagtatgaatagtttatccagatatttctgcatgtcacctagcagagtgtagagaaatgagtcagatagagagacactcagtgacttcatgaacgggagacaagattccaaatggtatggtagacagagctggaaacagttgaacagcatccctgctgtgcttggaactgatcagcaagggtgatgaaagttaaaagttgaattacacacttggatgttgctgtaaaactgtctttgggatcttcatcaccaggaagagccatcttaaggagcttctggtcttcagcaactaactgaccgttttcatgttgtagaagagagagtaccagattatactggaacgtctttagcgaatggccaaagagagaaggttttggtacttactacatataagagaggttagccaagcattttgtggtttctcttcaatttttcgttactttttattatcagctgtgaactttttctctaacctccatgcatttactttaaaaattgtcattacatgttaaaatttgacactactatgtcactttgaggtatcatcactcactaatatgtttgctctgcagttcctggggcaagcagtcagagagccagtgctgtcattctggagctgataatacagaaaaacagttcagggacaaataacacatcataagtaaaacaaagaggaggaaaagggccagatttccagaagtggggagaagagcatgtttgaaagagtgtcactagctaaaaaacatcttaatcctctgaactaatcaaaaccctacagaggataaaacatgaacgaaacagagcccttatttcatctaaatgacagacaatggcacagtaacttgagaagttatagtcgttatttgttttttaaaaaatccttttgtagcagtgggtgaggtggagttgttttgtcccaaatcatgctgatacttctgagttgagaattatgcacagctaaatcttaagatgcatctccccccgcaccccaattttatatcaacaaatgagaagaaaaagaaataatagcaagcatgattatatcaaacaaacaatagctgcttttcatcttcctttgcagtccacctgctacccctcaccagcctgcctctgagaggcatctcaccctgcaggctcaaagacagcgccacaccatgtgagggccctgcaccatgatgcgcgactgtttaagcaggtgttacttctcacacttacataaaaaattcagcctatttttgattcttctcaggatttctacttgattttttcacgaagaaccccttctgaatgttaatagaaaaatttatctttaaagtattataaaggataaaacatcattttcacagattattttaatagctttattattagtatcctcattgtaattctacgtttaaagagtgtcattcacgtatgaagccgagtctatgggaattttcctccccttttaagttaaaaaaattataagccatttcaggtattttaccatgatgggaagtgaattgggaaaatgtagctctatttttggagtctcatttttatatttaaaggcattcctgagctgtgcatgttggcagatgtattggtcctattgtttcttactttttataacttttacattttcaaaatggcaataactttttttctagtcacaaaactaatgcatgttcatttttaaataacccggaacatattacagagcttttgtaattcctagtcaatactgcaacattgtcatcagaaatggaattgcccattgaatacctttcacatcatgggggttgattcaataagaaacatatattatcttagttaatcttgaagttgaatatttatttatatatttttggccctttatatttcttttaggaatgtttgtgatctttgtccattcttctgtcacatggccatcattctcttggtttgcaaaagctctgcgtatatcaattatttgtttctctagagcttagtttttaaataaagaaaaatattgtgtgacatggggaaagatctaaacttagagtcagaaaacctggttttatatgggagttttgcctctaatcagtccatgtctgtgggcaagtcagtctgtggccctgtgttctcatctgcatagcaagaggttgaacttgatgctccatgaagttcctttcagctctgctatcatctagtgttggcacattctctcccaattggtagtgtctgtgggattttgaacaccgaaggcttaatttcagtgtagctgtgaaatgttactgcccccactttcctttgaaggattttgtcgtttatacttaaagagatccctataatgttggccgttttaatggaaacttaatgaagggcataaagccacacagatgttttaacctgttctaactggtgatttccaggcattagtaacagaggactggctgtgcatacataaagattggtttgagatttcaagggagggtgagaatagagggaggccctgccaggaagggtagataagaaacactttagtctacaaccctgaaattagagtaggagtttgataacactcatagcagacatggtgggactgtttgtttgtttttctggttcttctgtaaaatggactttccactttaaaaggacttaaaggaaaagtagaggggttgtgttttgtaggcacctaattatttactgtggaagagaggtttaattgtaattacaggatcaattctgatagttttgctgagtggggtttgtgtagtttaaaatactcagagctaaaaaccactctaaaccaaaacatttctatgggagaaactcttcctgccttgcccagactccctaccaagtggtcccatgttatgtgacagttatggcacctctgtgaggcatgtgatggaaaatcctggattcagcctctgcttggcttccaaacagttgatagtacattgtgtaaattgccagtttctagctataggctgtgaggccaattctgtgagtgtttagaagatggacttttgagaaattcagtcatgcccaagcaaaacccgttgaacatctgtaacttctctttacaaagaagtgggaatccttgggagatgctgttatcctaccagtacccatcaattttcttgccggcttttggaaaagaatagttattgttcgtttctttacatttatatactaaagtttgcccaagtggaaaatatcagtgtgtgctagatgcatccatgtaccagaaagggagccatgggatccattactcacattctgtgcagaggacaaaaggtctacttgcataccttgagacagactcctaccaatgcatatcttgcacagattctgtaatgttttgtcctcagccccattctggatggagataaatgttggcctgtcatgtagatgtagagtagaatgtaccaggcttcatttatgctatactgctgacatgctgacttgtgagaaagagggtttcttattttctattggcataagaacttaccttccagcagagtgacctatgagcaatttctatgaaacacagtcatctttctggttaaaatcatactaaaaaaagagtaatagaaactttactttttttttggtagtaagactaagatattaaagtttcattaaaaatttcagtcagtttatactttaaaatgcccaatggaaatatactggaaagtcttcagttggatctgaacaataagaataagcctcctttcttagaaaagactacaacataattttgtagtttaatctttctttcattggattaactggtgttcagatgacctgatattaaatactgtttcccttgactgtattctattattaagtacgtataacatcacagaagaatttgggaaaatagattttaaaaatcaacaatctcattacttttaattttctatactctttttaagtttttaaatatcatttatatttctgatatacatttgctatgagtacatgaactttttgactcttccccttttaattgaaaaatataaattactgacttattgtgttacaggataatctgacttatgtgaatacatcatatctgggcctgaaaaaacataaaatgaatactctaatatttgtatctctctcatcaatgcccatatctgtgtaccctgtgtctttatcttttacataaaatgggaaattagaaatttagaaaacaatatcttgctattaaatttgagggtgacatccataaagttagagtaaaaaaataactttgtggtcttgtgactgagttttgttttttgcttttgtttttgtaccagagatgattgttgaccatcagattgagacaggcctattgaaacctgaacttaaggataaggtgacctatactttgctccggaagcaccggcatcaaaccaagaaatccaaccttcggtccctggctgacattgggaagacagtctccagtgcaagtaggatgtttaccaaccctgataatggtaatgcagaggccagctggctgctgctttctcttacttatttcactcacctttacaccgtctcctgtcatctttgttttaacccttctccatattttttcttttcttgagttcatatgccatagtcatttcatattgacatttttaatccagttggacaggtttgcagtcttgctggaaagatttccacaattgttgtaggctgctaatgccacggtgacttgcttactccatatacatctattctgattgatggaggtggtttagtagtaactctatgatgaaacaattgaatattatagatgagtcagcagattcgtagattattgagtacctctgtgaatatgttttccagcatgtttgccagaattaggaggagaatagtaagatatgataaatgccttgaaatctcctatcacaaagtgtttgcttagtatgtgaaatggtgtccagtctatataaatgatgacttcatcaaactaagcctccatattattttttacctctaataaaaccaatctgctttctgatataggataatgatagatccaagaataattattcaagatgggatattaaccccattatttaacaataagtaaggcactgtatcctatctgtagtttattgatttaccagagtttcctgtagagtgtctatcttttgtatcatggcgtttgtttcaaataaatttcatgattgggagcaatctgagaagggagaggtcagtttccatgaggtatggaaaatgaaggtatgaaggaaagaactactaagcattggctgataggattaggtctatcctcccatcccacccccaggctttttagtgttaagagagatgaggccgggcgcggtggctcatgcctgtaatcccagaactttgggaggccgaggcgggtggatcacgaggtcaggagatggagaccatcctggctaacatggcgaaaccccatctctactaaaaaattacagaaaattacctgggtgtggtggcacgcacctttgtcccagctacttgggagggtgaggccagagaaaagcttaaacccgggagggggaggttgcagtgagccaagatcacgccactgcactccagcctgggctacagagcgagactccgtctgaaaaaaaaaaaaaaagagagagagagatgagtagataagggagattctaattcattgccctcagctgcactttcagaataacataaaaccggttgtcatggaaaaaggtggagtaactgaattgcaactcagccactgcatttctggaaatgagttttctcttagtattaaaggtaactgttggctggaaaaacactacaagcagattttctgtggtatattttttaggcaaaactggttatgtgcaaataatttaaataaaatgctttttattaacaaaaatcacaaaagagaattgaatctgcagtatttctactacagtttgatggttctactgttacctagaatattgctgctgatgggaaatattttggtttttatgtctcccctggctttttttttgttgttttagttgtgtttttggaaagaggggttacttaatggctagaaagttatagaatgagtagtttattataactgatgtcacaaatattttatttaacaatttatatttttgaaattatggcaattaaagttgaagctactcttttatttcttatttaataatccactttcttatgtaagatgaaatcccaatatttgctgatttaattcgtttatcatggggttgggggaagtataaagaagtgaaaaagtgcattgttttcaaatactgctatattttcaaaaagaagtggaatgaatatggcatgcaggaggctttctaccaatatgatgagcttcatttccatggaactgcaggcagagtagaaattaggaacagatggatcttggcggccagaatcttgtgctttaggagaaagtatttggatatggaatacaactaatgagttaatatcgctcgccattcaatctttcatcctatctgtagatctctgtacttgagagaaaagttgaaattgcctttgccatccatcttttcacttgtgaaatgttatatatgctgggcagaaagcaaataggaagggtatgcagttcttttccagctcttcagctgatcagcttacactctgaagtgtggaatatgattagacctttttaaacatgttgttatttgccttaatgctacctaacttcttttaaatatccagaggcaagatttagctttgagagatcctttagcaatgaattttgtatgccttcaaggtacattcttataaatcatcaaatggcaaatttttggctttctagaggtgctcgttattaactggaaagtttgcgtagttacctttatatcttagggtttaattacttaatatctttaaaaaactatgaaatgttctcttagaataaatttctaaacaaacgttcttagaataaatttctaactaaaatttctaataaatggaatgttcttagtttaaatttctatataaaaattatagaattactgtaggtagaattattcctacagttttaatagaccacaatctttcagtctgttgtagttggagctagattctaatatctccatgtaaagcttagataaatttgtatacctttgtctttaatcataggctacaaaatagattcagtgacactgccagctttagttatagctagcaacaatgtaataaataactgaaatttatagagataacttcaaagttgtgaattttttcatttcatggtagtgtactggagtcagctctaatctgctcgggagagccagttgatatcagggatttgcaagctggttgttaaatacagctactattaaaaattaagttatataaacatacaatttaataattatattaaaacaaagataacgaatactgaaaatttattgctttctgcctgtttcactacattttactgtagtctgtgctcttaaggttatttgtatctactgtgtctgtatggtggtagaaatactgttaaatagtgtgccgttgtgcatctcttccctcagtgactatactggtaccttgaaatgggctgttatggtagtatttaccccatagaaaccagcaaatgctataaatcagggcttgatttttaaatttttttttttgaccatttgtctctaggcttaaagaagtgatggagaaaatgctaataatgtagattacatttaaaagtgtaaagtgtctataactgttaaaatgaatagcagaaaaaaattgaagaactttttttcagtaatcaaaaactgttatctgatttaggaaaagagtcagccacatcactgacaaatggatgaagtctgacatattcaatcttcattgtttcacttttgtcttattggttaacatacataataatattaatcaacaaatgtcacaaatatttgttggatatttgatggatgttggaactatactcatttgccagctagcataaccatatgctagctactgatgcaagagtttggccaagatcaactaaagtattgtatgagaatcaactaactatatgcaatttacaatacaatattgtatattttattattatttatataatgtgtgctacatattgttgtaggacttctccttagttcagttaaagacggggttcttgtcacacgaccacgaaaaattaggcttgcacacaatttgaagagtgagaaaaatggaatttattgagcaaaaaggaaaaaaagggaaacagggactctcagcagagcgagtcctggtagtacaggcttcctgccttgcagattgaatcccaggtacacccaggaggaggagcggcccggcttctccaccctgagaacagagggaaattcccaaggctccaccccagtgcgcactcctcccagtgcacaggccggtcagagtttctccaggaacccctctatacttggttgtgacaatatcctttataacagtaaaaatcaatgcatacacatactcacgcacgcacacgttcatgtataaatatggttctttcccctggtaaccggttttcaaacatttactggcacatccactaccagcacactactgtctttattcctaaagactaactctcgtcttttagcatcctggtatggcttggggttcaagacgattttatgtttttaaaaaggagcaaaaaacattttttatctgtaataaatcagggaacagtgaggcaagctttcaaaatgctaattattgtgaaattgctacttgtttgagacatgtgtaaattctatgggcatgcctgccaggtactaaattttaggcaaatgctatcatttctcagtagattaactgaggcatttctataatgttgcatgaagaaattaatgaggttttaggtaattctggtgttggatttttccttacctactttttatttatcactattgttttaggttgaactatatgaaattgccaaaggtaaaattaagttgtcagcaatttcatatgattctacctaataatttggtctgagatacttagctaataattctgtattatttagtgtattatgaaaaagtaatgtttaagcctggaaacattgcttggtagtatttaaaaaataaacatgtatttagtttgctttttattagaaagtaaaagtaaagttttttcttaattggtattcattcaataaatatttagtaagatgtttatgacaagcataacaactgcattttaaaaagttgtggtttataagatgatcagacttttttttaaatgtaccatttaaatgagtactttttatatgtattgtcttatcccaaagcttgcaaaaaatcattgagacctgactttaaggaccaaaaccaatgaggagcctgaatttgagtattcacctttttctacctttgtagaaagttgggtaaagccatcatcgacctgtccctgattttttcctaacttcttcattttttgtccccagattaccataaagatcagttccttgccttccaaggtctgggagtatagatgccctttgctgagaattggctttagtaatctaattggatctagactatggatttcattttcccttaatctaattttacgacctcactttgtattagtgaaaagtttctcttttttcaataaaaaattggaaagataatttagtagttgctcttgatgtctgtgaaagagagataatgaaaagtaagaagaaatgtataaaatgtttagagtggtaactggcacatagtaatcactccacaaatgttagtaaattttatacaatatgtttaagcacaattagggaagaaaaatcttatattgaataggagtggtttctggaatgatacttgctctgtagcttactatttggaaagaaactagcagatatagtgctgatttattccctctgccctttgttaagtgataccaatagtctttcattagcaatgggaggtgaggaagacctttctcatcatagccctcttacgtaataatttgttcccttcattggttttatcttttgctaaatgggtgtcagggggggtcctaaatcacactggaaatccacgacttggtaaagttgtcccatcagggagataaggagctggagacagtggcagctccaaggagagcggctggctcctaggcttcttgctgctttccccatgccttctcctggtgcccgtggtctcctccatatttgtaggcaccccgggcctgctcctgatagaacctctgcatcttatcttcaatttaccaccattttcctcttttttaattcaaatatgagaaatgtaatccacttgctcccattatgggttgccactacttactcctgaatctggactcctctgtttaaggttatctgccaggtgggatgccacttcctagctgtctcccatattgctggtttgatataaacacacacacctttaggtatttttaaaagcatagtctattgctgttacctacagtaacagataggtggtttgcaatgcagaacaaacaatggaaagaaatcaatttttatgttaatagtaattttaggctccagtgaaatataagtgatattagttgggctcttgctgcattggatctgatttgagattaggcccattcagactatttggtttgatattagatccagatgccttgacactggcttattttggatctggctgggaccaccgccaggtctggtagctttctcgttccctttagaaattcttcactttttgcctgcactttggattccagcttgcccatttgtctcaggctgggttgttctgctttccaggccatccccccaactgccccatacccttgaattcagacatggtcccttaatcaatgtgtaaggcagatatttccctaacctgcttctgaagccggccatcatgcttctctagttctcagataggtcagttgacatcttgcaactctcaggcccacatcacctgaaggttagaatcctcttcctatgtgcctttctgcatacaattaactctttcccaaaagcaacagcatacatccacctgttttgttcaggactctcattttccgttcattttcatagcacagatgaatgtcctgaccagaacccaaataacgatcaagctctttcccacctgagaataaatgaaccgatctatggaaagttgctagcaaagtgcctgaatgaaatcctcttccttaataacagtaattattatggctattgttattatggtatttctaactcattcatcaggcaccattcttattttcttattttccttttctttctccaggcagatgactgattttccaaatgcataatgttcagatctttaaataaacaacacatttttctccaagggtcaatctctctcagtatttgctgacctattccactctttatagcaatgaagagttgggcttaggagataaaactcaagtgggtctttagttgtttgacattgaaggcctactttgtaatcttctttttaaagacatgggaccatcatttccagaggtttcattcaattctttggcaaatgtttagtagcattgtggttatgagcaatttacataatctctttgagcctcagtttttatatctgtaaaataagggtagtgatgtcttattctgtgcatataaccaggaataaatgagatacctttgtgaaaattattaaataagcagaatgtgagataccattgtgctttggtgcattcatactgccataacaaaatagcttagattgggtaatttaaaacaatagaaatttattgctcacaattctggaggctggcaagtccaagatctaggtaccagcaaatttactgactggtgagagccctttcctcatagatggtgcgttctatggatcctcgcaaggtggaaggggcaaacattccttcaagcctttcaggagagcaggaatcccattcctgagggtggagctctcttgacttaatcactttacaaaggcttcaccttttaatactattgcattggagattaggcttcaacagaagaattttgggggggatacaaacattcagatcctagcacactgtaaggaacaattattatccagaaatattttagggggaaaatttagtgactttcagctttaaaattgaggacagaacttcaattcactaccattattttgcattttattattttctgtttctctccattttttgcctactacttcatttatacgaaaatattcttggagttttatttttaaaatagtgctactttcattatctactttgcagatgccaaataatacataatgagttgtcactcatgggctttctagtatttttaaatttagagtataaagattgatcattatgtctaagtaatgacagttttagctatcaagaaataatatgtgtacagcaagatgttaccatgtaataaacatatttttaaattttactagttgtcagtctgttttatacatctagggtctgtgagagagtaaaagaactgaaatgattctctttgcgtttatgctaccacatgtgagtgcttttttcttcattcccctttcctggagaagtcatgtatttcaaggacactgaactggtttgctgctgtcaaccctgagtaaatcttcttccaaggcttggtttccttaatagagccacgcttgcaaagttttttgtattcccaagccccatgttgctctgggagcaatcgaagtgtaggtgcagatctgggaccacatcctgctccctgtgaaagagatataggagagggaaggacagggaaaagtaaggagagaagggtaagcaagatagagacataaaatatgagcaccatgggttcatttaaaggaggggataaattaaggtcttccaagaatgactaagcatgcctcattctactcaactcctgtatccatagaaatacaaaggacaaaaaggagatctttctaggtttgtgaacccaatttcttaaaaaccacactttgaatttaaagtaggccaggatttctgtctttagtgttttccaacactcttcaagatgttgaacaaagaaaatgtcattccattaactatattagtagtagaaataagaataatgcctcacattattatggtagctctaatgtatatatcatttcagatgaaaaacctgaaagtcagaaatataaataacttgtctaagcatagtaaatggaggaacccagtgtgcttaataatcatatgctaattcaaccacaaggggatgagcttcctcaatcataatttatttcccacacatcacccggtccaggtctcatatgtaataatgtgatggtgaagggctctggaggccattctacatctaagcaggaaaacacaccaaacatggcagacagatgattgtctttattggctttccaaatggagatttctaggcaacatgtttcatgtgtttaggtgaaatgctggtataatcttgggttaaatttcttgtctaaatagcagtgccgagtgcataggaagcattcaatgactatttgaacatatgatgttgcaatcccaaaagagtcctaaaacttcaccatgaataaaatttattttcttcttaataggattgttttaaaaaaagcattttttctggagatattgtgtgtgtgtgtgtgtgtgtgtgtgtgtgtgtgtgtgtgtatctatttgcttgattcaaaaagagacaccttcacatgaacagatttaggattgatggttttggacaagttgattctcaaggggaatgtgggtcatgtaaaacaatattcctcacaacatctttttctacagtctaaatattggataccatcactcaaaagccttcggagctatatctttcctcatcagattgtggtaatataaaccaatttctaccttgtttatacctgaagtcaggcaaaagtgatgtaaagagaatatgtaagataatagcaaggctaagctgtttattttgtagctcaagtgtaaaagaggtatggtgaaagcattgtgtagacaaggcatacataatatatcattaccatggtataattacagaaagttctgctctagctttgggaacgacttctcaaaatttgatatttggagttaaatttgtgaagtgaaaaaaagcaacatgaaagggttacagagtttatatctcctcctgcacagaagtacacagagggtccaacaaatcaaaatgtagacatttgccaatgtaagtaatggatgctgtgcaagtctcagctttcatgagggtaagctgccagatggctccagtcaggctttgctaaaacacaggtgccgagtctctctgggcagttccattttcatgcctgtctttggagccaggttctttgctggcgagtgccaggcttcattccactgtccccttgatggtgaggctctgcctcaatggaggctgtatacgcaaaaagaaatttccagctttagttcccaacaatacactgacaggttgaggggagtagaggagagagaagctgctggggaacgttagttatcagcatgagttttggagaagctgctgacttcctctactcacgttagaagcaagccatggtatcagtgataaaatttgggtacctacatacacattagaagctaaaggaatatgaattctcattctaaagaaattggaagctaaaggacatgtcttcttttgaagaagtttcctttgtattatcagcttctgtcagttctcactgatctggcatttcactgggtccttgcttgggcctagataaatgtttgccagttgtttagcctaattcatttaatttagctaagcctgcaggaatattggctctttaagcagatcacttagttgtcaaaagaaataggaggcaaaacttggccagtatgataatatacatttctaaatgtctccctcttaacaaaagcaatttgggaacaatctcaacccattcatttctctttttcatttttcttagtgcaataaaaagttgcaaagaacttcaattatgggaaacaattaaaaattcagattgcaaagagaagacatcagatttgcctcaaacaggtgctggcacagatggcctgctcacaagtcctggctttatttacagcttttaaacacagacagataaattgacaaaaatgtttctcgattttataatgtgccgaatgcccaaatttggctataaacttatattaatttgtaaatgattcactttaaaccttgacctcccaagtcatcagtagccttaaaaagaccatttgtctcccctgttgtttgcatacttatgtgaatagattatctcatatttgctgttggttggatatgccttgtttactgccttgatcatttaatgatgatctttattaagtcaaattgcatgtagtctgatggctagatatttccaacctcgttgtgattccttaaaggataattatgccgtctctattttactagccttggagcatgacatttaataggaatagcaaaataaatgacatggagcccaaatgaaactatcttcaggaagaagttgatggtgttgtttcctccaggtgataaaatgtatctggagaaaccatactgtatatgtagcctgcaacattatttaatctttgctgtggtctaagatttggcataggtgcaccaaaggttaaaatgttaaaattaaaagtgagtattaaagggcaccagaaaatgaggactaacatacatccttaaattggcttatattaaggtattaatttatccctaccccagtcttatgtttctgaagggctgaaaaacagaggaaattgagatccagctctatattcatcaaggaaaatatttcagaagtgaaagtatgaaatgttgctttctccatttgtgcataagatccatagacctatctattgagtaggtcataagaaagctgcttactaatacgacaccctgccccctgtgctttacaaagctgtgtgtaacttcgctctgtgtgtgcttatgtggttcataattattaacaatcttgatcttacatcctgagattagtgtttattatgtaaatctttcttcttctgaatataatttatgttttgtgtattagaactgcagggtggatcatccattggtatttggggaactataatgattgaatgtaatttttttagactttttcattctttgtggggattcatttcatctaagggtgcagggcatgggagggagtgtgtgtctttgtaatgtgtcattgttctcctttaacccgcttgtgtgatttgctttagcatttttttcttcttaattaatgcttccatcctcatccttgctgtggctgctcatgtgtcctcctcctcctcctgtcttctgcttctgacactaaagtgcgcagcccgcttgagaactcagtgccctgcctagcaacccgcaccttggatgatgacccccgagtgcggcgcactcccagcgtgggatggctaagtaagtcaatggctggggaaagggcaaggaaggtggcggtggtcgggagagggagggcaggaagatcgggctcatggttactgagtggagggaaacctcaagaatgcctgaaagtgtaagatgtaaatattcctaaagtcgtaattgctgacttatttcttctactgtcaaagagtacagtaatgaagaacttcctgggtgatctgctgtcctgaatccaagttgaggacattgtaaggcagtggaaggattgtgagactaaggggtggggctggcactggcagccctccctccatgggacacttctctgaacctcagtttcctcatggtgatgctgaaccttcttacttcagaggactgggaggaaggtcactggagatgaggtctctgaaggtggtttgaaagcattcaagtgctaagtaagaggaagagcttactaagttaataatgttaaatacctcaaatacctactatatgccagaaagacagaatgggctatggacaacaaaaaaggggaataagatagaatctttactttttaaaaatttagagcttggtaaagtgacaagatttatgtacctaaaaccaaaagagaacatgcacaggaagctacatgcactttcccacaggtttctaaactgagtatatgtgatataatttttttaaagtagagtattaagagatgaataaggtgattccctgtccttggggggtttcctttctaatgaaggagacaggacataaatagataacaattgtataaaatgataagtgaaatgaatgaaaatacatacacacacacacgattgtgagaacatacccttggtctgggagtggcagtaatagaaagggcttttagagcaggtgttttctgagctaaatcttaaaggaaaagtatgagtttgatatatccataaaatagaaacttaataattttccttgaataataaaagttacaaatactaaatactttatgttatgctatttaattttctgaagaatcttgtgaagtggctattgttattacccacatttgacagatgaagaaattagaaaggttaagtaacttgcctagatcacacaggtcataagtgtgtagggcaggacttgagcttcatcatatggtagtttcaactataattttatgggtgatgccttactgaagttaaagtataggaaacttacatggtcagattgcccaaaagatctgctaatcccacaatgaagctctaacactcacatgattctctctgcaagaatcaagcatttcttctaataaattcttttactacttaatgatgcctcttggggaaaaaaatttcaggtaaaaagtttgggccttggagtataaagtcaggcaggaatgggtctgaatcctggatctaccactcctggcttcctgactttgggcaaattactcttttaccgtaaacctgggtgtttcaaccaactataaaactgagttaatcttaccaacataggattgttgtgagaattaaattagaaatatctaaagtatctagtgtagtgctcagcactcagttaatccagcattactgctgatagcaaagttcttatagaaattgctcaagaaattctagctgtttttatttttttaagtttcatttattccatgtcagacatccagacattgaagtatttttgtcgataaagtgtcaaggaaattgaccaaagtgttcagtttgcggatgatatggaaatatggcagctatttggaaatcaacttgagaccaaaccctggaccaatccttctgagaaacacattttagtaatgagggaggattcttctcattgtctctttatgtgatgtaatctctccctaaataatcagctttgatgtataatcaccttccctagggcttctaatacttactgtatccattcagtaaatgaaatagacacctagtgaataactaaggtgtgcaaagtagtgttaaatactgctggttttacctacctattcaacctcacttttgtctcttctcaatataaactctaatcagcttgtctcttttcttttgtcctatatcatggaaaatcctacctccatgtttttgttgataaactctacccttccaggaatgccttttttttttttttttttggtacagtcttgctctgtttcccaggctagagtgcagtggcttgatctcggcttactgcaacctctgcctcctgagttcaagcaattctcctgcctcagcctcccaagtggctgggattacaggcgcccaccaccactcccagctaatttttgtatttttagtagagacgggttttcgccatgttggccaggctggtttcgaactcctgacctcaggtgatccacccgcctcggcctcccaaagctctgggattacagatgtaagccaccacacatggcccaggaatgccttttccagtatacctatccaaaactattcagtaggacctgaatgaagttccatctcctttgtaaaatagttcttataaacacagatcttttcaagtcttaaaattccataactcctattttctgtgcctcacaatggaagatttaccatatattgtcttacgttgttctctgatgtttcattgtctttattttttcatttcaactatctacataaaaaaaagccttctctagggtctgtatctcatgcttttgtgtctcctctggtgcaggtacttgaaacaagggtgttgtacaatacacatttgttgacccttgatactccatcatttcattaaaagcaaccaacagcccagttttcactagggcccatcttggtcaccagaaaccgttaaccaaaagtgaatatggtttacttgtaaaaactatttcaccatatttctgcatatcctggtctgatgaatttgattatcaatttattctaattgttaacatggacttaaaaaactgccagaatattagctaaaaacaaatttgtaacaaggttttttaaagtttatctttaaagattttagcaagatattttcaggcctaatgtaactagaagttactaactacctttaaaagcttcatttaaagttccttttaaggagtaagctctcatcatttttacattgtgtgcttcttatcttcattgtcacctgaggcagatgtgagcctagagctcttatccatttcaaatgctgccaaggtattgaattagaatttggaacaaaaccaaaaatgatttcctcttacagatctcaccggcaggcctgaaaccagcctgggctggggaaaacaaagagaagctacttttcaggacaagttaatacccacctaaatgccttgccattattagagcataagaacataccctatcttgctagatccagaatggcttttcactcttagcgcttatctgtgaattcagtttgacatctagcagccagcatcatctgagcccttagaaaacacttgtgtccttttgcatttactggcagtcgaaatcagctgcttcagactctcaggtctgaacttcaaagaagaaaaggaggttcagagtttttttctgtcatcttatgcacattcctggcatctgccttcaccttgctttgtattttacctgtctagtttgtccatctactgggcagggacctggtccagttcagtgttttgctttgcaagtacttacccagtgtttaatgttattattatcatcccaagtattagtagttgtaatactgttttctttgttttttttttttatttaatgaaaccacagtggtataactgtagattcttgtttcatcctacaatcaggctacacagttaacattagaatttaaataactgaattgtaagtggacatttttttgcttttaaaaatttttctttgagcatttctggaattaaacaattcaaaatcttttaacttttggagagtttactgactaaattaaaattacataatttttctctggctctagggtcttcataaagttttacttctttaggaaaatggtgaacccagagaattcactttaacaagttcaattcaacagctgttcaccaagcttccactcttctagttatatggtccaatcagagggaaggagataagggaaactcacaaataacaatcatttgagagaagctatggtaagtgccaccaggagggtagggggcagactggtttgtctacagtgtgtacaacagtagcatttattatactctctgcaaatactaattagaagaatgaatggtggggtataaacagagaattgggaaaagaattcttgggagagacagacttttcaatggaccttatatatttccgtaaatagagattgtagtaagagcagggtgagacattgaaagatcatgctaggctagagaaaagtaaaaaagcaaccatgttgttgagaaagtataaataagagtttgtatgaggtagagtgagttgatacattaaattagcagaaagggcatgggaagaagatgtgtggagctagagtggcaaaataattgggccattttgtggaaggtctatgaaagtttttagtacggagatagcatggttagaactttatgttagggaaattaacctgtcagtcattctttgagtgggaatcagttaggagatgatttcagtagaccagtgctggaaaaaggatttaagctaggattgcgactgtggaagtggaaaggaggggataatgcaagaaatgttataggaatggtgttgtctagactcaataactgactgaatgttaggggaggaagagaaaggagtccaggatgcctcaggaggtagcaaccaggaagatcataggaaaccattcatgggcacaggtgctgggtttacagaagcatgacagttaagatttctgctcccatcatacgtgttgtgaccatctttgaagatatgtttcactagcagatttttaggttacccatcatgggccaagactcttctagattcctgctttgttatcacactcttagcttggtgtttttttctcctaaactttcttttgaggtggagaacaaccaccacatcacaactctctttattgcccagtgaattttgagcattcttatcttgattccaagcatctcactttccatccctctgtttttttcagatgcagacttgtttttgaatggaaatattatttgggtcacttattgtaccatttccacgtatatttttggcctttaaaatctaaagcaattccaagtacaactttaaaaattccttcactgtagcttttcatagtcacaattttcaaaagattgtaagaaataaaatctttcagcaacctgatgtctatgttcagactttttagttaacgtaagacattcagaaattgtatgtggtatgcaagaatgagttacaacattcttaagatacaggcagttctaaccactttttaataaaggaattagttactgtttatcctgaatttatgaaaaacatatcataaattatttccttgatatctaatattacatttacaatggactaaaatatattatgctgactttagacaactataaatagagaaaatcaagatgagagaataaaaacgtagaaattctgttatatttcagaatactggggacttggaggagatttcaagaggcacatatttggaaaaacgttggcagtctgctaaaattgtaaaacagttttttttttttcctaataagattttgggatttgtgaggattcagacttgtgcttgacaaaatggtgatatgtgtgatatatttataatcagactctcctgctcatcaccaaagctgtctgttttccaaaccttcctgatccttaccatctttctcccttctttcggacttggaaccttagcgtcaactttgattaatgcaactttgattatacctccagtataccactaaacctgttaaatgttacctccatattgttgcttgcctcagtctcctttccagtctgactttccttgcttttgttcatgtccttatttccttttgcttagtctgatccagtagcttgttttctggggtcagtggttatagttgggcatatggaaacgcatcttacactttgttccagttgaccttatcatacctggctgataagttacctcctcatgtggaagtgttcagtggtacctgagaggatctcaggcaacctccaaatgcttgagtctggcattcaaggcctaacccatagtgaactaaagttgattaagtagtatttcacacatctttctgtatttgcctttatctatactacatttcagcagtcacttcccattactagaatttgctggacgcttagtgcctttatcctgaatgatttttccacttggaatattcttcttcctcctgaaactttctgttaaaatcttgaccatccttcaaggcccacattctccttgaaggcttcttaacttgaggtgctctttactgaccttgaactctgatccttttctgagactcctcacatgacatttatctcattctactttgcactataatgtatgagtacatgtcttattccctttactagctatcaatttcttaagggcaggaatgtgtctgattcatttaggtatcctttattgcagggattgacaaactgtggcctatgtacaaaatccagcttgccacctggttttgtaaataaagttttgttggaataaagccatgctcattagtttatattgttgtctatatagctgctttcatgctacaatgacggagtagtggcggagatcatgtagcctacaaaacctgaaatatttactacctgtcattaaaacattttctgacccttatactgtagtcctgattctcaaagtaggaactgaagagccctaagtgtccctgagaccctttcaaagggattgaaaggtcctaggattttcatcatgtaattcaaccaaaactacatatatatacatatatacacgtatatatatatacatatacacgtatatatatacatatatacgtgtgtatatatatatacgtttgtgtatatatatatacatacacatatatacctgtatatatacacacacacacacacacacacacacacacacacacatatatatgtgtgtatatatattttttgagacggagtctcgctctgtcacccaggctggagtgcagtggcgcgatatcggctcactgcaagctctgcctctcgggttcacgccattctcctgcctcagcctcccaagtagctgggactacgggcacccgccaccatgcctggctaatttttttgttatttttagtagagacggggtttcactgtgttagccaggatggtcttgatctcctgacctcgtgatccacccgcctcagcctcccatagtgctgggattacaggcataagccactgcatctggcctcctaaaatatattttaacaggttgaacacagaagcagacaagaaaatccaattgtgtgtcatttaatcatatatatatatatatttaaaatatatatatgtttaaaatatatatacatatatttaaatgtattttattatttatttttgagttggagtctcacttactctgtcacccaggctggagtgcagtggtgcgatctgtctcactgcaacctccacttcttgggttcaagcgattctcctgcctcagtctcccaagtagctgggactacatatgtgcgccaccatgcccagctaatttttgtgtttttagtagagacggggttttgccatgttgccgaggctggtctcgaactcctggtgtcaagttatccacctgcctcagcctcccaaagtcctgggattacaggcgtgagcacctcacctggcctcatttggttgtatattaaagagatttgtaaaaatgtgaaacagtgcctttctttttatgaaattttttgtttctgaaagtatagttgtttttcataagatatacgacttatgttaacacgcaatggtttattgttaaagtgaattaatgaataaatatttaaaaatttttagttttaattcctaatgtaacacgtattgatagatatgacccaaataaacagaccctcttaatatttaattgtgtaaaggtgttctgagaccaaaaagtttgataactgctacttctttgtgtctggcagaatgccttatacatagcagtaaatcaatatatgctgaatgaatgaatgaacaatagaaccagatggttcaaatcaggaaataaatgaagtgtggtggtaataattgaaagtattgaaagggaaggttaagagtcattgagaaatgatatctactatgtgtttgtgactgtgattcctctttgttctcccagagaacattgatgagggatagtggagtaggaatggttttgttggggtgagaggaagagcaggtcttcctgactttctgtctttgctggtttcatgacaagtcatgaagaatgggctagattttgctatagtgtgagctagccccaaacatctgtgtggcctaacaacacagaagtttctttcttactcatgctactatatgtgtaatgtggatcttcaggggtctctgctcatcattgttagttaggatcaggctaatagaagccttctctcatctgtgtttccacagtcaccgtagcagtaagcaagggtcatggtgactcacaagctgcctcgtaaagttctgcacagaaataatacatcatgtttgtgtatatttcatttgacatagtgagtcatgtattgtattagtccattttcatggtgctgataaagacatacccaaaactgggaagaagaagaggtttaattagacttacagtttcatgtggctgggaacgcctcagaatcatggcgggaggtgaaaggcacttcttatatggtaagagaaaatgaggaataagcaaaagcagaaacccctgataaacccatcagatctcgtaagacttattcagtatcaggagaatagcacaggagagaccagtccccatgattcaattacctccccctgggtacctcccacaacacatgggaattctgggagatacaattcaagttgagatttgggtggggacacagccaaatcataccatgtgtccacatctcactttgaagaatgattatgctaccatgtgccctgaaggtggagattcagaaatatttggtgggcagcactaatgactaccacccagtcacaaaaggaattataacttgactttggagtgtgctcttcttggcaaggctgagagcaatgtgaagttatggaaggccactgtgcagaaaatctcctgcatactcttacaatggaggatgagggcttttcacataatgagggagggttgccagttcaaggtctactgaagaactggtgagactgtggttttacaggagacttctgaagtatactacattaatttgaaactgatagacagtctttcatgcaaatatacagtaaagcactcttattagaccaaacaatgtctggatttaatgattggagacagctcaagcgctaaatacttgaattcgtttgtctgtgcacatgtgagtgagagagacagaaggaaaagcaaatgcagtattccagctacagatatcaatttcaaagttaataatgaaatttctttttggcagcaaactgtcgaattttactttgatgaaaattgctggcaaaatcttcagaaacgaggcttttctttccatggtaagctgaatatttattgtgtttagacttgtcctggtaattcagatctcatttctactcctcttaatgcatcctccacctcaatagatcctcattcatccccttgtcaggccaaaaagtccctgtcatcttagacttcttcttgcccttcaccctctgtacccttcagtaaccatactcttctgccattttacttctgatttattcccacccttccttgactattacaactgctctaattcaggtttttatcatcatctcttgtgggaccacttgaatatcctcttgttttccacgccttcactctgacttcttaaaatccatctttcacaactgccagaaggatctacgttatgaacgccacacatcactccctctgctcaaaaacctttagtgatgactctctatcatttttaaactcaggttcatgttccctagcctggctaatacttataatgtcaagcctgagttctctagcctgtggaatgcttttgaacttggtctctgcctaacgccctaatcatctcttgccattcccactcttgtactacaagctcttgtaatttagatttctatatacttagatcccatgccttgcaatctctctatcacttattcatgctgttccaattgccccctcttgatgtgactaaatttaacctatccctaaagctcttatgtcccgcaggagacttttttcataactctcatcatctcctcctcctcccatcgcactgcacaaataactctcccttatttgtgctctcataaccccaacccccttcccccattgacttatcattatacaataatacaaatatgtttccttcatcattggcaaagtatctaaagagcttgagcagaacccattcagttttgtattcttggtgccaaacataatgtcacacgcttagacaaacattctgaacaataaggtggttccatttttgtttttgactattggacaaaacagagtttggagggaacgatgacgaatttctcaaattcatctagatttctttatttgtatgaattagttttttttttctggtggtggtgatggtgatatgtggagctgttactgggccacaaattgtgattcctcttgcatagattggggcttttttgaagaaactgatttgttcctcatccagggtctaacatagggcctgatacacagacacttcataaatatttgttgactaaatggacacttaacctgaaagggagagaaaagatgaggtaacgtaaacctagagcaggaatgatttttctaaattgatcagattttagtcttcatatcgcccaaaaaactgaccagacacagtgacatgagggaagctctgctgcttttctgtggctgctgatagtagtagaatttgagaattagattctttggttagggccttcgtttcttactgtctagatcattctatccatgactgagatatcacaaacagggcaactatgactactccagctatcatttattacaccagttcccacaaaacatttctctgaagtaagcatcactcactccttattacagatgaaggaactgaggctcagtgaagttaagtatttatggtagtcattagggctattcaccaatattccaggtctgtctctttctgggcaggtatgaggaccctacgtcttcaacccacttgaagttaggtgtgagctcatgactttctttggccaaggaaatgtgagcaggagtaatagaggtcatttcccaggaaagctttaaagagaatggctgctccatgcatctgggtcctggcctgaggacataaatgcagaaccaacccccagccaatccacaatggttattatcatgagtaagaaataaatcactggtgttttaagccatgagaatcaaagattgttctactgtaatctagcctatctgacacggagtgtttgaggtcactcagttagttggggggaacagggtttgaacttgggggtttagactccagatggcacatttccttgctattcctccctctgcttcttgttctctctactctcaggtttccttacttccagccacagatgctgctcttgtctgctcataagaagtgtagacactgatgagtcagtattttactgtttcaagtcagaaaatgaaatgcctggtgtttctcaatgaaggacaacaagtcggcattctgaagtgtaattttctgcaatggttctgttttctgagacccattcttatcaatcccaggaaacagctggagcacacttactattatgggctgtgatcagcttttgcctcagaaagagccattcactgtgatgcaagcagtaaccatggttacaaatcgaagtgcagtcttactaggtgaatgtagcagagattcagcatccttttcgaggatgaagaacaggatcaattcaactataatgacaagcttttccatctgtaaatgtcttgctttaaaaatcgattcttctagcacacatttaagctagggtcttgattttgggaattgctgtaggtttcaaggttgaattatttctccattttcctgagagcacctttgaataatttttgtctgagtttctagggaagtgtctagagcctgtaagaaagtggcacttcctcttacccagatagtggctcaggttatatttgttattattataataatgaccaagagagctgtgactgttgtcttcagtaacagtgattatcgtaacctcagattgggaagattccttctccctttagtggcgataattttatcatacccagttataggggtagagttttggggagtatactaattcattcagatcatcaattcattcattcatttaaatatttttgagtactattctttgctcactactcagctaggtgctgggaatttacaatgattaaggcagacacagtccctatcttagagagctaccagttagacctttttttttggagacacgtctcgctgtgtcacccaggctggagtgaggtggtgtgatcttggctcactagactgtttttgtttgtttgtttgtttttaaccaaggaacaagtgatgtttatgataactggactagtttactggataaagtggagcttatcctgaacaaagtgagaagtgcttgtagagagagtggttcacatctgaaggaggagaatgagaacgtagagaccgtcgaggaggtcgttaggtagtgagagatctagacatggccataggagtgttgattaaaggaactggagaaaaggcagcttagttagttcatgagagctccctcaatacaaatatttagaggaaagtagactttgggtgatcattttagtgaagaagatattttattgagactcctgatgtttttggttaaggagtgaatgtaatttttatagttcattgattttccaaaaaaaaaaaatcaatgatgtgatcgaagttttagttttcccagtttcaggctggcgaaggcctgttggtgaggatatagtcctcttatatgaggaagcagggttttttcttcaaaggacctttgtacactagttttattgggagggatgaggactgcagggaccaatgagggccttgtcatgaacattctaagctaagcctgggaacatatgaagacatacattatttctaaggtgactaatagaagctatacatatttaagtgaaaactagctttttctgagcatctgtgtacttgggttggcactctgaacacaatcctcacgctttttcttggtctgtgcaaatgctactgcttacctgggatattgaaacagtttaccacataaaaatgagctttattaaaatgaaatggatcacttcattaagtggcaggcttcctgtcactcaaagtatgtaaatggatattaggagactggctatgtataatgttataggagggaaactgcttggatgagaagttggttagatgagttccagttgccctttaactctgtgattctatgagccacatctacaacatacccagtctccagagaacccaccttgtggggtatctaaactcattgttccactgtgttgtgttcctggtccagagataatgtacaactgtgggaaagttctagtagtgctgtactgggggaatttctgaagccaaagttttgatactgattctgatatgaatttctttctcattctttgcttttctctttaccttggttcagcagaaaatggatttttttaaatgcacctttgcccactggcttaagcaatctttaactagtataactaggcccagtgaagcattcccacagctttttttgcatggtgattcatatattttaccacttgctctttttttcctaccgaattcattctccacactgctttagtagtaaatataggaaagtatatattgccttcaaatcagaatgacagatactagaatgagctaagaccatactttcctcaagagaacattagaaattaccattaaagaactttctatatccgtgatgtatatacataagtaagcgaggtacttactgcattgatttcttaagtaaataattactaatgacctatgcagtaagtgagacatctaacatttttcctagaagctcttgtattggtttgcctaaagtcatcacataccctctgtatgatgaataacaactacatttaggtctcactccttatttcttaagtcagctcaagatttcaacccccacctcaggatatgaattagaactgcaacctctcagttctctgaactcattttcttagactagaaaattacaaatggtgagtatatgggatcgcaccatggcaaatgtagtttactgtttcgtaaggatcttgagttcagagggatttatgcacatgattacagggcaaagggaaagagaggaaaactaacatctattgaacagctgagcaagacacttccacatgtgtttgcttgcttaatccttatgacatcctgataagatatttttatttccattttactaccttttcttattttgtcttttttcatgatattaataacatattggcataattctttttatatatgtctttatggatccattaggcccatccagaaaggagacgtgtgagccaccatgctgtcttctcctctactgcccccgctctgtcgccttccagtcagaaaaataatgcctgtagcaggtaatgttaggcaggtctgtgttgcagagccaaatatcttcaccaatgagacttcttagaactagataacttgatgtaatttaggagtagcacagtatcaaccaagagctgcaagcatctcagttcagcttgggcttttcaataagaaggaaatcctgtggctgtcatagctctgaacagaattttccagagtaactctaggatcacttgaggtcctgaagctatcacatcatttggaccctagatggcactttagctgaattgcgtaattaatctctccaagggggagaaaatgagtatatgagcaagtgcacaatgggacaggttgtaccctacctctcttctttctcagacttacagcactttggtctacagtgtcttcagggtcacttgggtgaaagaggcattatgggtccagaggtgtttgtgctcttcttttctggaggctactgctagagttgtgggtgtcctatagtcattgattgctaagagtgtatcacttaaatgaatgtgcagtcagcaagacctgaggagtttactgcatgaggaagccaattgaatggccttttcccaagtcatgttttgtgagctgtaaatctagagcagtgaggagggggcttgaacccaggaggttgcagtgaggccagatcacgccattgcactcaagcctgggcggcacagcaagactccgtccctcccaccaaaaaaaaaaaaaaaaaaaattacctcatttgtacacctttttccttcaaatacatttgtattattatttctaatccattattaattgcatttgtaattttaagtagtaaacctatgtctctattttttataatttgctacaaaaacctatttttgtagcaaatattgacagggtcttttgacttcttaccttgtgaaaaaaggatgtaggagcatcacacacagggacctgttggggagtagggggttaggggagggatagcattaggagaaatacctaatgtaggtgacagtttgatgggtgcagcaaaccaccatggcacgtgtatacctatgtaacaaaactgcacgttctgcacatgtaccccagaacttaaaagtataataataaaaaatttaaaaagtagaaaagaaaaactaaaaaaagaatgttagcatccctactctttgctgcccctctttttgctgcttcccttctagacttctgtcattggtgcttgtactttttattgtcaatataggttagatttatatatatatatatatatattttttttttttttttttttttttgagacagagtttcactcttgttgcccaggctggagtgcagtggcatgatctcggctcaccacaacctctgcctcccaggttcaagtgattctcctgcctcagcctcctgagtacctgggattacaggcatgcaccatccgacccggctaattttgtatttttaatagagacggggtttctccatgttgatcaggctgctctcgaactactgacctcaggcaatccgcccacctcagcctccgaaagtgctgggattataagcgtgagccatcacgcccagcctttagatttatattcttgtctcttatctataaattttgtgctttctctatcagtttgttctaatgttagaaatacatgaatagaatttatatcattatgactatatgaatatggtttaccctaaagctgtgtaatgaactgtaagtacattttcttttgggtagtttttcttaaatatggagttttagattgcattttaaaaattgcctattgttactacattcctaagctctttcaatatctcaaggatactgatacacctatggaatcccttgatatctccttgcagattcgcccctcctgttagctcctctcttccctatgttgccctcctgctttacgagactgattgctttccacatcactgcacagtggacattctggcattgactttcattgtcatcctgcgttggagaccatatatctctttttttcttagttaattccctcattttgcttatcacactgtcagtaactttgtataaaaggacaaattaaggttaaaattttttggagtttttttttttggccccagcttttctatatatatttttttcatgctcaattgatgatttggaagcatatagaattctttattgaagacaattttcttccagtcctttgaaatcatgttcccattatcttctaccattctgttttgcttaagagaattccaaaatctgtttcttgtagcttttcctttctagatagaacacttttggatttttattttcatccttagtgttattaaatttcacaatgattcatctgcatacaggaatttttaaattttttttggtttattttatttttccctgggtgtccttgtgatctgaagaaatatgtcctttatctttggactcttgaattctctttgataatgttctgggatattatattctctttgataatgttctctctacaattttccttgttctggcttagtagaactcctaataatcagatattggggttcctggacctcttatctattctcttatgttttctggctctttgccccttcttcccatgctctttggaaaattcttgttataatattttctaacagttttattgaggttttttcttttcttttttttggctgtatgtataatctcatacatataggttttaaggtaattattggtctaatctaaaatcttttccttgttctatttttcatagcagtctcttcatgttttgtggatacagtatcttcttaaatctctaaaaactaattagaacttttatttcaagttttctaagtgatatttcttttttggaattcttttgcctgcttttttctttaaggtatgggttttagtctttgacttcctctcttaaaccactgatggtgctcaattgtacatttgtacttaaaaaagaatatttgctttaatgtaagcaggaggcataattctgaggggtgctctaagctcaagaattcagaagactttgctgtgagatacaaacacctgtgctaattgccctggtcttttctggatacttcttgagcagagccctgcagtgtaaatgctttggcttctgggtattctgcccaatggggtagtgttatactttcttgaatccatccctttccttgaatccatcctttttagcctgtcccttactcctgcctccattgtacttggcagattccaatgtgagtttcttcagagttttgcagggaagatgttctcttttttaactccatgtccctctgcatggagttttacactgacatttctaaatagcataaatggtgtcatgttctactattctatctgctcttcttcttccagaaagtttttggagtctcttgtctatgctggtcttctatctgttcttttcattggtgtggctttatacttttgtaaaaagtgtttttttgtgaatctgtcatttttaaagtatctaggaaggttgaagagataaacccagttactatgtcatatactaagtttaccattttgaagtggtaccctacttcaagtatttatttatttatttttttgaaataaagtttcactcttgttgcccaggctggagtgcaatggtgtgatcttggctcaccacaacgtctgtctcctgggttcaagtgattctcctgcctcagcctcccgagtagctgggattacaggcgtgcaccaccacgcctggctaattttatatttttagtagagacggagtttctccatgttggtcaggctgggctcaaactcctgacctcaggtgatctgcccgcctcggcctccgaagcgctgggattacaagtgtgagccaccgtgcctggcctaaagtatttttaatttggatgcctcatcaaatcagagaattcttccactcatctgaatcagtaaaattttcctatgtcttggagctgatgtctacatatatatggaagagagtagaccaaacttatctaaattagacactgtatgtgtccttggaatgatgtggctgcaggaacctactgaagatcctctttaccttggcttagggacatttactgaaaatcactctgggtcagtgcctgtttggaatgaaggcagcgagatattcatttacttctgttatgttacaccgttgataggttttccctcttagcctttaactagctagcataggcttgctgaaagtactattcttttctctttctgcttttgtgagataagaaggtcacaaattattttatatggtttcatcacattttggggagggaataatattttcttcataattgttgtgtgtgtgcgtgtgtgggtatgtgtctatgtatattagtgtgctcatgtatgtgtgtgtgaatatgagacagagaaagagaactacaatcacaaatactataatcacagggaccacaggttccttgaagtacattatagggacttttttatttagtaaattttccagtctttatatgtcttttgaatgctttctcagctgagtggagattttgtatgccttattaatgtatgtgtttgtgagaaagagcatgaaatattttttaagaaatgaagctacctattatattatattcattcattcattcattcattcattcatgttggggtcttgctttgttgcccaggctggagtacagtgatgtgaccatagccaactgcaacctttaactcctgggcccaagcagtcctctccccgccccactgcctctctagtagctgggcctacaggtgtgcaccaccttgctcagctaacttttaaaaaatttttatagagatgagccctcactgtgttgctcagggtggtcttgaactcctagattcaagtgattctcctgctttggtctcccaaaatgctgggattacaggcatgagccaccatgcctggcctaacctacctattttagatcacaataaaaattatatccagtgtaatattattagaataagactctcaatgaattagagcattttgcttttgctggttgaaattggaaagaattagaagcggtgaaatttttgtatttgatattgagatgtattagacctaacactgaatcttgggaaaggcccagagagtagtcagaaaattaaaaaacaggaatgaacagggtctagggaattgaggttaaatagattatcaaagggactgtagataacaaaggtcccaaagggcagggaatggcttttaaaataagagaatagtatttatgaagcctaattgatgcaggtatctgtgatttgacctctacacactttcagctctccatataaggacatcctctctattatctttatcccatacattaggaatgacatcagcttttggcttcaactttactcacatactttgatggttatctgggtcttttgatgtcttattttctccacatttgctccactttccaagacaatcatatgcttcgacttattttagtttctcccagcttttctctaccccagcctctcctttcctttagctgagatccttacactctgccttatttctcctccatcctcacatcctcattccttctttgcagggaatttctctttttcctctttattgcttcttcttttccctctgctcaacgacaggctttgggccagtttggcagagtctttcagttctgttagttctgggccagctacaaacttcttacttatttactctaaggctgtccaagtctgaaggttcttggagtgtgcacacagcatctccctccataggaaatggactttgcacagtagtgtttatagtagtaactccaaatggaggtaaaatgataccccatcactattattcattcacaaagtattaagtgccactaatgccaaggtctgaggctataactacaatcaagacaaaccaagggccttggctctaggctcttggagtttacattatataaaataaaaacaaactttaaaaatattttaaacaaaacaaaacaattaaaaagaaaataagcaaaaatacccaaactgattttttcttagttatgaaattcctccaaagggcaccttctgactgatgatatgtttataataactttccttagtctaatatttaaaatatttttgtcttttatttagggtgtgggggatggaagtgggttggagaccataatgacatgcttattttattttattttttttcacgggatggggaagctcttaataacctgttgctgtctaaaactaggaaactggtctgacagaaatccaaactctcttttagcctttcttctagactttgtcaatcaaactcattgtaagcatcctaagtgatttgttctctttgtcccattttattcctgtttttagtgagtgaaatgggaagaaattagaactgaagtaacttgaaatatggaaaactaacatagaaataatggagaataggctgtatgtatattgtggaattttgcaaacacttgactatggctatgaatgaagacattcagaagcctgtggtgtaattcttttacaattatattgctgctgcctttagcatccttctttgccacagagctgtggtttgtgacaactatttaattagaatggcaaacagagtggctaagttcaatatttccccccttcttttctttatgaaaatgagaaagtagagtaataccatcttcatttttggaactgctaagttggaaaccaggaacataactgccttaaacctctgtagtgatgttattctgcacataattggcatgaaaatagaatatattctctgtggttgtacattacattttctctttattagccatgatgaagtttatgtgtttatgcaaataacacagagagataagtttccctctcagaggcagtgagattggcattatgagatccatgtttacattatggttttaccacttgctatgtgaccatgaacttaacctgcttgaagttcatttgtttattatcaagtggtaataataatactaacctcacagtgttgatatgaggattaagtaagataatgtgagttcaggtacctagtactcaaaaagattagttgaccattactctcgaatatagacattttctagtaggtttgttatgccaacaaaggaagaagaaagaacatcaatgagtcaatgtgggtgtagaaaacattaacatacattattctgaaatgacatttattgctagttttatggtcccaagcaatgaaaatcagacccatacctccaaatattctgacaagaacatgcagatcctcttgtatgtctattacatgtaagttatcttagttattttttgtgctacaaatgttatttattcttaagaataaaaaaagattcaatttatttcataggccatgagatctttgttttagcttgtccatgggttctctattggctcattatggaggtatgaggtgaggaggacgtttatgtgtcattgtattacattaatatgtacacattcaaatatcttctttctgtgccatagattctcctcacccctttttattgtaactaatagttataattgcaaaggactttaaattgctacatgtgtgctaaagaataacaatgattttcaaacttagtacagaatgtaattaatttttatagcaacagtatgtacctgccaagtgggtactttgaaaatgaagttgtttttgattgtgtgaaactgcttgaaaatgtgattctccaaagctttctttttcttatggccagaaaatagtgatatggaaattaattatgattatgcacttgagactggttcttcttctgcttttattttctttttttttaaatgaatcttaaaaaacacaaagtttctttggaccaagaacaagcataagacatttttacaccctggattttaggtggaaaggtcctgctggttgtagctttgagtggatgaaacaccacttgcccaagaagcaacatactttagggtacacttgtatttcacctttttggtgcaaggtgacatttttctctagcatccttacttgctcaggattgcagtataatgtgtttacattataggccaaaatctaagtagaaagcactgatttattctgacaatatgtcttctgaaatgtcagatgtaaaatattcacaagaacgttgttaggaacctgttttccaacaccttcccaggttagcaaaaatgccacacaccaatttctaattcccatgtataatctggttgataatctcttttggtcctcatctttttcttcttggatttgggtgatatgtttctggaaaaggctgattaaacagtgcgtttccaaaacaaaattatttatttggttgtataggtgaggattcagaggaaaagccagataacctctttgtgtgtttatgtggcaaggatgataagttaatgatttgcttgaggtatgatagtttagagcagtagcttggggagggcaagattattagaattatcctctggcgatacccctccaacgtatatacttctttcaacttagattccaactagtatagatactgttaagataactggtttatttagagtagtggttctcaatcttcagcatgattcagaatcccctggagggcttgttaaaatgcacattggtgtccacactccccgctcatatccagagtgttgatagaattggtcaggcgtattcaaagaagaattggtactaaatcttttgacactattccacaagatagagaaagaaggaatttcattctgtgaagccagcgtcaccctaatacccaaaccaggaaaggacataatcaaaaaagacaactacagactgaaatctttgatgaacatagatgccaaaatccttaacaaaatactagctaaccgagtccaacaacatatcaaaaagataatccaccatgatcaagtgggtttcataccagggatgcagggatggtttaacatatgtaagtcaataaatgtgatacagcatataaacagaattaaaaacaaaaaaaatcacatgatcatctcaataaatgcagaaaaagcattcaacaaaatccagcatccctttctgattaaaactctcaacaaaattggcatacaagggacgtacctcaatgtaataaaagccatctatgacaaacccacagccaacataatactaactggggaaaagttggaagcattccctccaaaacctggaacaagacaaggatgcccactttcaccacccctcttcaacataacactggaagtccctagccagagcaatcagacaagagaaataaatggcatccaaatcggtaaagaggaagtcaaactgacactgtttgctgatgatatgactgtttacattgaaaaccctgaagactcctccagaaagctcctagaactaacaaaagatttcagcaaattttctggatacaagattaatgtacacaaatcagtagctcttctgtacaccaacagcgactcaacggagaatcaaatcaagaatgcatccccttttacaatagctgcaaaaaaataaaatacttaggaatatacctaacgaaggaggcgaaagacatcaacaaggcaaactataaaacactgctgaaagaaatcatagatgacacaaacaaatggaaacatatcccatgctcatggatgggtagaatctatattgtgaaaatgacagtactgtcaaaagcaatctacaaatttaacacaaactctatcaaaataccaccataattcttcactgagttagaaaaaaaaattccaaaattcatatgggaccaaaaaaaagcctgcatagccaaagcaaggctaagtaaaaagaacatctgaaggcatcacactacctgatttcaaactatattaaaaggtcatagtcaccaaaacagcatgatactgttataaaaataggcacatagaccaatggaacagaatagagaacccagaaataaacccaaatacttacaaccaactgatctccaacaaagcaaacaaaaacataaagtggagaaaggacacccttttcaacaaatggtgctgagataatcggctagccacaggtaggagaatgaaactggatcctcatctctcactttatacaaaaatcaactcaagatggattaaggacttaaatctaagacctgcaactataaaaattatagaagataacattggaaaaacccttataaacgttggcttaagcaaggatttcatgacgaagaatccaaaagcaaatacaatagaaacaaagataaatagttggaacttaattaaagagcttttgcatagcaaaagaaacagcaaagtaaacagacaacccacagagtgggagaaactctccacattctacacatctgacagaggactaatatccaggatctacaacaaactcaaacaaattagtaaggaaaaaaaaatcccatcaaaaagtgggctaaggatatgaatagacggttctcaaaagaagatatgcaaatggcccaacaaacatgaaaaaaatgcccaacatcaggaatgatcagggaaatgcaaataaaagccacaatgcaaaaccaccttactcctgcaagaatggccataatcaaaaaatcaaaaaacagtaaatgttggtgtggatggcggtgatcagggaacacttctacactgctgaggggaatgtaaactagtacagctgctatggaaaactggaaaacagtgtagaaattccttaaagaactaaaagtagaactactatagcagcacaattcacaattgcagaattgaggaaccaactcgaatgcccatcagtcgacgagtggataaagaaactgtggtatatttataggatggaatactactcagccataaaaagaatgaattaatggcatttgcagtgacctggatgggattggagaccgttattctaagtgaagtaactcagaaatggaaaaccaaacatcgtatgttctcactgatatgtgagagctaagctatgaggacgcaaaggcataagaatggtacaatggactttgggaacttgaggggaagtgtgggagggggtgagggattaaagacaacaaatatggtgcagtatatattgcttgggtgatgagtgcatcaaaatctcacaaatcatcactacagaacttacgtagccaaataccacctgtatcccagtaatttatgggaaaaacaaaataaaataaagaattgctctggtgtgagtgtcaataatctgcctttctaacaagcgtacaggtgatgtggatattgctggtctggagacctcactgtagaaaccactgatttagaggattgggaaggatttgtctctgcttcaaggtcttgggaagtcaggatggggagtttggtagggagggggatggaaaaagattgaagaatgctgatcatcttgcttagttactagaagtgttgactagcagactcttgcagtgttaaacattagtgaagctgttaatattaattacttttattaatgagaatcagagaaagttaggagaggaaacagatttgattatttcttaatactagtcttctcttcctcatctggttcctgcatttttcttggacctgaacctttctcttgctcctcatatagtataaatatagatagccatactatcactgtctttcagaaatgcgaagaatgatgagacggtatataaggtttcttggaaaagctgtcacatcaatcaagattacaattataatgaaaacctcattaatttggcttctacctattcagattttgcagcagttaggacagtgcttgggctgaaatgtgcctttgcagtatttataaagagtgcctatagcaaatcaatgactttaggctattggctaggaaatttaaattacttaatggaaaactgctttaaatttatttcagtactgccacttacatataaattatttgatgattagaaatttatcttacctatttatttacataagctattttcaacatgattaggattgctaaggcttcattgctttaggattgtataattcagatttattcacttattcaggcagaacttttactcagttagtccaaatagctggttttgtttttaaatgtcaagtgcaaaattgtctgtactcatcattttctattagtttcaatctcagcattatttgggggcattcagattgtacctagtgtcttttgtattgagtggacactagaaatctaatacctggctcaaagaagaaaatgtgcccttcaaaggggttcttttaattttgcacataaagcacattttcaaatgttattttcctttgaataatgctctgtgcttaaattttcctagaataaaacacccaaccaggtaaaagatttaagagatctaggccatgcttacttgatgaaatgcagcagagtggaaaatatcctgtcttgccagttcaaggaaattataatttttctgatctggtagttaaaaggaatgatatttaaatagctgctgttatataggcattaatttattaggggcagattttagtcttttgtgaaattatatgttgaggtctgtatctgaaggaattaaagtctaatctaaagaattatttggaagcaaatgtgaagctatgttagaacttcggtgcttcttttcaacccttgtcctcttgctgtaaagagcagcctgagtcagatcattgaggattaaggatgaatgcattactcagcaccctgcagcagttgggtcaaacatcttggctttgaaaagttaggtttttttttgcttagcaagcctagaaatttcaggtccaactgcagaatgaaagttcagtattctgttgattaacatggtctacttgaaaacagcctgtggctcttctacatgtccttcctctctatttgtgtatgatagtgtctgaaatcattggatggatcaccggtgaaccatattgacagctgctatatggtcagggagattggttcccatgtagtattccgatgacatccatcctttcacttgaagaagaggtttaacatgttaagggggaaaagaggatatacttattttattctggcaaatgggaatgcagagaaataaggcagcctgtgataacactacattgaggcaaagagtgaggattctacatcagatgcccactaatgagaaatattcttgatccaagtgttagccagagaagggaacactttgaccaagacttttcaggttgatctgagtgagtggcatgctaggaagggctgcaaaggcctgggggagaggaggtctgggcctggcatccagggtcagctctgctgaagatgaggaaacagccgctctctgcaggcaacaggaaaaggaaaggaaaccagatagattagcatgtatgtaaagggcaatgacaaagagtgaacaaaaccaggaacaattttatttttatgcttattgtcttagaagtttctttcaaagtttagcttaccttgaaactgaaccaggcagtaagtcctaaacaaggtatttgagattttacatactttacatttaactatgtttgtactccaacctggactctggaaaactcttcagaagaatcctagtgtggttaaaagtatcatcaccatttccatcatcatctactaatgtttattaagtataccaccaaagtctttgtgttattgaaaagaagtctttaattagagtttacttgtgtttttccaggtagcccagccatgacccataggaatctgacttcctccagtctgaatgacatttctgataaaccggagaaggaccaggtaagcaaaaaattcttgcttctttgaaatgtaagagaacgtatatctaaaagatgctgagaaaggattagaggtgatggttgcttcacttaaaatggacctttacgtgcagacaacagtttgcactttcctgggcagaaggagaagcagtgtgtgaagggagctggaatcagaagggaaaaatgtgcgtttacttcagctgttgcagatgcatcacttgggcaatttaaatcttaaagcaatagttgtctcagctttaaaatagtaataatccctgccttctgtttattctagggattaaacgagataacttatgaaaaaaatactttggtaaattataaagaaatacttgcctggcacagtggctcatgcctgtaatcacagcactttgggaggctgaggtgggcggatcacttgaggccaggagttgaagaccagtctggccaacatgacaaaacccgtctctactaaaaccacaaaaattagccaggcacggtggcacagggctgtaatcccagctactccacaggctgaagcatgagaatcgcttgaacccgagaggcagaggttgcattgcactgagatcgcaccactgtgctccaacctcagtgacagagcgagactttgtctcaaaaaaaaaaaaaaaaaagaaatgctaagaaatgctgaaattgttgttaacttttgggggatactttagggcaaggtaatgacagctaagttctcactagctatatatttgtttgtctattaaaacatatagttgaatgaagagcaatcaggttttgaatatctgtttgctttctttggaagagaatatggtgtaaactgggccatttttgcccagctacgtaaatatctctgcaagaaaattatattttaagaatatagtatatggaaaaatgatgcttcctaaatgaaaaaatttcaaagttttgaagaaatgaaagcaatatatttaaaaaaatcatagaaatcctaagactgtttccccaggattgaaggagaagtagcatatattggaaagaagaaggaacatgaagcaagaaaatctggtcttgctacttgttccaaaactggctagttgtgtgatgatggacactagttttgttctttgctaagtggaaactataatacataactcacctcagaaaatcaaatatctgatccttgctcttttaacttaccattttgtcttttgatatagtagaagagatggttctggttggctccatgcttgatatgctaattgtacagttagtcctccatatccgtggtttcatatccatggattcaaccaaccatggacagaatgaaaataaaattgtgtctgtgctgaacacatacagactttttttttgttgtcattattctctaaataatacatcatagcaactgtttacatagcatttatattaggtattataagtaatctagagcaatttaaagtgtatatgaggatgtgtgtaggttatatacaaatagtatgccatttatatcagagtctttagcattgtccaattttgttatctgatggaggttgtggaatcaatccccaacatatactgagggatgacttgttctttctctttctgtcttttaagtgggtgagtttgaagattcttcttttcacactttgctgatttttttcaagaagccatattcatgatggtgttcctctttaactgacagcacttgtagtagtcatagaggtttataggccttggtgaattctagaaagtacgggaagggtgtacattccattccattctcccgtcccttcccctccccttccgtcccctcccctccgttcccctcccctcccctccccctctccctccctcccttccttccttccttccttcctccctggtagtgtcttcatcatctcagatctgaattgctagaaaagctgttggaattgatcccttgtccccattttttctcaattcaatatactttttacatagttgccctcatttttctactctagattaaaaatggttagtggcttcccatcattttaagttcaggacttcttgatgacctttatgatgctctgaaatctgatgttatccgtcttgtcttcatttattcatttgtgttccccagaagagggactctgtttaggtcaggactaatttctttacttacctcccactttacattgagataaattcttgactccttcagttgctccttcagatgctaatgtggattgtcaccttcctttcatctttctacctcttgaaatgatcaggaagaagagcatttaaatatgggtacattggtagatacatacctgtagtggaaaagggagaactcaggccactagaagttttcttaaatttatttcgcacattttgtctccactcattgcttaccaagccatgctgattatttgcaaggtttgccatgagtcttaatactggttaaggcagtgtactaattagcttaggaatatcttgttgatggagttcttgaggaagccttcttttattaagggcagctctccttttgccaggaatttggcaagaagcagctggtaaatgctgacagataaatttactaacttattgggtcttttcatatctgggcatatgcagaagaaatctgatggcttaagatgcatattacataaaattttgattccagtagtagaagaaatatgtggaacattttttgtgggtattgattttgttataaagcccatgggaatggagtctttaaaaccagaatcttcagtgcctatcactagcatctcatagtcatcaaggttcatgtttagatgaagcgaggaaaatttaattcaggaatgttccttttgttttcaaagccagcaaaggaaggttgatgaatatataattataagaccaactattaatctaatttgtatctattacagtgtatatagttaatccaatgagttcttcaagaaaggaagaaactccattctctcttcctaccagagtttgaagagaggcttttgtaactaattcataatctcttctacaaccaaaggtacaggtacagaaatcaaactaacattttcagtttctatacctactattttggtaacttcaaatacaaaaactcctggatcattttagggcaagaaaaaggaaagtggatttgcaagtaagatgaagctgtgataaactctggcttttatttttttttaacctgtttcttctctgtttggacaggaaagaaaaaaaaaggtttccaggcttatgtttgttttgagaaagcttttataattaattagccagtgtcctggaagtgatcttggcagtaaactcaaacttgtcttgtgtacttgtccaagttggccccaaaaacttccatttgaccaggactgaaatttctgattgactgattattctgcctggatacaatttgaacagttgtgatggtgccttgcaacttcctggagctacctaacttcttagtagcacaaagaatgggttcagagttatgaagaggaacagaattgctctttctgacagctacatagtgacagaatttgagggcatattttttatgagattctgttttgggaaaacagaagaaacaaatctgtgggctgcactttttctttctggctttgccaagcctatgtgcttacgatttcagtagcggctgctttattgaaaaatggcttaaaatagttaacagcagaagaagagcatagccagaatttaggtgattcaatgcttcaaccatattccaacttggatgttatatttattaagcagaaaaacacctgtggagaagtagatttaaaaaatacatctggagttcatctagttgtaaatctacataaataatctcttctattttgttgctatggagtatttttcacattatctaattatgtttcttgattgcctttgatttgcttttccatttcttcttattctttttctgttcttttaaaaatttacatgtgaggtgggtgcttatcaaatgcagtggatttagttacagttttcatgtgaatatggcttcagctatgaggataagaaagagcttttctcttcattttaccccttagctttaactcttgtagaaatactgtgcttagtggtgcaatggctttaaaaatgttgactttttccaggtttattaataatgctataacatctcacaattacatgtcaacctcaagtgaaattgtagtctgtagattgcagtggatgcagtagatgtagaaatagcctgcagattctcagggggacacttgaggtctacataaccttgtaactgcttatctggttattatttctgtgatattcattatttagctggctaatctgagaatctattccataggtcttgtggtggagttttgcctaaggttactttctaaagcatattagaatcatttttagcactgtctgttgcctattatgtttaaatatattttgctgccttgattcttgtgtttgaagtcttggtcttttaaggaaatagacctgaatttaaatattttgtcagaaagtatgcggatgaaaccattaaccatgtataagtttaaagttgctaagccataactatcttaaaatgaaatctagaaggaaacatcctgtgattattgggggaataacccccaatccttttcttacacatacatgatataggagtgagtcaaccaagtccactgagatgactttttctcatgattttgaacatagatttccatcccagggctcacataaagcttctcttagcattaatagttatttcatgctcacagtgaaggaaaagtacaaaagcacctccttttcctttccatggctcagtcaaaaaaacctacagttcacactgaatgtgggtggtcttacttcacccctcagaggaggtacagtgtctaagaaagattcatattttctgaggttataataattgtctttagcatgttttcagggagcagtgagacattgctgtgttagaggagctccagatggaatcacatctgtgaaaacctaagaacaaaggcatgttgtgagaaggtagttagggtacttagaggtccttagtcactacagttttggtgactttggtgagcatctctctggctcagcacctacagctttccttcagccaggtgtccctgaggggaacttgtgtagccatgcaatgatatccttgggcccctttcacagggaaacagcttgtgcttagataattaacaaaacatgtctgtcattattttttccctgtctacaagaaatttggcttaagatagcttccttttcccattctatgcttctcccatattcttaaagcttaaacagttgacagggattagtagggtttgagaagcattgatattaatactgatttaaagaaggtatgtattttaaaattgggacagttgcatctccgcatttattaatgttgtacattcttaaaagctatttgtctggaatagaaaactagcattcatttaagaacgggttttgtatcagctttaaactgaagtagatgatcctgtatgaagtaaactgaactctatctcgtgtattattttaggaaaaaaggagccttttgtgaaatttagagctatggttttaagtaactgcgctacaataaatttgaactcctaaaacaccccatcactgcatgcagctatgatttgaattcattcattcaaaatgtatattctgtgctagaaaatgttcttagttgtgggttccagaagtgaatgaaacagataaatcttttgactcatggaacttccatacttttgggaagagacagactgtaatcaagaaaaacaataaatacataggataatttcacataatcaaaagtgctatcttgaaaataaagcagggtaatgtggagaggtacaggaaaactattttaggtaagagggttagccagtaaggagaggatctggtgagagaggtttctaggctgagcaaaaagcaagagtagaggcctaaggcagaaatgaagatgatgtgttcaagaaacaggaaaaaaaatatcataagtggctggagcaaatgtagcaggtgtgcagtggtagacaagtcaggaaaataggccggaggaccttttattttattctgagtgcggtgagacactctcttaggatttttacctagagtttgtatgttctgatttacattttaaaaagctcactggagatgcaatgtgataggatggagaaatttgtgaatgtgttggatcgtctggtgttattcctatattaagtattgtatgaatatcccagtgcattaaaatgagagctcacagacccataagagcccatttcttaatgtgttagccatagccattaagaccttattactatcagcaaaggaagttcttctgtgccatagaaatatcgtaagaaagaaaaagagtttcccagttaaaaggtcatccatgtactgttaattatattacattattaatgagtaaatattaattattgaaatatttaatgcactagaagtgggtgtaagccaccaagaatagtgagattgaatttttgagtaattatatttgcacctgtggtcctcttgttattactgttggctaacatgaggcatgccaactggctaatgacacatgattcatgaaagcttcactggagtcctctctgaagaatggtaacaggaaaccttcttagtctttgtggttcagaaaggagcatcaggatgtgtaggaacaggacagaacagccaaaaaggggctctgtgccacattcttacctgttcctatgaaagaattgaactccgattgcactgcatccctgtattcaacatttaaccaaagaaattgtagctattgcatatcttaataaactggcatgttttacatttgatgtcactttttttctcttttcaatatgtagcattctgccagtatgccaataccaggaatatacctagaatatatttcagagaacagtagcatgctgtcaacaataatctttgatggacgtatactctcacatcacaagttacttacatctgacagagacttcataaaagaaacgagcatttttcttcttggaagtggcaaattgttacaaaaccagaaaacagcaataccttgtgatgaacactcttgagtacagtttttaaaactttatagaaattgtaaatatatatagggaatcattctttttttttctttttgagacagagtctcactctgttacccaggctggagtacagtggcacaatcttggctcactgcagcctccaccttttgggcttaagctattctcttaccttagcctcctgaatagtggggactacaggtgcacaccaccatacccagctaattttttttttgtgtatatatatataatttttttttgagacatgcagttttgccatgttgcccaggctggtctcgaattcctgggctcaagcgatctgcctgtcttgaccttccaaagtgctgggattataagcgtaagccactatgccccacccatggaatcattctttacttactatagtaacatgttattatccacaatattttttaaaactttagaattttctgattcaaaatatacaacaatgctgtaaaatttaaacaaagcaaaaatgaataaaataaaaagtgaaaattcttaaattaaaatccttcaaaacaactgccattagcagcttgatgttgagtttaatgaacttttctgatagatgaatacttatatatttctatataaataataaaaatgtgattgtattgttctaaaatttgatttttttaaactaacaataccatggacacctaccttattcttcttaaaggctatatagtatatatgaatcgtattttattgattctatcttctatgactagatattttcagttctttgctgtacaaataagcctttaagaagtatccttattgtaatttttctgcattctttcatgagtatttctggaggagaaatttttataagtggaattgctggattaccgtgtattgcgaatttaattaccttcccaaaagattatatgagttatgttctagatctttaaacactttattgaatccgcctccactgctaagatactatttgctggtcagatttgagtttattctttatgtttcactccactaaaagcttagtgattcaaaatgaaaagaatctcagtatctagcatttgcctcccagctcactttgggggctttttgtcagaagcttaaagtatagagattaaaactgagtttattttcctgatctaattggacgtccgagctggctaatcacttgtattctgaagtaaggaggtgaaaagtgcagtggccatatacttgctttgactgaagatgttgctgttcccagctctgagagggcttttcaggctctgtgagaatttccttggcaaccaaaaaatggcttcatctcaagagcccttcttggtggtcagcatttggaacaaaaagaaaaattgcaaaaagagttggacaagtgttccctttgaatattattcaacacatttgcagcttggatctacatctccttcctttccttcccccaacccccaagagaattttaaatgcatatatgccagactgtaaagttagttaaataaaaagttttataccttatatggagtgctttattaggagctttgaaggagtgttgtcaactgaaatggctaataaaaagatgagccaacacttttttttttaacatgttggggcatatttgcagattctactgctccccaatttccctcttaatagggaatctctgcagagtaagtttatgaagaggtcacaccatgggaggaagtttttcctgttcttctttagaaagagaagagctccccactgtttctagctcacttgtctgattgatccagtggctggttgatttatgtgtctcagcagaatctcatgaccttatcagtcaccagcagagcttcctggtttctccatgtgttacccaccaatgggctggttttacttcctagaactgaactgaaatgaaaacaatgattcttttttttttttttttgccaccatgttaaaaggacagcagtaatgttttctacaatctgaaagccagtggttaatcatgccaagatgacattcctgactaatcagtgttccatgcatacacatataagagggtaggaagtaactgagtcattgcatagggagtgattgtaagctttgaacttcaaaattagctgtactcttcatcattcagtagctgtatctgatagtattgagtctattgctacgtaagcaataattaacaactagcatagattggacatctaattacaactaatgctttggggttggtactgtcaactctatttgacatattggcaaactggaggcatgaggagattaagtaatttccctaaagttaaatagcatctaaatgatagagctgcatcctggtcctagtgcctgtgctcttagtggatataatgagttctgcctagttggattagggtctttttaggtccctgaaagccactgtggaacagacacgtattcaatcgaagtttctggcttttggtttgtctttgaggcaaacatcatgctgaataggctaattaccagaattactattaaaaatgaataataaaaaatttttaagggtcttatggtgactggatggatgtttctgctgccacaatgattaaaatactcaatgttatgtgctgatactctggatgtcattggtgaaggtcagtgaaaaaagactgatataataaaaaagtataatctatgatctcagattgtgagtttatatcttagctgattattcacaccgaataaactgtggtgctgacagtgaagtgcagctggggttcagtgaaagacacaactgtgtgggccaaagccatcaatcaaagaggaaccagggactttagaagcatctttccattctagagaacaaaaataacagaataaaagagttttaaccaaataaaacattcttccttggataaaaggttaggtaagaaatgggagaaataaattggaatgcaactatctagagtttagcaatacaagtaaaagacttagttcatctaataaatggaaattattgtggcttttagaattatttgaaataatagccaaactttccaaatttgaggaaatacaacatttcaatgttttttttttttgtagttagtgtgacatgtagaattagtgaaagtagattagttagttgacttgtccacagaccacaatgaatagagagttacaacacacttaatttacagatcttcacttgtgctttgctaaaccccatggttctttgactttcaggctgttaaatattcattctcactatagatagggtcaactctagttcatttagtctgataaatgcacatcattatgaccttaaaattttgttctggtaagaggaaaaagtgattattattgaacttttttattaataagctaagatataaacttacaatctgagatcatagattatacttttttattatatcagtcttttttcactgaccttcaccaatgacatccagagtatcagcacataacattgagtattttaatcactgtggcaggagaaacatccatccaggatcataggaatagctttgaagacttaagtaagcatagtaaaccttaactcttctgaacttcagttttctgattcataatagagatattatacttcagtctgaactgctttttctactgagttgttttgtgaaaaggaaaatacttaatacacttcaaaatgttatataaatcttcatcatcattgccattttcattatttaaatgggctactgcttttttatttttggttttgctttgcagtaagatttggtgggatgaaagtccatttcatttaggtatcattccttatcttttaaatttgcattgttaatttggctctttggagttcatgctcttaacttctgctctatactgctctatccacactgtaaagaaatgtatgtccgattgtcatttcatgaatcttattgaatgcacattactcttgtacccaaatttctctttttctctctacttttccaagtcttacctttacttcaaaacttgtcaagtgttactttttctttatatccatccttgaatattccagcttatgttaactactcctgttttgaatttccaataccatctagtacttattattttcatcactgatgtggtttggctgtgtccccacccaaatctcaacttgaattgtatctcccagaattcccacatgttatgggagtgacccaggggcaggtaattgaatcatgggggccagtttttccttttctattctcatgatagtgaataagtctcatgagatctatgggcttatctggtgtttctgcttttgcttcttgctcattttcttttgccaccaccatgtaagaagtgcctttcacctccctccatgattctgggcctcccaggcatgtggaactgtaagttcaattaaatctcattttcttcctagtcttgggtatgtctttatcagcagcatgaaaactaactaatatagtaaactggtaccagaagtggggtgttgctgaaaaaatacccaaaaatgtggaagcaactttggaactgggtaacaggcagaggctggaacagtttggaggtctcagaagaagataggaaaatgtgggaaagtgtggaacctctagagacttgttgaatggcattgacaaaaatgctgatactgatatgaacaataaggttcaggctgaggtggtctcagatggagatgtgtaacttgttgggaactggaacaaaggtgactcttgttatgttttagcaaagagactggaggcattctgcccctgccctagagatacgtgaaactttgaacttgagagaggtgatttaaggtatctggcagaagaaatttctaagcagcaaagcattcaaaaggtgacttgggtgctgttaaaagcattctgttttagaagggaaacagagcataaaagttccgaaaatttgcagcctgacaatgcagtagaaaagaaaaacccatgttttgaggagaaattcaagccagctgcagaactttgcatgagtagcaaggagcctaatgttattccccaagaccatgggaaaatgtcttcaggccatgtcagagaccttcatgaaagcccctcccatcacaggcccagaggcccagtaggaaaaagtggtttcgtgggccacacccggggtccccgtgctgtatgcagcctagggatttggtgccctgtgtcccagatgctccagctgtggctgaaaggggccaatgtagagctcaggctgtggcttcagagggtggaagcctcaagccttggcagcttccacatggtgttgagcctgcgagcgcacagaagtcaagaattgaggtttgggaacctctgcctagatttcagaagatgtatggaaatgcctggatgcccaggcaaaagtttgctgcaggggtggggcccttatggagaacctctgttaggtcagtgcagaagggaaatgaggggttggatcccccacactgagtccctactgaagcactgcctaccatagctgtgagaagagggctactgtcctccagaccccagaatggtagatccactcacagcttgcactgtgtgcctggaaaagctgaagacactcaatgccagcccatgaaggcagccaggagggagaatgtactctgcaaagccacaggggtggagctgcccaagaccatgggaagccaccttttgcatcagtgtgaaaactggagtcagaggagatcattttggagctttaaaatttgacacccccactggattttggacttgcattgaccctgtaacccctttgttttggccaatttctcccatttggaacagctgtatttacccaatacctgtactcccattgtatctaggaagtaactagcttgcttttgattttacaggctcacaggcaaaagggacttgccttgtctcaggtgagactttggactgtggacttttgggttaatgctgaaatgagttaagactttgagggactgttgggaatacattttcaatttttggagaagttcaagagagaggcagttgtaaaatagaatactagtgtggtttttttggtttttgtttttgttttggaataaatctgaatttagaatgattccacattaattagttccacaggagtatatacaggcaaattttatattggtggtattctctttcccctctcctttcttgaaaataacaagccactagccagcctgtggtagtgcattaatcattatttttacattgatacaaactattgtgattttttaagctgagaccatagaaagctgacaaagcactgtgggcatatatagcaaatgtaagacaggtttttgtgctgaaagagtgtacagaaagtgtcactcgtggcttataaccattcgatgactacctgttgcctttatgataaagcccagaatccttggcatgaccttccaagacctgcgttatcctgcctggtgtctctctccaaagcagatgtgccaggttttctcccgtcctgactttactacaaccatatggtattcttccagtttcactaacatggcagtctccctcctacctttgggtctttggacatgctgcttttgttcactgaaatgtgcttccttgtccaggcaactggtgttcgcccattatttctctgtaaatgtcaccttttcagggaagttttctgtgacacgccccccccctcttgcccccagtctttgctaggggctgctgttataagctgttacagcacatgatgcttttctaccatgacacctaccacaactgtcatcaaatagttgcctattttaatttttggctacatgtttatcttcactaataggccatttgcttcaaaattggagaaatgatatccagccatctgtagttcatggaccatagcctgccagtaacttgcttttgtatggcttgcaagctcagcaaggttacagttttaaaaagcagttaaaaaaaaagaataagtgacagatactgtatgtttgctcataaagcctaaagtatttagtgtttggtctttcacagaaaaagtttgcctgtctgtggtctaagttgttgctatacatgttgggtagaagaatgtaagtgtatttatatgctacgttttattttctgagcagggcacttcattgtaatgtggcatctatagggcctagtgatgttgctgtaagcacttagacaaactgagggccgcatgaacatcagaaggttcttagctggataaacaactgtactcgaagtgtgtcaattaatagccagtgtaaaagtggaagaggtttctaatgccatggtactttttagcatgtattgctctgctaaacaactgtattagcaatttagattaagacataatacgttattatcagatttacaaatacacaaaactgccatctaaaatttaagtaatataattaagatggagaatgatcttgacaggcttcaaaccacaggaatttcacaagagtaagataaactatgtaagatctaaatgtggagtgaataagaacgtgaaaaatcctactttatttgaacagagaatttatgactttcagcagatttagactcttcaaaggtgtccattattcagaaatacttgaggagatgtagttatggtaacagtgtagtgagatgcctgggcactaacctaagaagaaaaatagaagtaactcatccaaaacttttagagatgagaaagcttgaagggtacaaggctcatgaaagttgccttccagtgagagagaatagatttattgttttttgctccagatataaaattgcaatagcagatggatgtttcgtggaagcagatttcatttcaatataaggatgaattatataggaaattgagctttgtcactaatgtatatatgaactttttaaagtctttctttgcacttaaataatacagtaggtatcaggactacagaaagaaacagcaaacaatccctgctctccaggaggtctcattatagactgtgagatgaatcggtaaataatgtaggatgttagatgtcctagcacagaaatggagtatgaattttgtcaggaactggggagtgggcagaggtgactctgaattaactcttgagttgatgctccttctttcactataatgtaccagaagaagcaaatgactgtatgttaggaatgtgttcactgggtggggtattataaactagtcaatctttaagtaatttaaagactttgtgatttataggaattcaaaaataagaagccgactttgggcttgaccttagaacaaaggagtgaagggatctcaggtcaatatgtcagttaagtaaccataacctactggtggctcagccagaagcccccagatgcagatgaagaacccctcaaccaaacttctgtatagttgttgcctgcctttgtgtcagtgtcttattttcctcttgattccttttttctgcttcttcagtattctttattgttctaatttggtacatgttctgagacctccgtgaagggtacattaaaaaatctgctaaataaataatagcatgactactacagatttaattatagctatacagctgcctgtttgaagtgttctgctggggccatatgttcccttgtatatctcagccctggaaagacctagtttaattgtttcccagcttatagtattgaattcttaaagaactgctagcagtcatttggaagtcaatagattgtgtgttttacctcaactgtctttctgcaactggatgttttattgacaatttcttattagatcccaaataatcagatattaaagcactcatccagacaggtcttaagagctatgtctacttgttagttttacagtctgatttttgtcatcatatttgatgtgctaagtgaaaagtacttctgcatttaagcactttccctcaatggcttttttgaaaaaaagaaaagtattttagtggatgattcttttaatggttttctgtccccatggtatggtgggagcagaaatggaggaggacttgggaaagggcgcttgttgctgttctagaagtataaccttgaacatgtattaacttctctggtcctcaggagggccaaaactgagcccttctaggttccttccagttctaaaattctgtgattcagatcagctggggaacatgctcttgccagtgaaatgcatctggagaagggtggttgttccttttcccactgtggtggtctgtgcatctcttcccccttgtgcttaggaagcccaaatttcccatttcttgagccacaaaaatctttcaatatgaactctgtttagagatcaaagcctcacagagtaacagagctgtggccattcttatctgctttttcagtgcaaagatggtctaatgcagtggttcttaagcttttctcatgtcaaggatccatttgagcttatgatgaaactgtggatgctttcaccagaaaaatgcacaataaatatgaaggacaaaaagttgtgtgtaatttccaggtgcccatgcactccctggatccccatcagccaaccttaagaaccattgctctgtgctttgataagagccctgacatctctgttttgttctgagtgaagggacctgcaggtgaggttgagaacagtgaagtagagggcctaaggcctgaagcaccagccctgagctttgaatggtgccaagggcagagctttgttgggttcataaactatactagggtggagcaaagggtgggagaagcaatggaaagtgttttttccagtttctgcacaagataggcattctgcataagtgtttgtcaatccattaacttttatttatttattattttcaaactattaacttttaactcttggttgcctacattacctctggttattctacccttttaccatgcatgccttgaactttttaagagagaagtctatgttttttattagttaccccaactggggtatgtgcagaagagaatgcatgtaaaacaattctcctgaaactatattttttatttttcttgaagtcagtagccccacaatgttttttcatttgtctatttattttgatttcatatggttgttccttccataacctttctttcctaatggcagctggagtttgtggggcagaaagaataaaagaaatcctatgtttagcatctcttttttgggggtaggagagggaagactattaatagatactgctttttagataataataggtaaggccaaagttagaaataaagcatttcattttaaaacaaagtgtttctgctgaacatagtcattcaaggataagggtgtcattctgagggaatgcagatcattaagattggtgcagttatcatgaggaattatattatatttgttttacagtgtagttgcactgaaccacccatgctcacctcagtctgcagttcattttgcagccttagcatgagatgctgtctcttcaaccttctcaagctaaaatgcatgcaactatacacttggtagaatgaacttacctagggaggtactttactttatggataacatgtttttaagtctatgatacaaactggtggaagaaatttctttttaaagttcagatgattgtatatctgaattaaatgtggtggcaatctagctgtattttactttattcccttgggaaagagaaattttatttttgtcagtcacctcttccccttttttctaggattatattagaactctaatgtgattataattattggtaccatttattgactatctactatactatttcaggtactgtgctaggagcttttacctatatcatgttgtatattatcattaaccttactttacagatgagtaggctaaatgtagatgataactttgtagtcttctcagcttaactgttgcgtaggttaaactttaaaaaatttaaggcacagatatttttaatgcacagctgaattttaaatgatgtatctgtgaatcaccagtattggtgaaatatttgcttttaatgttggagagcactaagcatttgaagaaatcaaattctcgtgttgtgtgtcatgctggattcttcctgctctgtcaccccctttatccaggcatttaatgagtcttatacattctgccttttaatttttctcaaatctgtcttcaacattcagtcccactgatgctttcttgattcagggccccatagtgttcctccatttaacatatttattgagggacctattatctgctcagcattgtgcataaatactttcaaagatcacctcatttactcttcttaattccacagagtaatcatttattattcccattatacagatgaggaaactcactttaaagaaatgaagtcatttgtccagcgtccctcagctaataaatggaagaactgagattttcttctagctctgtctaattccaaagcttattcctgttttcactacttgaatttcaaacactggataacaattagcaagcttagcatggtgaagcttggactctggagacagccagcctttggtttgaatcttcgttctgccttttctagttttgtgatgttagctatatatagcagtttcccatcacctgagtgaggtatgttccaaaacccccagtggatgtctaaaactgtggacagtaccaaaccttacatatactgtgatttttcatatactgtgataaaagtttagtttacaaatcaggaacagtaagagattgacaacaataattactaataaaacaattacgacaatattgtataataaaagttatgtgaatgtgctcctactcttgctctctcacaaaacatcttattgtactgagttcacttattttcagaccctgcttgaccataagtaactgaaactgcagaagcaaaaccttagataagggggaatttctaaatctcaatttcttattgggcaaatggagaccacaataataacttacttatagaaatgtggtgagaatttaataagatgatgcatacgaagtttttggtccagtgcctggccagagatgattgatttaaaacattttaaattattattattattattattactagtaattttagaattattattgaagctctttgtgcctgttggtaacaatggtgcctttagaattcagtcttaccaatatgagattcaaaatcttaaatctggaaggaattcagtgtacagctgttctcccaaagaaagactctttttcaaaatctcactgagaaatcccggacaagggtaggacttttagccacttcagcagggaatttttttaaacaatgaatggtagggacctgtggtcataagttttggaactcgtaaaggccctttgcttcttactagcgacctttctgaagtcgactaccacgagatggagcaccgttagtggagctatcagtgtccctgcttgtttctatgcatgggtgtaaagatgccacaacacaggtgtgaacacatggacttcatgtgtttaacaaacatttatggaatgcttattgcaaggccttggctttgtaaggtactgaggaaacaaagttgaatgatacatggtttcttttcttagggtactttagacctgtctttaaagtacttgtagtctgataagagtcacagccaagtcaatcaatgaatgcctggtgataagcacaatttcagaggtaaggctagggaaagtcagggaaggtggggggtagtcaggggagttagtctttccaaaggcctggctagagttcagaggcataagtggaattttgggactttccctctgagatagatgaatgagtatttcaagtctacttccttcaggcatggagcaagtgacctgtatttatatacagtggagttcatggcacaacagtgaaagaggaaaataacttattataaaagaaaaaatacctaacttagctagcacctagaacctgcagttcttgtttttctttaaatcttttttaaagtgctgttgtctttatttggtcttctcctttccttgtctctgtcccactttattttatgcagttaaatactattaaatactttaaaatatgctcattaaaaattttaaaggtatctttacagaaccaaaaccattgtagatacttaattaacactgttttgctgtataaaaggctctggtatttcaggaaaatagcttctaaactttaggtagtaaaatctattcctcagacatgtaatggtttcaccgtatagtgaagtgaatattcaactcatggcctggccttagctgtatgagtttggtgaagacctttacgcttttgagacttaatttccctcatctgtaaaatgatgtaataatacatttcttacaagcttgctgtaagaattccagtaacatagtacatatgaaagtgttttaaaaactgtaagtagctatatgcgtattgacaatttttttaaaaaaataatgtgagacattaagaaaatgtgacttggagattttaacaagttgatttttaaactggggcagtacttgaaatttcatcctgtttaggaaatcagaactaatggattgtacttaatgttatatttagtttaatagccatttgtaaatgtgctgctttgcagaatcatttgcattaatcgtggtgagatatatttggaaggaaaaattagaaaatcaaatttttaccctcagcattgttttcattttgaagtagtgttttttggaaatggagtaaacacaagtagaagagtattcaaaaagtaaaaacatgtcaccagagccttttggcaacttgtcttatttaatgattttgtctgtattctttcatatttcatacacactggaaatctctgcatcataactattaagttccgaaaacattaaaagtgattgtctaaattttggattctatgggctatcaagcaatagctctttttaggcctcttagatattaggccaacggtatgtaaatttagtcattggaaatattcttctaaatcacacctttaagatagcctgaagggcaatcagcatttccattaacaacaaaacaaaaatatgtttctagtaattatcccaggggttttcttttatgacaccaaaagagtcctatcccataaattagcctaaccaacacttaaataatatccttatttaacagaaaaatttaaaggtactttttcctatgtagtcttagaataaaaggtaatatctacttttggtctttgatgatggtgatgtacagacgggtttttggtgtggatgtcctttctctttgttagttttccttctaacagacaggacactcagctgcaggtctgttggagtttgctagaggtccactccagaccctgtttgcctgggtatccgcagcggtgtttgcagaacagcagtttttcatgaaccgcgaatgcagctgtctgatcattcctctggaagttttgtctcagaggagtacccggccgtgtgaagtgtcagtctgcccctactggggggtgcctcccagttaggctgctcaggggtcaggggtcagggacacacttgaggaggcagtctgcccgttctcagatctccagctgcgtgctgggagaaccactgctctcttcaaagctgtcagacagggacatttaagtctgcagaggttactgctgtccttttgtttgtctgtgccctgcccccagaggtggagcctacagaggcaggcaggcctccttgagctgtggtgggctccacccagttggagcttccctgctgctttgtttacctaagcaagcctggacaatggcaggcgcccctcccccagcctcactgccgccttgcagtttgatctcagactgctgtgctagcaatcagcgagactccgtgggcgtaggaccctccgagccaggtgcgggatataatctcctggtgccccgttttttaagcctgtcggaaaagtgcagtatttgagtgggagtgacccgattttccaggtgctgtctgtcactcctttctttgactaggaaagggaactcgctgaccccttgtgcttcccgagtgaggcaatgccttgccctccttcggctcgtgcacggtgcgctgcacctactgacctgcacccactatctggcactccctagtgagatgaacccggtacctcagatggaaatgcagaaatcacccgtcttctgcgtcactcatgctgggagctgtagaccggagctgttcctattcggccatcttggctcctcaccatcatcaaagaccaaaagtagataaaaccacaaagatgggggaaaaacagagcagaaaaactagaactctaaaaagcagagcacctctcctcctccaaaggaaagcagttcctcaccagcagtggaacaaagctggacggagaatgactttgacgagttgagagaagaaggcttcagacgatcaaacaacgagctaccggaggaaattcaaaccaaaggcaaagaagttaaaaactttgaaacaaatttagacgaatgtataactagaataaccaatacagagaagtacttaaaggagctgatggagctgaaagccaaggctccagaactacgtgaagaatgcagaagcctcaggagccaatgcaatcaactggaagaaagggtatcagtgatggaagatgaaatgaatgaaatgaagcaagaagggaaatttagagaaaaaagaataaaaagaaacgaacaaagcctccaagaaatatgggactatgtgaaaagaccaaatctatctctgattggtgtacctgaaagtgatggggagaatggaaccaagttggaaaacactctgcaggatattatccaggagaacttccccaatctagcaaggcaggccaacattcagattcaggaaatacagagaacgccacaaagatactcctcgagaagagcaactccaagacacataattgtcagattcaccaaagttgaaatgaaggaaaaatgttaagggcagccagagagaaaggtcgggttactcacaaagggaagcccatcagactaacagcggatctctcatcagaaaccctacaagccagaagagagtgggggccaatattcaacattcttaaagaaaagaattttcaacccagaatttcatatccagccaaactaagcttcataagtgaaggagaaataaaatactttacagacaagcaaatgctgagagattttgtcaccaccaggcctgccctaaaagagctcctgaaggaagcactaaacatggaaaggaacaaccggtaccagccgctgcaaaatcatgccaaaatgtaaagaccattgagactaggaagaaactgcatcaactaacgagcaaaataaccagctaacatcataatgacaggatccaattcacacataacaatattaactttaaatgtaaatggactaaatgctccaattaaaagacacagactggcaaattggataaagagtcaagacccatcagtgtgctgtattcaggaaacccatctcacgtgcagagacacacataggctcaaaataaaaggatggaggaagatctaccaagcaaatggaaaacaaaaaaaggtaggggtttcaatcctagtctctgataaaacagactttaaaccaacaaagatcaaaagagacaaagaaggccattacataatgttaaagagattaattcaacaagaagagctaactatcctaaatatatatgcacccaatacaggagcacccagattcataaagcaagtcctgagtgacctacaaagagactgagactcccacacattaataatgggagactttaacaccccactgtcaacattagacagatcatcgagacagaaagttaacaaggatatccaggaattgaattcagctctgcaccaggcggacctaatagacatctacagaactctccaccccaaatcaacagaatatacatttttttcagcaccacaccacacctattccaaaattgaccacatacttggaagtaaagctctcctcagcaaatgttaaagaacagaaattataacaaacgatctctcagaccacaatgcaatcaaactagaactcaggattaagaaactcactcaaaacccctcaacttcatggaaactgaacaacctgctcctgaatgactactgggtacataacaaaaggaaggcagaaataaagatgttctttgaaaccaatgagaaaaaagacacaacataccagaatctctgggacacattcaaagcagtgtgtagagggaaatttatagcactaaatgcccacaagagaaagcaggaaagatccaaaattgacaccctaacatcacaattaaaggaactagaaaagcaagagcaaacacattcaaaagctagcagaaggcaagaaataactaagatcagagcagaacggaaggaaatagagacacaaaaaacccttcaaaaaattaatgaatccaggagctggttttttgaaaggatcaacaaaattgatagaccgctagcaagactaataaagaaaaaaagagagaagaatcaaatagacacaataaaaaatgataaaggggatatcaccaccgatcccacagaaatacaaactaccatcagagaatactacaaacacctctacgcaaataaactagaaaatctagaagaaatggataaattcctcgacacatacactctcccaagactaaaccaggaagaagttgaatctctgaatagaccaataacaggatctgaaattgtggcaataatcaatagcttaccaaccaaaaagagtccaggaccagatggattcacagccgaattctaccagaggtacaaggaggagctggtaccattccttctgaaactattccaatcaatagaaaaagagggaatcctccctaactcattttatgaggccagcatcatcctgataccaaagttgggcagagacacaaccaaaaaagagaattttagaccaatatcctttatgaacattgatgcaaaaatcctcaataaaatactggcaaaccaaatccagcagcacatcaaaaagcttatccaccgtgatcaagtgggcttcatccctgggatgcatggctggttcaatatacgcaaatcaataaatgtaatccagcatataaacagagccaaagacaaaaaccacatgattgtctcaatagatgcagaaaaggcctttgacaaaattcaacaacccttcatgctgaaaactctcaataaattaggtattgatgggatgtatttcaaaataataagagctatctatgacaaacccacagccaatatcatactgaatgggcagaaactggaagcattccctttgaaaactggcacaagacagggctgccctctctcaccactcctattcaacatagtgttggaagttctggccagggcaattaggcaggagaaggaaataaagggtattctattaggaaaagaggaagtcaaattgtccctgtttgcagacgacatggttgtatatctagaaaaccccattgtctcagcccaaaatctccttaagctgataagcaacttcagcaaagtctcaggatacaaagtcaatgtacaaaaatcacaagcgttcttatacaccaataacagacaaacagagagccaaatcatgagtgaactcccattaacaattgcttcaaagagaataaaatacctaggaatccaccttacaagggatgtgaaggacctcttcaaggagaactacaaaccactgctcaatgaaataaaagaggatacaaacaaatggaagaacattccatgctcatgggtaggaagaatcaatatcgtgaaaatggccatactgcccaaggtcatttatagattcaatgccatgcccatcaagctaccaatgactttcttcacagaattgaaaaaacttgatcttgaaagttcatatggaaccaaaaaagagcccgcatcgccaagtcaatcctaagccaaaagaacaaagctggaggcatcacactacctgacttcaaactatactacaaggctacagtaaccaaaacagcatggtactggtaccaaaacagagatctagatcaatggaacagaacagagccctcagaaataacgccgcatatctacaactgtctgatctttgacaaacctgagaaaaacaagcaatggggaaaggattccctatttaataaatggtgctgggaaaactggctagccatatgtagaaagctgaaattggctcccttccttacaccttatgcaaaaatcaattcaagatggattaaagacttaaacattagacctaaaaccataaaaaccctagaagaacgcctaggcattaccattcaggacataggcatgggcaaggacttcatgtctaaaacaccaaaagcaatggcaacaaaagccaaaattgacaaatgggatctagttaaactaaagagcttctgcacagcaaaagaaactaccatcagagtgaacaggcaacccacaaaatgggggaaaattttcgcaacctactcttctgacaaagggctaatatccagaatctacaatgaactcaaacaaatttacaagaaaaaacaaacaaccccatcaaaaagtgggcaaaggacatgaacagacacttctcaaaagaagacatttatgcagccaaaagacacatgaaaaaatgctcaccatcactggccatcagagaaatgcaaatcaaaaccacaatgagatatcatctcacaccagtttgaatggcaatcgttaaaaagtcaggaaacaacaggtgctggagaggatgtggagaaataggaacacttttacactgttggtgggactgtaaactagttcaaccattgtggaagtcagtgtggcgattcctcagggatctagaactagaaataccatttgacccagccatcccattagtgggtatatacccaaaggactataaatcatgctgctataaagacacatgcacacgtatgtttattgtggcactattcacaatagcaaagacttggaaccaacccaaatgtccaacaatgatagactgaattaagaaaatgtggcacatatacaccatggaatactatgcagccataaaaaatgatgagttcatatccgttgtagggacatggatgaaattggaaatcatcattctcagtaaactatcgcaagaacaaaaaaccaaacaccgcatattctcactcataggtgggaattgaacaatgagaacacgtggacacaggaaggggaacatcacactgtggggactgttgtggagtggcgggggagggagggatagcattgggagatatacctaatgctagatgacgagttagtgggtgcaatgcaccaacatggcacatgtatacatatgtaactaacctgcaccttgtgcacgtgtaccctaaaacttaaagtataataataataaaaaaaaagaataaaaggtaatagctgattaagtttagagaatactgattcttatcctttttcttcttctaccatttcctagttcggcaaccatgcaaagaagcgagatttagaaatggaatgttgaggtgtgtttaagatggtatttgtccaggctattcaggaacacgcaagccctgtcctcagctcaacactctctccagaagatcatcggagaaatgtgtacacagagaaacaaaggccaaggaaccctttattgttggctgaggttttgtcttcaaacccagaagcagaacactggtaaactatatagagccttctgcttcagaatagcctcgcagcaaaacaggctggtggttgtactaggcttgctcttttacttgaaaccaaacctgaaccatgagtcttccttctcttctacagtgaaaggctagaatatagctttcagtgggaaaaactcctgtcttgtgtaaaccaaaaagtatctgagacaagtctcaatcaatttataagtttattttgccaagattgaggacatgcctgtgacagcctgaggcggtcctgacaacatgtgcgcaaggtggtcggctacagcttggttttatacattttagagagatgcaagacatcagtcaatacatgtaagatgtacattggttcagtccagaaagcaaggaaaactcaaagtgggggtggatggtggggcagggagatgggcgtccaggtcatagatggattccaagattttcagattggcagttggttgaaagagtttatctaaagacctagaatccatagaagggagtatctgggttgagataaagggttgtggagaacaagtttcttcttatgcagataaaacctccaggtagcaggcttcagagagaatagattataaatgtttcttagcagacttaaaaaggtgccagaagatcagggaaaagacctggaaagggaaagggaatctctatagaatgtcaattatcctcacaagagatagctttgtagggccatttcaaaatatatcaaaggaatatattttagggtaaaatacttcagtttctttcagggccttctatgtgccatatgatgctgtactaaagtaaggctggaattttttttattgctacaataaaactcttttattgctacaaaaagtcttaaaatctctgtttcaatgttaatgctggtcacttgtgtatgaattccatggggaagagggtataatgaggcatgtcttacccctctcttcccatcatggtctgaactagtttttcaggttaactttggaatgcccttggccaagaggaggggtccatttagatggttgtggggcttagaatttttagtttacacttgatactcgaaacacagctggtgtaggataattgtcttagaattcaaaaagttcagataagccgcctacttccccatgtatggaataagggggatgctgctcaaaggtgtggggagggtggagataggaacagccttctattaaccaaagaagccaattgtaggcaacgtactagtctctaaccatcatgctctcagatttccagagtttgatactgtgtgctccacatagatatgtatagttcttggtaggtgaaacctatttcaaaactgtcccagtgataaattttcacaaggctgtctttgatggcttccttctacatcccagcccttgttggaggctaattttaacctaagaaaaatataattgccaaggttatattatatttatctaaagtaatggaatattagagtttgattaccattggagggtaaaggcaggaagataccaactcagacatagcttgggtgtggtgtgtacattcctataacttctaatctttataaaaatctttatgagttacagctgtaaaatatggttgtagtttttcactgtcctttattacccttaagtattccccaccaagggagtgctacatatatgccatatttgcagtgaaataagaatttattaagaaatacattgtagtatgttttattaaagtaaaacacacatatgggtatgcatagatagatgcaaaaatcatgtttacttgatgatttttcacaatgtgaacacacctatataattgtcactcaaattatgaaacagaacatgagcagtgttatatatttgtttttaaattcattaatctctagtttttattttcttcttttgctttctttgaatttaatttgctgttttcttatttgttaagataatatatttagatcattagactttagcttttctttttttgtaacattgacagttaaggcatgaatgttactgaatgcatgtttgcagcttcattccacaagttttgatatgtcatgtgttcatattatgagtaatattgactttaacaagtcaatgatataatatttttatctctaggacaagtattttgttttttaaatggattccatttaaattcccatcttgaaatcaatatttaaaaaatatgatgttatttcaaagtctgtgtctgataaccatagtatataattctcctttaaggttatttctaatttctgtttttaccccctcttgggattccagtcatttgatcttgtcttctgttatgtctaacaacttctgattaaatgtcagatataaaatatccatagtagagataattttatactctagatgatattatcttccttcagagattgtatttgcttttggctggcatttgggttaggggcaggtcaccttaatattcagcctggaattaagctgattggaagctgaatatagttcaccaagtgcataggcttacaaccatccacacagaatctgaatcttgggattcacagtctcagagatacccgccatgatagagaaatatagttgggcctatgaaacagactccgagtaaacttatctaaccagccacatagatgaagatgtcaagtctgtttttttctatttaattgtcttactgtaagagaaagaagtcagcttgcttcctgtcttcatgacactttaattttcccattagaaagaaagtccccttgaatttatcaaactctaattcatcaaattggccacattccctgaggtgcagagaagaggaataaataggcagaggccggaacctggtaaggtgagagaacacttctttctaccttaagagttaatattgttgtttgcatatggtaaatgaataaattcatagtcagagagcataaataacctactaagatgctgttagacctgggctctcccttacacttttgagtttcttggatcttaagattctacagtatgtaattattttctaacactattattttcagcactgcctaaaagccagtctcagtgagatttaaaggcagggtggccataataattttccttttaaaccaagacatttttgagaatgaaaagaggtactattagtcattacgccaggacaatagggtaaactgggactgttatgggccaactggtaggtatggtgatcttactttactactgatacagataccttctgcaatggaaggtcgtggaattgggtgacgttgaatgattctgagcttaccacatgagtttgtttgaaaaataagagctgaaaatacccgaagacaatggaagggtgggggacaggagaaaattagcaggacgaagagaaaataaaccaagaagaagaaatgaagagaggaaagaacaataagaatgccagaaatcagatatttgcccaggaaaacaggtgaatgttagcatgtggacatgaggcagggtaaatagaaaacaggtacagatttgaagattaaaatcatcatggaggggaaaaaataatgtatagaatgagatagcaatgggtataagctttgcaaaaagaacgagaaagtatactcaagtttagatgatgttataatatcatttatagcaaggacattgaagagcctacaggataacattctagtaaattagatttaaaggacaaattgtgagtattcctggttataaataacactttattattgatgcaattattttaacacatgcagaaacatggcagagaaaaggaggtagtgtttaaatatctgcccagtgactgaggaatactataatatcctggatctacaggtgatgctgcaggtctgagagcaatggtaaggaagctaggaggacgtaatattaatgatatgattatcccacccatatagataacctaaaatatgtgaactgctttcatagaaggcagaagaatccaagacctgagtggagtgtgaaagattgaactttaaaaatagctatgtgtgatgcatattacttgtgtatgaataacttttccatcatcacatagaactgtcatctcaggttaagcgacctcttatgctaatactgtgatagctgggttgttgttggaaaaccactcagaaaataagaaaggttaaaaaaaattgtaagataaaacatttatagcagaaggcaaaatatatacttctgagtaactatagcatcactatactctggaagaaagaatacaggctagtgtaaaaggaacctggaatgtaacatctggattcacagagctgatgttaatagcctggtaaagacaaaagatcacaaaatcagtgaactagtcaaagtatttttgaataattgtagtaccacaaggcagccatttaaaattcactcctctgaagcctaggttggctaaaggaatttttgtttttcactctgtgtgttcttgtagttgaccctgcataaaatccaggctggttattttttgaagaaacaacttacaatctataagaaaggaatgttcaacttcaccataggaattcagtccaaatgcatttattgagcgatatcaacctgatatgaaagccgtatattctattcttgttttatcttttattgttctttatattttctggtcctatttacctctttgtttaatctttacattttttctagtactttattattgttcacagtttattgtgtaagcctagaattggttttcatgctttagccattacttttcctttatgagatgttattgtacttggaaaagataatgtgtgaatcagtgtttgatgagccaaaattatgggagagatttttaaactttgacttagagaagaaccttttttgaactctgttactaggtgtgattggtgtgtcttgtgacctcccattggacagtgtactttttatatggtatttatgtttcttttttcattgcagcattacagggtgtctgttttctacagtgccttcttattactaagctttgaacattgtaggcacccataaagtctgaggacatttaagtacatttgagagtaggattagatggaagatgagaaaatttccatccaaagcagaattttctaatctgattctgtatcataatgtgctttatttatttcccagtgggatataaagcattcctaggtatactaaagtttccaaaaaaaaatctgtagtacagacagttgtttaatttcatttaacctgctgttcctcacatttatctgacaaatacacttttgtatctgggctctgcagtagacagaaatgcacctcaaattaattgaagcccaaaaggggatttagtggcttatgaaactgggaagaattcttggtgagttcacagaacagacaagctgcaggatgtcactgactgagactggggactcaacagtctttctcttcatccattttcctcttttgattctgctggtttcattttgggtgctgacctcaccctttcctggtgtggacagtcctgtgccctttcaacacgacggggaacaacctcagctgaaagggaacatgttgatttctacacttctaaatattgatttttccaaaaggtttcatccctgtgattggcctccatgctgtagaccaaccactcttgtcaggggaggagtttactaagattggctatatctaggtcttttgtccacatatgtggcctggataggatgtgtagaacccacttctttaagaagagagttaggaaggcttgttgggaagagcagaaataataaccatcactcatcattcaacaaatatttattgaacgtttttcctcagcccctcaggcacttttctagacattagggacctaacactgaacaaaataaatgaatattccttcttccagggagcttacattgcagtgtaataaaaaggcaacattctaataaaaatgaataaaaatgataaggaaaacagtatgtttgactacaataagtacaaggcagataaaataaagcagaagagtaagaagtatctgtggggagaagggagttaaaattttagtgtgtccagggaaagcctctctgatgagaaggtcacttaattaaatattggaaggaagtgaaggagggagccctgcatatatcccattcagaggacacagcagatgtgaaggacctggggcaagtgtgcctggtgtgtctgaaggaggacatagagagtagaatgtgggcatggagaagaccatggaggacatggagggtagagtgtgggcagtaggttccagatttaacctttaaaatccgaatttttgtgggcattttatggtcttctggtctgatttctagtgctacagagtccattccttcataatatttattacagctgaattatgtgcagagctgctgttcaggcaccacacatttttattttagaatagctattggtttctcttagctattgccttaaaatatatacttctaattttttagtgtgggtatagtgattgtagtactggtaaaatgatttatggaagaatataatctactgtgagataatctgcatgtgttgtgaatcaggtagttgctgtgacaaatccagtcagtaggttccagattgaaccttaaaatcctcacttcttttgggcattttatggtcttttggtctgattttagtgctacagagtccattccttcataatatttattacagctgaatgatatgcaaagcaaatgtttgatacagtggagaatgaactgatcttaccttgtgaaacttggggaaaagacactttggcaaaaatgtgattcagaaatgagcacttatgaagttcccaaggaattgggctgagatagtaggaagtcttgtgctgagctctaaaggctgtttataaaaagcagacgtgaggaaaaggcaatttttgataagaagtgtaggagtgtaagtatataaaacagaagaggattatggtcaggtcacctgcctaactcgagcaaggagtctgctagagaaaatgggaagtaaaatcagattattagaaagctttgtgttctgtgttaataacgggaactctctctggagagagtttgaggaagattattctagaaatgttgtgtcactttgggccacttggccatattccacactctgctctgtgttataggggacaatttataattgcaacttccttaggtaataataacagtcttggcaacttgatgtttttttaggcccttcccatggatattcttttcatatctgtaagatgtaaatttttttaaaaatattagtatttcttgaaggattaatgggagaaactttggaaaattccctactgcttagaagtgattttgtttgtagcatgtaagatatatataccttctctttgcttttttttctttttcctttcttggtttccactaaattcttagccctaagttccttgcttttttgtctcagctttcttcttatatgaagtatcaaatttaaaaaaatctttaaaaagcctacagagggtgatggagcttagggattagttctcatgccacttattttccctaattaagaactctgaaatggaagttgaaaatgttggtataacctttttattaatggggaaatggggtcatgcctgccacttccatctccacaacaatccattgtataaaatgttaagttcactggtacttttgatttgaggggagagacatttatattggataagtatatatcagaagtctgtgtcttttgaatggtcttccgaaattcttatctccattcttctataattgttgaattattttccttaagctgtactgcagaataacacctataagataagctttcaaagtgactgtgttaagcagccttcattctccaagaaaaccactttgtgccttcttttctcaaaacctcacacaacttcctccccctcaccattagcttactagtatttcactgcaaaaataagtcctcagaaacctgcatcataatcccgccaaatctcccaatcacccccattagtctcatctagtctgccttccctagttagtattgataaactctgtgtgttcccatctaaagctaacttttctgcctgtgatttggatattgtctcttttcagtagtttaaagatacttaaactgcttctgcatttatcccctatctctcctgcagcattaacctgtctctactagatcattctcacattccaaaattgctgtaatatctgccataaaaaaaagaaatctgtaaatttgtttaagtttcttgtagattctggatattagccctgtgtcagatggatagattgcaaaaattttctcccattctgtaggttgtctgttcactctgatgatagtttcttttgctgtgcagaagctctttagtttaattagatcccgtttgtcaattttggcttttgttgctattgcttttggtgttttagtcatgaagtctttagctgggaggcaggaggaacttctctaagactcaggaattctacttttagttatacatattaaacaatctcaaatattgaggtcataaggaaaatattataaggtgttcattccaacactgcagagatatttataactgccaaatagtaggatgtataagttgtggtatatttatacagtgaagtagtatgcagcccttaaaatgaatatagtagagctactttcatcagtgtggatttctctcaaaagcataatgttgaattagaaaagcaaggtaaagtatgatgcattgagtatgatactatttataaagagcttgaatgcctgagaaacaatactatatcatgtgtatgcccatacacatgtataatacattttacatgataattataaacactggttttagaaccctagggaaaaagtgaaggaaatggagttgggatgtactcaactgttggtgtgggatgttttttctttaaaaatgaagattgaaacaaacatgacgtaagggtaagatctgataaagttgagtggttgatacacaggaatttgttattacatactctattttacagctacttttgaaatttttctcaggtaaaaagtataaaactaacataatacaacaatttttaaaataaaatgattgctaccaaaaaacaacaaaaaaaacccttcagactggtagctttaaacaactttaaagcttgagctccttctaaatttcccaaagtctttcagcactctctttcaactgggcctcctcttcagaagtcacctttatctttataagatctgtagtactattctgtcctaggatacaaggaatgctaaggaatgttacttcatttatcccataaaagctctcaattatgatggaaactggatgcaccctcttaagattattcaaagaggaagtcaaattgtctctgtttgcagatgacacaattgtatatttagaaaactccatcatctcaggcccaaatctcctcaagctgataagcaaattgagcaaagtctcaggatacaaaatcaatgtgcaaaaatcacaagcattcctatacaccaataatagacaaatagagagccaaatcatgagtgaaatttcattcacaattgctacaaagagaataaaatacccaggaatacatcttaaaagggatgtgaaggacctcttcaaggagaactacaaaccactgctcaacgaaataagaggacacaaacaaatggaaaaacattccatgctcatgaataggaataatcaatattgtgaaaatttggccatactgcccaaagtaatttatagattcaatgctattcccatcaaactaccactgaatttcttcacagaattgtaaaaaactactttgaagttcacatggaaccgcatatccaagacaatcctaagcaaaaagaacaaagctggaggcatcacactacctgacttcaaactatactacaaggctacagtaaccaaaacagcatggtactggtaccaaaacagatatatagaacaatgaaacagaacagaggcctcagaaataacatcacacatctacaaccatctgatctttgacaaaccagacaaaaacaagcaatggggaaaggatttcctatttaataaatggtgttgggaaaactgggtagccatatgcagaaaactgaaactggatcccttccttacaccttatacaaaaattaaatcaagatggattagagacttaaatgtaagacctaaaaccataaaatccataaaagaaaacctaggcattaccattcagtacataggcataggcaaagacttcatgactaaaacaccaaaagcaatggcaacaaaagccaaaattgacaaatgggatctaattaaacagaagagcttctgcacagcaaaataaactgtcatcagagtgaacaggcaacctacagaatgagagaaaagttttgcaatctatccatctgacaaaggactaatatccagaatctacaaagaacttaaacaaatttacaagaaaaaaacaaacaaccccatcaaaaagtgggcaaaggatatgagcagacacttttcaaaagaagacatttatgcggccaacaaacgtgaaaaaaagctcatcatcactggtcattaaagaaatgcaaatcaaaaccacaatgagattccatctcatgccagttagaatggcgatcattaaaaagtcaggaaacaacaggtgctggagaggatgtggagaaataagaatgcttttacactgttggtgagagcataaattagttcaaccattgtggaagatagtgtggtgatccctcaaggatcttgaactagaaataccatttgacccagcaatcccattattgggtatatacccaaaagattataaatcattctgctataaagacacatgcacacgtatgtttattgtggcactgttcacaatagcaaagactgggaaccaatccaaatgcctataaatgatagactggataaagaaaatgtggcatatatacaccatggaatactatgcagccataaaaaaggatgagttcatgtcctttgtagggacatggatgaagctggaaaccatcattctcagcaaactaacagaagaacagaaaaccaagcactgcatgttctcactcgtaagtgggagttgaacaatgagaacacatggacacagggaggggaacatcacacactggggcctgtcagggggtcaggggtcatgggagggataatattaggagaaatgcctaatgtagatgacaggttgatgggtacagcaaaccaccacagcacgtgtatacatatgtaacaaacctgcacattctgcacatgtaccccagaacttaaagtataaaaaatacttttgcactaacctaatagtaaaacatgactagattaatcagctcatacaatgtgaattattgaccagtatgaaacagagaccaaagtcagtgctggctactacttaggagatgcaaagataattcctctgatggatttctagattcatttaattgcttaatgacttagagataattaattctcaacaaatattcatttgaaataaattctgacaagttgtccataatccttccagaattcagtaataaatcaaatgcaccttttttttttctccttgtaacttcccattgacagtgtcatgtcattaaaacccaggctatgtgtggctgctctttcccactgcagtgaaagacatttcaatgggaaatgagtttgcctattaaaaaatgtttactgttgttttctattaaaaaaaaagattcttcaaaatactttctgttaaatcagctacagataggccaatggtccaattagtacaacctttcattttaactatctcatagccacaggcaatcacttctttgtggactttttcccactgttcaggatctttatcagttcctatatctgagttcagatccgtcagagggatgccagcaatattgactccactccacacaggaatacttgagtccctatgctgtccaagaatccacctatgacagctttcagagtggatatcaagcctttgcccagtgaagaaacggaaatggggagtgtccagattacagccacttccaataacacggttttggggaaatacactcaatttccagaatacataagttacaatatccagtaaattagaaactactatcagtttgtggtggggattgcatcgggtaatactggaaataattaatttaaaaatgatcacatttcactggactatatcaaggtgtgtttctccttttgctggaacacctgctgtaataatgactaagttggactttgcagtgacactgtagtctttgctgaaaacaatgcttggcatttttatggaagggctgccatgttgaagatccgttgtctcacccttcaatttgccttcgtcaacatccacaaaggcaagtttatcacccaaaccttttaataagatgctgagagcacaggccatgccaactgatccagttcctataatggagatcttattgggatgagcggccccctccaaagtgaaattcttggcaagttcaagcttgacagtcaccatcttggaaatgggagtgaaggtccagccgcccctgagtgggatgtgtgtggcctcgtgggggcactgagccagcccccaacaaaggaaatgagctcctgcagcacctattctcttgctggtgggcagaactcctgcagctcagctcatggtcgttagctcacgcaagaggcaaatggatgaaagcagcggcagaaatctccttgaggtgtggaagaaaccctgacggtttgaaggcctcctcgccctttgctactgtggctgcgcaaggccactcccagctcgtgcagggctcacagagacctggccccttaatatgttatttttagttttacaaatatgtggtattttttacaccattaagacggttccgaaaaaatggactgtgatcattaaggccaaaagtaattttagctttgcctttcaaagtgccatattttgttgcttagagaagcgctgcacctttgcaattatttttgtcatggtgctcaaacacgctgaaactaagtacgatagatgcaaagacaaagagatgagaattccaatctccactccacacttggactttgaagaagtttgactatgtgagcttcttttaaaaagtcaatattacaatgtgataataagacttgtcctaactactttacaaggttcctgtgagaaagtcagggtgaaaagtctagggagctttaaaaagagtattgtaactatttgacaaactatgtcactgagtcagtgacaaaaccaagtcttctgatttttccttcttcatgaaaatgatgcattaaaaattaaagaaataaaagcttagaagtcctcaattatctgcttttttgaagataagatagtcatggataaatgcaatcattcgataactagtaatgtttagataatctcaaatccttctaccagaactttaataacatttattcaaaatcaaatatctgcctctttccccaatcaccatctcctttataattaaaaagtgaggactatgaaaaacaagaaggcttaacccatgaattaaaatgatatttctctaatatactgaaattttgccttatgaatggttaaactacattttctttaagttggcaagtcttaatatgtgtttacctatttatattatcccaaataagaaatttgatggaatcttttcacttctcaaccagttgtttaatatttggtatcaggatgcattctatttgtaaatataatagttctatctcagaaaaaaaaaaaagaaagaaatctattttattctctcctcccctagcttccccatttctcagctttttttgatagcaacatttctcaaaacaattatctttactctctggtgtccactgtaacagctcttgtcaagatccccagccagacacagtggctcacgcctgtaatcccagcactttgggaggctgaggcgggtggatcccgaggtcaggagttcgagaccagcctggccaatatggtgaaactctctctctactaaaagacgaaaaaattacccaggcatggtgatgtgcacctgtagtcccagctactcaggaggctgaggcagaagaatcacttgaacccgggaggcaaaggttgcagtgagccgagatcgcgccactgcaccactgcacttcaacctgggcaacagagcaagactctgtctcaaaaaaaaaaaaaaaaaaaaaaaaaaaaaaaaaaaagaaaagaaaatccccagcacctccatcttgccaaatttattcgtccattcttagctcccatcttacctgaaccttcagcagcctgtgatttaactgattcactctccttattgagctgtttcttcacctggctactggtgaagtcttggttttcctcccctttttcagtgttctctgcctatatcttctcctattcctatacaaattagggtgacccaggacttaactcttacccctctgctctatctacactcacagccaggattgtgccatcctttcttatggtaccaaatactgtttacatggtgatgtctctcaaatttacgtcttccctctccgtctttctgcttgggcttttggtaggtaattcctgcctaaaacttccaaaactccttattgtagcctattgggtcctacaatctggttcaccccttacctatgcaacttctttgcctgctgttttctctcctttgttccttcagcttccaccacatttggattctttcttatcttgtaactgccaagcagcttcttctcacaaagtctttgcatttcccattcttttggcctagaatgttctttcctccaatttttgcatagcttgtatctttactccagtgtcaaatgtatttcttcagaggccttcccctatcaccctgtctaagatagtaccttttttacttgttttatttttttttcttagtacttatcagcactttatattttatttttcctctgtggtaatatgagtctaaagagggcatgtaattaatctatccacccctgtttccctaaggcttatagtattgcctggcttatagtagattttcaacaacttttcgttgagtgaatgaatatataaatgaatggagttgtatgatacattattgttttatatgtaaaccatgtgattaatccctcaatatttttgaattcaaggtacagataaatgtttactataatataatgtttaaacataatgtaaaagtggctagctagaacatgttgcatgtcaatttgtaaaaaggaatttcctgtgagtgatacatgggaaggccctttttgttcccttctctggaactaatagtaattccacaggaaccttgtggaactaaattgtgtttccttggttcttctcatgcagctgaagaataagttcatgaaaaaattgccacgtgatgcagaagcttccaacgtgcttgttggggaggttgactttttggatactcctttcattgcctttgttaggctacagcaggctgtcatgctgggtgccctgactgaagttcctgtgcccacaaggtaagctgctctcctacctggggtctacaatgtgctaatagggttatctcctcccattcaggctggagaatcaatagaatgaggaaatatttagtgcaaacacattggagaggtttaacttgaaataatgactgtttgacttttatactgtcaaatttcttggcacttatatagtaataataatagcaattataatagtttattgggcagtgtactaggttcttcttttggattattctacttaatccttacaataatattttaagggacaaactatagttatctggttttacagatgaaaaaaggtctaagagtttaagtaatttgtccaaggtcatacagttagtaaatggttcagaggtcatagttgctttcatttactctgttttatcagaaaattggtagtaggtttatacacacatatatatattaaaatcatcaagctgtatacttaagtttgcatacttcactattaaatgttgtgtcacaaatttttgttttaaagtgaagtatattaatgttattataatcacgtactcatttcactgcatagtacctgagaagtcatcctcttcatccgcctctgaaactgagctccacagagttaggaagcttgacctgggagtgcaattagttgactagaagttaatgtttcacttaaatttgtgctgcagacagtttaaagaaaacttgtagtcttcaggttgacagaaaattaaaatatgaataggacttttttttgggatggggggtgggggagttgttttctgtgggttccagggcaaggacaggttcctttaggtttcctcatgtgagcaggaagggctatgaatcctcctcagtgatagatggatcctcctcagctcagacggtctgagcatgattaaccaacagtgtaaagaggctcaagatttctttagagcctggttaggaggaaaattaagagaaaatttcctttaggcttcttaattcatagattgcaggctattcttcctcatcatacaggtattttttaaacccatttttatatttcttagacacttaaaataggaatgatacatagggctgttattggacaaatagcagtggaaaagagatgatcatagcttattcacttaataggattatgatgatttgtgttttctgtaacgtagctttttgcttgaaaacattccagcagagccttgtggttctatctgtgcagtcacctggcgaacagctgactcagataatggctggagtccagctctgtgcccctatggctttatttatgtctctctagactaactttactaggggttgaaagaaaaaaacatgcccagaagtgttaaagaaaattgctcttggcttttcatttttattaccatttttctttagaaggtacaaataaaaaatgctttaaaagacttttatttaacaaaatacgcattcattgagagcaaatcatgaccattttttgtgtcctgcttatcatttctttctgtctggctcactaacttttttcttttataatggatggtagggctagtgtagaggtaaaatacagcatcacttaaattagcaaaaggagccaggcaattcaaggcaacgtaattcaataatattatataactatttcagggcaataatctgaacgatatatccttgcatgttaacatttttccaggaaatagcttcatccatttgctgtcctctgaactagtacaagccttaatcactgagtagggagtctcattagctttttgtgtgtaggtaatgtggggtcatttacagtggctgcatcctgtgaaatccaataaaggaaatcccacaaggaatgtggtaggcatggtgaaggactgcatgtacatttcatgatatgttttaatgtgcatgctactctatcgtactgaaaggaaacctgaaaaatctgtgtttgtgtgtatctttttatggtcatttttctttttaaaggtggaggaaagttatgctgccattattatgattatttctgtttctaataaacagtattactaccatgcaccttctaggaaatatggctctagcagctcccatttcttgtgcggagttcaccaatttcattatttactctcttacttgcttgatctgttttagcctccacttacagctggatgactatcaaccgggtgaatgtctatctatgtaggggcccctcttgccattcatgtgaaaggaaacaaaccctattctttgatctttggttactggataggatatgtttatgattttcctagtatcttacaggcactttgcttgctgtcatcttatgtctatccacagaggccactactctctctctctctctctctctctctctctctctatatatatatatatatatatatatatatatatataaattttttgaaggggggtgatagagtcttgctgtgtcacccaggctggagtgcagtggcgtgatcttggctcactgcaacccccgcctccctggttcaggcaattctcctgcctcaacctcctgagcagctgggataacaggcacctgccaccacacccagctaattcttgtatttttgtagagacggggtttcaccatgttggccaggctggtctcaaactcctgacctcaagtaatccacccgcctcggcctcccaaagtgctgggattacaggcatgagccaccgtgcccagcctcattcatatttttgagctatataggggatgaatgttcttcttataccattttgcagttgagagatgaaggcaaagggaagattcagcatcagtgctgggaatagaactttaaatagatttctgaatctgagacaagagttttagggacagcctagggagattctagaaaagattggaataaaatgttttagggttctcttataaagaagaataaaaccctagtttgtgcttttctaatcttgatttgcacatgtaaggtaattggttattaagtaagctccagactgttaaaaatttagaatgtttaccctcttagtggcactgtaagataatatatatatgttacaaataattatttatctaaaagaagtagtttgtgattaattgtcaaagccattaaaaaaacttagagggattgggatggagatcctgctagttcaattttgtcacatccaccagtttaattgctagctgctattaatatttaccgcatgtaatgcagttggttatggtgggtttgtggtcctcatgaatccattatggaagccacagtttagccacattttccaaagctgataaagatgaataatgggttattgaattcactgttgttttgagagaaggatataaaggattggtacatgctgagtttatgctagaaatagctgtgatgtatcaggaaagaggggggtgcatatcttttccgaaaacatcaagtggtttaggaaggctagctccttttctcatattatgctctgtttctgcttataattattttgtgaatgtgagtataggccgttggttccggacacagattatttggttaatacatccttttgttgtggagaatgctggaggcatcttccgcaggcataattaactatatgaaaaaactcagaaaagtagaaaagggcctcatgaagattattcagataactagacgctattaaaaattgtaactctgacttatttatttatgagtgaataaaaagaacttagtaacataaattaatgctttttttttccaagctgtcaaagtaggctgtgcccttgcagccacacaaatgtgatgtttactctaatttgttaatagagaaaaaagcttctggataaaaataacatctgtccattgacaaaaaacagcttgggtcatgaaaggagttttcagtacattataaaagctgagtttggcaggatgtacttcaatcataaaagttgtaacagctttcgcttctttgaaggttaaaggagagaaaacatatttcaggcagagggaacttcaacttgttggattgttttgtgttcagttttctcggatttctcatcccatttcaataatgcagtccagattagaagcttcttaaaggtgtccattcctccagatgacatttttggcttgaggttatgtttcctgctgcttatgaatgcttggattctctctatttatcattttaaggaggcagatttactgaattattcctgattggagtaatgtgaaaattttaactggtatgtccaccatgttggtttggcccttggtgttattccattaatgaagaaataccttctttaaaaaataaaaattgcattacccaggaaagaggaatactacttttatatctgtgttactgaaccaatataattctcatatattgtgtttattgctatcgtgtagacaccattgatctgctgcttcctttcattctttgactggttctatttagcagagaacaaagagtaaatattttatagaaaatgtctgtcctcgtctcataggatgtaacttggaggctccattactctatcagctattggaatacccactgcctgccaaagtttatgtttgaggactattaatgactgagaatgttttttcactaactagacaatgttttggctttgttgctatatagtcaacctgataattaactcattatcagtgtcagttgataaatacatttccataatatgtatttgtaagctataatcatgatggaggtgctagggagaggtaggaagagatacagagtgtttggaaaagttttggatattatgcattactgaaaagttaatatttagatacatgaagataataaaaatggaagcagaagaaatctattatttaaaaatgtactaaggatccaggtgttagatattttctcttgtggcacagcatctgccccttttcacctaaacccacacccttattgaattgaaacatgaccatctgtagtcaggcaaacgaaattgagaaatgtgaccagtacttatgtttctcaatgggattaaagcattattttgctttaatcattaaatatattttgtgcatgttgcactcaaatcagtgatcagtccctttagaaaaatacactttacagtcctaaagaagcactttataatactatacgtagtggcatataattaggggccagcttcgaagggacaaaagttctagtgtcaattgaacttcagtgttaaaagagctgaaattcaattcaaataatgacttccttcatacttgaacagactttggtgcctgctgattgctatctactttggtaacacttgaaagtgagtgtgctgcttcacttcagagctggtttctaagcaaataagtactaagtggttttatggttattctggtataaaacctgagtattcaaactttcagacacctttttacattcttcatttctgggattttagaatcccttttgggttgaattttatgataaaaaaaaagtaattatacattcaagggcattttggaacagacccaaacattttttaaagtatttgctgtcaatccttttttatttgaagtgagggatataaataagtaagttaaaaataaaattctgctgagcaaaatggcaagctgtttctggtaccataaaaatcttacctaagatttcttgtccctggctaagcatccagaagtgacccagagtgacctatggaagacttatggaagtcatttttggacttctgttaaatcacaaccttggtatatcagttgggcaggtagtattaggcagaaatatgtggtgaaaagaacaggaggtaagaatgcctatatatctactctttgtcatttactaggcacagatcttgggctcttccattaacctccaccagcctcattttcctcaccattaaatgggaataggatactttctttactgcagagggtcatatggaaatgtaaataaagtgatgaatgtgaagtgctttggaggccttataagctgggcaggcatatgatgttatcatttttattgtcctcattatctccccgttaggtgatacatgatcaatatcaaggtgggatttatcccacgtcaccttttgtagatttttttgtaaattttttcttactcatttactcatcagatccccgcatccacagtgccaacatgccacagggcaaaggccctgtgtgataagtgagggattttttccaacttggttagaggtgaacctaagtggggttaagtttgttattgtatgtttcaggacctgtttgctatgaagcaatgttttgtgcattatgaagaaaaaatgttggtaaatgacaagaggacacccacaaaataattttgactgtctgtgaatgatgctttattttgaatttctctcatatttctcttcccttactttggctgtcaccatgtggcttacttgtagaggacttggtttttgctgattcccagtcacttctgagtagacatatttcttaaaagtgtggagacgatcatctgtcactgcccatattgggtaaggaaaagtcagagaaatgtgaagatgcactaactctttctagttattgtgcttgatgggtttgctccaaagattctgaaaatcagtagaaatggagagagaaaaaaagtttaaaatagaaagattgaatgactcatattaagcacttgaagtgcacctttcctgctcagtgaagaagcttctcaggtttctatgctatattctcatttgcctccaaataaactgaacaatgaactgtgttttgcaatagtgcgaaagagtatattctgtactaccaataatatattacctttgttttaaaggtgaattctagacctaacctttttatgaactaagttaaacatttctcagttttatgtatgttgagtttgatgaaatgtgtgttatagcctttgcttctttccttttccattaggttcttgttcattctcttaggtcctaaggggaaagccaagtcctaccacgagattggcagagccattgccaccctgatgtctgatgaggtaggaaatcaggaagatggagttctgtgaatgtcctacttgtttgttgtcatactgtgaattggctgtcacaatttattcaattagaattatgtggttactagacttccttatagcatgaggtacggtcatttgagacaaatgagctgaatcctatatggtttgcaaaaagtaaggcatgcattttggttttctatgggattctaaactctgttggaataaaacatattttcctttcttttaccaaacattttcatttcttaaaactgatatatgtcaaatattctttaaaaagttcaaagtcagctgggcatggtggctcacgcctgtaatcccagcactttgagaggtcgaggtgggcagatcacctgaggtcaggagttcgagaccagcctgaccaacatggtgaaaacccgtttctactaaaaataaaaaaattagccaggcatggtggtgcatgcctgtaatcccagctactcagaaggctgaggcaggagaatcactagaacctgagatgcagaggttgcagtgagctgagatcacgccactgcactccagcctgggcaacagagcgagattccatctcaaaaaaaaaaaaaaaaaaaggttcaaggtcattgtattaacttaaactttatctcttgaagttttaatacactaattctgggaattcaaatgtctatattctatattatttcagaaatgatgggttctataaaataatgtctaataaaatggataatgcattttttcttaggtatcagaaagtacatgttttatggttttcttatttcgtgggaaggaatgatacacatctaaaaatgcattagcaaccattatggcaaagtatctgtacaggttggaattatgaccccatttattttcataacagcctggatgttacatgcattttagatatgagaaaattctgaactattcccataggaggagaaatactgttagaatacaggatcattagtttctgctcctgggtctttctgggcttactatttccccaaatgtattgcttttgcttcattgcttgatttgtcggtttttctgtgtgttaagtggagaaaggggtacctttctccttagttatagatgttccatgtggtgattactcaggtagctattttattctgtgactgaaagctttatggctatgctgctttttcccttcaagggaacatttattttattcatctcagtgcattcattttattttttgcatttttgtaatttagatctgttttaaaaaatactttctcctaagatgtatcaattaagaatactttaacaagtgagatttagagtggcttaaacaatttgggatttatttggaagtttggaggtaggtagttgctggggttattttaacataacggcttaatgataaatcaagagctaaggctcttgctaaatttatgatcttaaaatagcatgttttcttttcctgtcagtatggtaaaacgacattgcctaccatcagctccagtcatcttatctgtatttattcaaagtaggaagaacagtgtggtaatgctagctgtatctccctttttaaacaggtattctagagctttcccagacagcctttttcttatatcttattagttggaattgttcatctttatctgcacagttggctgggaaagtgaatctgtgactttccagcctctatcatgagaaacagcaagagaaagaaaataaggttgaggatggctatatcagccacagattatgtgctggcattttgtgtcaccctcccctcaaccccacaacccccagactgttaaatgttacttaattgatagcttttaaaaattcttttcctagagaagtggtttagtcacaatctttaagaataggtaagggtattgaacagggaccatcttctcttctgaagactaaagaatttgacttatgaagtatgaaagacttaggttatatgtaaagaaatttcagatcatcagctctgttagaaaaatggaatgattgacagaaagattgtgtacattttggaacctctttctttggagatctgcataaaagatatgaagcacttgctgcattagatggtttagttgttgtcttgctaaaagatagacagatgattgactatttaaggccttttggttaatgtgctgccgatataacccagatttttcttttttaaatatctcacattgtgtgtttgagagctcagtgtttgggtcttaacccgatcttaacactcagcttgaacttttccttcttgagttatcagcaatttttatcccagtagtttttatttcagggaatgactcttcagtatatttctccaaaccattttaatctggctcccatagcaactgtatcagtagtggtacataccagtgggagctgaaaggcaatgttgttttatattattggtaggaaaaaaaaccacataaaaacatagctgtttcttcaggcctctgcctctattctttgaaatcataatctgaatgcctatattttcggggggcaggctgaataatagggactatcagagcatggctggattaatattaatagcacagttgttatgggctgcattcttcaggcttgatatggtgtgaagcatgtacagagttatctttttggatgagcacatcttttattattctttaggtgttccatgacattgcttataaagcaaaagacaggcacgacctgattgctggtattgatgagttcctagatgaagtcatcgtccttccacctggggaatgggatccagcaattaggatagagcctcctaagagtcttccatcctctgacaaaaggtaaattataggcagttgataattttcagtagctgagatgactctgagaaggaggttgtgttaaaaaaaaaaagtgaagtcaacctgttgttctaatattttcaggttcctgtttaacttgatgtattttctcaaatggatcacttatgtgccttggtttcacgtttccttggcattgtaaaataaatgttatgtggtatgatgttcttcagttattataaattggagatctcagattactacatgggaatgtatcacagacatgctttggcgatgttttggggaccccctgtatatctggaaacataaatttactgaagatgagtccttgtagatgtacatggttaagacattgggtaaaatagttgaagagaaacaattttctagaaatctattttttcccagttgaagcagtttccctcttttaagacatacagttcattcaactttcctattcatccagtcatttgtattggttctaaatgtaacacttaaagaactgtctgttagatagcagaaagaaataacaatctttcaccttaagggttttcactccatctccccattagccagagcatgatacagctaagaagcgaatgaataaaataaactaatatactcttgggctctgttgtcttgcttagaaagaatatgtactcaggtggagagaatgttcagatgaatggggatacgccccatgatggaggtcacggaggaggaggacatggggattgtgaagaattgcagcgaactggacggtaactgacagtttcctttgccattcatgatgaggttctccttaaatgtaaatttcccttcatctatcaacatattattcactagtttgttcatctgttcagccaacaaatatttatggtatacctatttgtcacaggcactgggaatatagcagtgaattaaatgatactgtattcccataaggatcttatattgtagtgacaagacataaacagtaagtgaataagtaaatgtggtgatggttttatggggaaaattaaggcagaagtagggactttgaggatgggagtattgtattccaattttagataagagtggtcagagaaggccttacaaagaatggcaacatttgaagaaagtgctacaggaggtgggagacagaccaggtgggtgtggtgggtgtgtgggggtgggctgcaacagagtgcctggtgtgtgacagggctggcatcaaagccagcaagactagaggggaatgactgagggtgtgttagggtcagagagatggcagaggactgacagatgtaccagccttcacctcttggctttcataattccatttctcacctgtatgtgtattcaacagtgagtagcatgatataggaatgagttctcactgttctgcctccttagcctgcaattgggaattcaggtttcctaaattgcttcagctaatttctttccatgataactcttccttccctaccattagattgttccttttattgggtgttaagtaaaattttaagtgggatacttattttatgaagatatggctttttaaaaacactgcagggtttttttttaacatgaaaaggtatgtcattataatatgcaattgaatgtgaatgaaatgaagttatttcattctcctgatgacccacttggatttctctctcaaattaacaggatattattcctctgtcctttattctgaaaggatagagaacataaaatcttctctcctctcctcccctaacctttttttgaatagttttttgtaaattatttccattaggaatatccttttctttttttacagacatgagttctgggctttaatttttaatttaatcagaatatatttcattcttttatatttcacctttgctaaactaattgaatgtctgtagtatgcctggtaccatgcatagccctgtgaatactaagaaaactgaagcagggcactgagtgcggctaaggtccagtggttgtgcagacagatagatggacgatcctaataaaatgtaatagccaagagtggaaatatgaactgtaagtgcaaggtcaagacttcggagagctgttgagcttcagaatagggcattctaggcagaagccctggggaagactgaggtttgaggcttggttgggagggtgagtagactgacgtgcaagtcactcaactgacctgctgacatttgtcatgggactcagctgcatttcctcccatcacacacctccatggcttcctcccttagttccttcaggtccttaccctaaagtcaccttcttggagaccttttctggccactctatctaaaatttcaaccaccttttttccagtactacataatgctctttcccatttaatttttcttttgatttttatcactatgtgttgcatttattcatttattgtctgcctccttttcatccccagagtaaactccatgaaagcagaggttttttgatgcatgttgttcactgttatgtcctcagcactcagaagagtgccagagtgtgggcatatcgcaggtgctcagtagcatttattgaagatgaaagaatgaatgatgaataaatgagtgagtgaatggatgaatgaatgagggtggaaagggtactatggcgagatgatgaagggcctttatatgatctgcttgcatattaggacgtttttctctaggcaatgaaacattttaatgtatttacacagttcactcttttctaaagaccaactggctgatcttcaggaaatgtgacacctaatttggtgacccaaaaagaaagagatagaagaaaatttattcctttatagttttctggtttcatcgtaagtggttaagtagtatcttgtcactgattcaagcattttaaatatgttgtgtttgatttaatgagttacctcttgattaatttgatggtaatttactttacatttagtggatgtttgcattctctctgcccaggttctgtggtggactaattaaagacataaagaggaaagcgccattttttgccagtgatttttatgatgctttaaatattcaagctctttcggcaattctcttcatttatctggcaactgtaactaatgctatcacttttggaggactgcttggggatgccactgacaacatgcaggtgggtatggttttgaggaggacacaaatagtacagcccagattgccttcctcacccctacagctcagttagaagcagatggcctttcagttactcagcgtgattttctttcttttgctggatgctgcattttactttgcttctggcctgctgctgtatttccagcattttagtaattataaaaatagctcgatgaaatctggcttgagtcacaagtagggaaaggaagggaaggaaatgaggatatacaattctatttgggcaaaagcatatcagctgctttaattttgtacagtgcacaaggtttagatcttctactagtttgactatgtggaacatattctgttaaacttgatgattacactttctttgggaatgtatgattagcttaattttacacatgagcaaatagcttccaaccattgagcgatttgctcaaagttgggtttgcatgtttaccagtataatttggttttaatgaatataagctaacagttatatctcctgcaggtggacctgattctcattaagctgtaacgactctggcttgacttattttgtatgattaattgtaaccacaattagttggttacttctcagatagcattatcttccttttgcaacaataataaagttttggtgatagaaaagatgtgtctgattccctccaccaaccagaaaaatatgtcccaaattacttttagttggtccaatccttttcagaaaagctattgtgctaggtgatgaatacgagtagtgaatgaagttatattcctatgaaaaggaccagattgaagcccttttcacacttttccttccactttactatatattattgtataacctatgtggtattcataagtgatgccagccagcttattttttttttaaatgcagctgattccataggattgctgtttttctactttggttttctttcctgggcacatgcatattttagatttttgtctaaatacaaaaatactatggagattataacatctatgttgacctaagtaaaaagggagaaattatacaattgtattttagtttgtcaagtgcagttttatcttttagttcttatctagtactgcatagcatgttaccccaaaacttagaggcttgaaacaaccattttattactctctttcatggctggatggtgggttggctcagctgagtggttctctctttggtccctcattcacttgcagtcagatggcagcagaggttgaggtcacgcagcagcttctttactcatgtgttggtgcctaagctaggatgtccagaatatttggggtctggatactctccacacgacttctccacatagctaacttgggctttctcacagtggggggactgtgatgacgtctaagagctcatgctccatcagaaagaggcagttgccactcagctttgctttttcccacataaatgtgtacgcagtattgcttcattttctgatcttcaaagagaggctgaaaattctgattcttagtgaaaccagtgatttttaaatattggcaactgattaacattttaggaaataatatcgtgctggtcaaagaacacatacctctgtgttaccagtgagagatctgcagcatgggttatgagaaccaactctaataggacatagagatgaaatagacagagcatgtttttctccttttccctcatttgtaagacaaaactgaatacattaaattgtagtagtgatgtcagtaatagaatttttataaaatttgatctatatccaagttgggcagctattcttcatctaaatgacagcgtaaggataactaaaacagatcgttcaagaaaaaaaatggagaagatggcactggggaaacaccctacggccagcttgaagaagttaatacaggcaaccacatgttaagaaaatagaagaaagctgtgattttgagagggcggtaagaacaaaactgtcttccgtctgtcagaatgtatagagactttcttgtgttgtgcagataatttttaaactttttttgatggacattctcattgagatggggacattgcaatattgcctatgtgtattagtttattgccttttttgaattgaattgtaattctttgcaacctcataagacttggctttacaatgctgcatctgactgtagagaagaagtctgttcagatctgttttgatccctcctagatggatgaacttctttatgagtaggttttgggaaagtagagcactctattatgtaacatacatagttaattggtatttttctcctatgtgatatatgacctgggaaaggccttgctggtggaattagctattttctgtgttctaaagatttcaagaggaacgtaaatactttcagtgcttcaggatgttaagtagtccactaaaataaccatttgctggatgtgactcctaagagctgactttcaaatttatggggaaattttccagatgtaatttgattattttattaatagattttttaacctccattgataatttcactgaaactgtggatggattgtttgaaaatactgaagaacatgtttttcactctcttccaaagcttttttcctttaagaaacatattggcaatatctttctcctagaatacaattttgatacatctagaaattacagtaagtggcaaaaacactgaaaaagaggcatagaaaattaatgactatgaatttaaatttgttgaaccaaaacttaacaaatattaatagttttatatattttaaggactagggagtaaggtgatttaatgtggaatttaaggtggaagataatctcttgattgaaagggtatgtactttaccgcacaaaatttttgattttctggcaggagaagtcttcttgacctgggaccaggataaggaaatattttgtaaatttggtgctaaggcccaggtcattttacaggtctatggcagaagttgattcattccttgcaaatatttatggagtgtctactatgtgtttgacactgttttaagtgctggagataaagatagatgagcaaaatagacaggaattccaattttgaatcccagttatagtgtagggtattgatgaaaacagtctttttcagtcacccccaagagataccagtagtggggtgtagtgggcttatttaggggatgaagtcctctggcttcacttgcttttctaaacagtagaccaagactaagcagaaaagcattggcagagcctgaaataatctgcagttatgtcacatgccttcataaatgtggcagtgggttattcacaaaagcacaggcagctcaaatgagtcaactgagaacagtgtccttgcttttaaaggcagacagctcagagatggttcacatagggcctttattgtcaggctacaaatagacatgggtgctgggtagaaacgtgttgtgaaaacacagatgagtcactgcatggctgttgtctaagcaaactcttctgccagcttctgttcagaaggtcttgcctgtttgaagcatttatgttagagcatatatatacacatatataattagaagcagattattttgggagctatgtagattatttcccatgaaattatgttcaaaatagaacagttgaggctacagtgactctaagtacaatcatacagttataatgctgacatagatgattgcatgaattcactagcttggcgtacacattttgcccattaggctgctctgagagaactctgggacttacagaatgggtattcacaaatttcttgttaaatgtcagcagtaaactttagctacggcttctttgagtaactgaaccactcagccaagagttgacattacattcatctgagatgcaaccctggcttgtgactgtttcctttttttatggtacagcaatggaggactagaacataagctttccgaagtctgagaattatgtgacattcttattttccttttcttatagtaagttccacattaatactctggtctccttgccatattgtcaggtaaacaaaggcttttcatccttaccatcctaaataacgtgtccccttcataactaaactctctgtaaccatgcatgccaactcactacattattgcagtcattcctcgatatcagcagaggattggttccaggaccccctttcctcccatggataccaaaattcatcgatgtgcaaatctcttttacaaaatggagtactatttatgtagtacctttgcacatccatatactttaaattatctctaggttacttataatgcctaatacaatgcaaatactatgaaatacgttatactatattttaaattttgtattagcatttattgttatattgttatgttttatttttattttttcctatttttgatctgcagttggttgaatccactgatgtggaacccattcatatggatgggccaattcatttatattcttggttgccaaacaagtatactgcttaattcatgtagctacttctaattaaattgttaaatgtcagcatataaatatatttcagtagaatttattactactattggttgttcattcaaagtactgtctgaatggaacctatgcaaattaaatcaacacatatttatggattacttagtctatgggcaagatacttatataaggaataatttttgataccttgtgaaaagtcttatattatttaaaaaattgttccttttagtgttatgagatacagaaaagtattttaatttaaatctacattgttgattgtgaatgaataagcacagtctagagtgaagactgagtgaagaaagtaattttaatttttttccaggagtaaatataatcctattttcacaaaccttttagcaaaagaatacagtaagatttttagattctgtgaattttgtgatatttatggagcttaacagagcacattttaagggaacttgtctcataataaggaacatttatagttgccatctccaaatttgagactttattttaacataaagctgtgctgagaatatttaatcaatctgcttaagttggaactatatcatttcttatttacatgtgatgttccttgataagatagacaaatctttacaaagcctattatgtgtaatttataacagcaagattaaagcaaattggtaattgctttactatattgagaattgtacaagaatttcaatttagctgagtgttgtactttggcaccaaaatgcatttcctccttgaagtgaaaatataaggtgacgttaatctacactatcaacatattccagtttcaaagttaggtagagattgtctgttggaatgacacaattttggtaggtaaaaataaatagacatatttagtgacaaaataaggattctgcattacctggttgcctttaaaacttattagctatttcttctttaaagaagctttaaataatgtgctttgcttcatgggcaagttgtgaattaaatcctgtttgattgaggttaagtaatgtgtatttggtgggtttttttatttgaaagacctttgtcaccctatttccttgatgatcagaaaatgatagtgatttaggcagggatgtggggagtctcaactgatgctaaattctaattcttattttgtgtttgacttgcaactgttttgagaataagatataattatgtattgtagaaaattccaaaaatccaaaaaaattacgtagaaggtaattttgcccttaaacccatcaaccagaattgatcattattaacattgtcatgaacactttcccatacatcttaaaattcatgtgtatacagatagattgacataaaggatgctgttacataactttagtatttcatggatgtctttccacttcagtatgaatatttaacatcatttttaatgaccacatatatttatgcacatgatgcatgtgctattactataacagagcccctcttagtggacttttagtttttcccagttttttataaacaaaaaaatgtaggtgattaactacatgtttattatctgtgattaccttcctagggcaaatttctagcagaatgatagcaggatgtgctcattttattttttgatatttgtttcaaatacactacacaaggctataccagttcatatgtctaccaataacggacaaggatgtccacttgcttatacccttgtaaaaacagaattttgtcccatattctcattttttgtcgttctgtgggttgaaaaataatggttcatttttgtttaattctaatttctttgattacttagtgagggtgaatctccttttacatttttattgattgtctatacttctttatacttgtatcattggtatattttccttttggggcattagggtttttttcattgccttatgagaactctttgtataataaggatattttctctttgcttgtgagaaatattacaaaacatatttttcttagggttaccatatgtcttttaaccttatttatgatttcttttgctgtatagatcttaatttttgtgtagccaaaatcgtcaattttttaatagtttcttcttttcatgatatatttagagaggttttccctaccccaagataaaggaaatatttacccacatattttagttcttttctgttttcgtttaaattttttatccatctggaattggtttttgtgtaaggttatactggcctaatgtttccgatgatccagatacgtattcacagctcttcaaacaaaaaaaatattagaaagccctccatgtcttgctcatccagcctattagacttggaactcttggtaagatttttggctcaaacttttcttcaagcagggagataattcgtctttcaagtcttgcctctttttcatttcctgctgggcattgtaaacagaaatccttgcttatgacgacaaagtactttaggcagagcgggtggcaataaggatttggcagctgtgatctgtcaggacagaaatcactgatttattggctgtagctacacaggggaaataaaaaaatgagggttgtatatccagtctccttccccaatgtagatgaatggtctgtgtgaccaatcgttactgatattctgaaggagaaggggaggtacatctcacatttggggcacatgggaatcacttgggggacttaaaaacatactgaatccctaggcattgtcttcattggttctgatttaattgtttagggtggaaataaagaatcagtattttttttattaaaaaatcttctgagatgactctcatgtgacccaaatttgctttagatacttgaatcatttctccacttatttttgatcgtgtggtttgtcttatgctggtgacctgacatcaaaattcatataggttaattctgctctgactgcttatttccagtgacattgggctacctcataattcttgactaaactttagtttcaaaggcttatctagcaaaatttaattttattatttattattcaatatgctgcagagttccttatgaacaccaccaaaaagactggtgtttctttttgctgttataaacaaacaaaattctaaagcctgaaacacgacagtaatgttggtaaatgctttatcatttgatgccacctttatcttccatactttagtgggtggaaaattgtcaaaaaaaatagaaaattttttgttttcctaggctgttctgtcacttttctccttagccttttttccccttctgttattgtcactcagcctccctaaacaggtttataattattaatccaaataataaagtccttaataaaaaggacataaaacaacaaaagtcactttttagtgttatacgaagaaaccaaattgcgataaatccaagttgacagcatagatttttaatatttgatgtttcatcatcttgaatgtgcttgcgttgccttagccatgacaggtattggtggccttggcagcccttgccccaagttgctgaaagacataaaatgctgatattacaaattgtggttggcttttaattttttttagaatcttgctcctatggtctgatttcttttagtaaaaaatatgttttactattctgggacttgtcctaatttcttgactttaaaaaaacatgggccaaacacgggccatccttggtttaattgtataccctaatacaagctgaaaaatattcacaaatgtttttggatatcgattttgacttcactgctgtaaagtaaagcaagctattttgtttattatcattgacttgcacgtgatgcaaaggaatggaaagaagcgtctcttaatggccgtagtgttgccgcctaagacttttctgttgatttaaaatttactctgggaaatactgtagacctaaagaggcttttttttacctgtttcttctgaagactaatttttatcttttcacatcatttcttttgaatttctttttctctccttcgtctcttaaaggaaagagaaataatagagagaggctgaaaagaaggtggtgaaaagcagccaaggaaaagaaatcaacattagattgtatctctgctttatatgagactctgttcttagctctttacatattattctttcattttatccaaataattatcccgtgaagtagctattgattttacagaagagaagtaggatttagaaaggttacccagttggtcactggtagaactgagatttaaattcagatgtccctgactccaagacatgctctttgtgctgagccacctggaagagaccttagagattatccagtccaacctcctcatctttttttttttttttttttttttgaaactgtcgcctaggctggagtggagtggcgtgatctcagctcactgaaacctctgcctcctgggttcaagcaattctcctgcctcagcctcctgagtagctgggactacaggtgtgcaccaccatgcctggctaatttttgtgtttttagtagagacagagtttctccatgttggccaggctggtctcgaactcctcacctcaggtgatctgtccacctgagcctcccaaagtgctgggattacaggcgtgagccgctatgcccggctgtcatctaatatttaaataagtacagtacacatatggttgccatgtattgaaaaggtttttatcagtcagagactatgctaagcaccttacatacattatctatctaatgtgcatactaactccaggaagcataggtaggttaaataacttgcttaaagtcattgatccaggaaataatatggtatagatgtctatctgggattgtctaactccagagtccggtgctccactacagtgtctcaatttttcctctccataaaaatactgaaatttactgaggtgaagtgacatttctaagaccatcagctctctttggcagaacggagcccagactccagatttctgactgccagttgtttgctctttctactgttccacagtggtgtcacatcagaagtggaataaaatgaaagcccaaccaaaatggactagagcactttgtggcatcctattgctccacacctcagagcttagctgtctgcagcctcataaattgctagggaatatgttcctctgagaaatcaggtgtagaaatgcctttatgagttatggcttttaaaaatacacatatccacacattgttttcctttttgtatgagtgaacactgaatataataaatcagaaaagaggtttctgatagttcaccttataaattgctttaaactttacagttaaactacagttattcattacatgttattttttaaatttctgtattgtgaagaggaagatgtcaaatagttcttttctcagaaatactggaaacatctctaagtttaagcaagtttccagtgcagtgtgtataataaatcacctgtctgtgtttcaagattgtcagcaacagaatgaaaactgtagcacttaccaaaggatcaagtactgaaataaaaatatgccttttaacagtcatatggcttccataaatcaaagtggttttctggaagaaattggttgttatctttaccgaatgagcaacaatgcctgttgacctttgataagtggaacctagagtgtcatttgggtcttgcttcttggttcctttaacatttgctgagtgtctacagaccacatgtagagatggtggatagcatgatgagagaaagagaaacatggatgatgccagaagaccctgttcttatcctccccaagattaatagctatgtcaaatcaagtagagaatgcaaaaatctcttcttttgtattgctcttttcccctttatattctcccttacactcagtcagtgctgttttgatccatagtagtgataagaaatatcactctttgcttaataaagaatgttgtagtatatctgcctatcacatgcacccagagtgtagcttgtcctgccacaggaagcattcaagcttctacctttcatcttatgcatacactggtgtaagttgtaaaaaagaaagataaattataaagacatagaaagcccactgtctatgcacaagggttgaaatcctagtctgtggtacaccttttatccttaccaggggtgaagtctggttgggcaagtacatacactaaagacccaaagacttgttgtgtcacattgaatgtgaatttgttcatatcacttaactcccttgaatctcaatgtctaaatgtttcagaaatcaaggcaaatgctatttgttggcctaggataacctttttctgtcttctctgcataaatacatcttggttctgctgcccttccttgttattctggtttctgtccctgtgaggaagaatgagcaagatagtctctctacggaatggctataaataatgagatggtacccttcagccatgtgctggacctacatccatgtaaatggaagtccttatgagaccttcctgccaggcttcaaacctagatttgtgtatgaactggagttgttctggattgtttcagagtgtgtgtatttgccatgagagaagccaatcttactatttaattgtcaagtcttgttttttatccaccgtcatcccaactacattattatctagtgctgctctaaaggatttttgtttgttttctgaattgaattccacccttaaaataggaggatgtgctattgctaatgtcaatctatggagaatgttgctgtctctgaagtagtgttgtaagaaatattttgagtaattattgtaataatggtctcctaagcttttgagtggcacttactgtgtaagttttgtaagttgatttaaaaaacaatttcttcataatcattttatgtatattgtattttctttaaaaatgataagtgaatgagaagttgctggagaacttttgggacagtggtaagaggtggcctagtgaggctgacagatggataggttaactcggaggttgagggtcacaggaaatgactgagggacactgcagattccccagaaatccactctgctccagtcaaggggtcatttcaattaaaaggcttattttatgtggcataaatcatacttctaacaacatgtaatttattgtttaattgaagagagaactcttcctataccaagagatcacatgattttgctccactgttttatctaccactgcatatattattgtgtcctttaaagctatagaatttctttactcatttgaaaatgttttattttaaaagttttaatgttcagatttatagcttcatgtatgaataaagggtttctgtcatctttttatgtttaaaaatcatgtcttcataaaatattattttatgtctacaaaagaaccttcctacaaatacacatgtgcttgtctataggttggtgcaaaagtaatcgcggtttttgccattaccctaattattttaatggcaaaaaccacgataacttttgcaccaacctaactactaactaaactaataactaaagtttgaaataatgaaaaaataggaaacagcctagtttgtcatccttgaaagcattggtcctgagtgacgtgattaggaaagttaggatcgttttgtaagtcagtgatcctcgttgacacgtcacctttgtttttattattctaaaggaaaatgatgggttgatttccagagatgtaactaaaaggaaatgtggccataaaagactacttatttatgttccagcacatatattttctctagaaatagttaattgaagctcttctataagtttacattggacaatgaaaatgtaatgagaatgtcttttgaaattggtgtcttagaaattgcagaatggaggacaaatcacttttttggtcccctttgtgcccctctctatttcaaaggtgtttctctaggaaaaaaatagcttttgtacataaaagagagctactgataagtgcctactatgtgcaaggcgaaatcaggctaaacactgaaaggaaccacaaagaggaaattgccaccaaaagtaccaagtcacttctaaccatttgattctgacgtgtagaagcttcagttagtattttagtaaggatcggagccaccttttgccttctacacaccagccatcatagtaattatagtgctttagagcaggtcgacccttggagtagggaaccatgactaaattgtaggtgaaataaatgtgaaataagtggtggcaatatgcatatgggtaaaagactttgttcttcattcttgatatgtttgctaagaccctcctaatagtatattcacgtggctttatttgcctagtgacatcacaaatgagaagaaaaaagatgtgtttcatttaacatctatattttctttattttagggcgtgttggagagtttcctgggcactgctgtctctggagccatcttttgcctttttgctggtcaaccactcactattctgagcagcaccggacctgtcctagtttttgagaggcttctatttaatttcagcaagtatgtacatacatatttaattgcaaattagaattgcttaattgtagaacctttataggctagatagagcatagaatagtgattaggcagatccaagaatcactcagaatactggaatgttcagatgtgagaggtgaaagggccttagcaattaggtagtcaccacttgtttcagatgtgattcgactgaggctcttatgttgtgtgtatccttgctcccttcccacttactctctttcccattgtcctgccctgtgctctaggggctgatgcctgtggacagcaacacccatgcccctttgccttctggcttcctcttgggtttggctaatggggagtaccaacaagacgggaagagagagagagagagagagagagagagagagagggagagagagagaggtctgagtatgtctgcctttccccagctcaccgtctttgttttagcacagcattctggcagtgcttatccccgaggactttagcccctgtcaagtggctcatccaccttgactctagccctcaccaggctctggtagctctattccttccttggccttttcaagcctgaagttagtagtggcttcctgctgttgatggtccctgagtgccttgccatttgttattacttcagaatgccttctatttcctgccataatcctgactgacatgctagagaaattaaattgattaagttcacatcattcaataatgaaagagactggatgctctttacttagtccactgctcctcaccccagtttcatgttcttaactaaagatagcttccaaaactcagctgaataaatacctaacatttattgagagttgatcatgtaccaagtattatcctaggcactttacatgtactaactcatttaattcttacagcaatcctgtgaggtagggaccacatcctgatttatagatgaaataacaagcacaggaacaataagtaaattgcctaatattatatcacaagtcatcggtggggctgggatatgaattcctgctttctgactccagagtccaagtctcttcaggaatcactagaagtttctaatggacattgcaattatgatatcagcattttcttttagaaatttatggatcattttaagaaggggaaacgtgagtttccccaagtggccacattaatacacaaatagattcaaaatcaaattgggtattccagcctctttctaatgtagttgatacctctaagagagaattgcctttactggcagatctcaatccttaggtagattgaagaatgtctcatggcctgctggcactccttgttggcattcccatagtcatattgttatacatttttaggattttaattttagaactgtcattaccttcatagtacatcatggacttatggactcatatatagcctttgaaagtatgtgtgttatcaaaaatagtcataagatggaggagggaatgaggatttaaaaccagctttttgaaaacagggttgaggatatcagcaggagtcttttgagaatgtaaaaagttccaaattttaagtagtgttgtgaattttctgtaggtaattattattataaatcccttctctatcataattctcagaagaacattggaaagaattttattcatgttagtttatagaaagagtcaaacagtttttatatgtttaaggaaacattgtgtgagacaagaaagcctttgtggaaagattaaacaaggatgtactataaacaggaacaaacatgcacaaactttgcagaaagatttattggatgaaatgtgatcagagccttaatctacagaaaatgtttgcatcccagtttgttttaagtaattgtgagatacagattatttcctttcactaagcaagttcctttctcgttctcccttttttttctatcataattggtaacataacatagttccaagtgatttatttgaaaacagttgtacatcaacaagaaacatttgagaagccatgctttaaatccatcacttagtaatatgtggcaagcgttattttaatctcaatgctatatcatttgtttatgttatagcagcagcagtgataatcttctgtctagatacaaaatatttgggtagatcactatttccaaaagtgtgtttcatcaattactagactcattccatgctccatgaaaaaaaaaaacctctgtggtcccagtaagtctgggaagtgctgtatactatatacccccctcttggtagttcactttagactttagcatgcaagtgatctgaaaaagtccttcagttaagaactattttactttgtcttgcccagattttccccaacatattttaccactgttgaagaataggtagatccttgctttgtaggttcactggactcaaactctgcataatcatggatttatttctgaggttttgatatttgccctgtaaactggagaattataaaggaatatgaatgatatgctgccatctcttaaaatcagtaatagaaggaagaaaatagctcacaacttttcaaagatacttgtagttttatttcccaaattctgcaatctgttttgcattatttttacacattttatcacaataataattagattccttctttttacttgggtgaggaatctgaaagatgtttcagcaatgtgttctaaggtatataaaaacttcacaattaaggttggattttaacttgtattattatcatttggtcattcagtatttttccctatattctttaaacagtttacttttaagccttcaaatttttaattcgtccatgatattaccggatgtatttttttagggagtttatatttatttgtcagtggctgcacattaatttctgtagcatatttcagatgtgacttcttcagtttgtcttgtatccttggttttatgctactgagaaactatgactcaaaaaatctaggaacactgagtggtaccataatgatatgaatctattttttccttttaattcaccataatttcttctttgatctctaatatcatttcctgttgctttttaaaacttaattgctgtttaaatttggcaccaagggaatttattggatgtaataataccattttactgtaatcattactgatgatcaacttatttacatttttctcatcccttattcctctttcttcttgatgctctacacatatcactttcataatgaagtgccattggttttattgactttatttgggtcattcttgttgaactactgtagtattgcttaagtcttttaaagcagctagtttagcatattgtttagattctaaggtttaagtttatacatgtatcttttcctttgtacccaaactaatgttgttcctaaccattagctagttaatggatttgtttctcatcctatcctgtaaacattaaatctataaacaactactagcattcttagaacaaatcaagattgctctttcatcttcttgctagggtagcaaaactaggtaattgtttaaaatttttattttaatttaaggaaaaagtatgttgtctcagaagtaacagaactgtatttcttagttgttattctgacactgactcattgtatgataatgtaaattatatcaaatttctagaactcagttttttctatagtttacttatctcacataggcatgcataggatgaaaacagtggtgttccggacacaaagcaaactgcaaaggaaagtaaaagttatcttcagaaggatcccataaagtctattgaagataactttaccccagtattaataatctccttcttcggtaatgtatttcaatttgcatgattagataagaagagaaaaacaaaagacattgactttaatattcaccctctctagagctaaatacaaatcagatggggaatcatgctacaatttttaaaaggaaaatctaagaatcaagagatttggtttctggtcaagctctgtcaggaaaggccttaaaactctgatgttggataaatgatttaacttccattggtcttggtgtctttatctataaaatgagttgtaatttgacagattggtgtctgtattagccagtgttctccagagaaacagaacccataaaatgtgagtgtgtgtgcagatttattataaagagttggctcatgcaattatagaggctgacaaggctgacaggctggagacccaggggagccaatgctcctatttgagtctgaaggctgtctgctgtagaaccaggaagagctgatgttgtggaagttcaaaggcagtctgctggagaattctctgctgccctggggaaggtcaatcttttttgttttattcaggcttgcaactgattggatgagttcctcccacatactatggagggtgatctgctttactcaaagcccaccaatttgaatgtttatttctcaaaagacaccctaacagaaacacccagaataatgtttgaccaaatgtctgggtgcttcgtagcctggtcaggacataaaattaatcatcacagtacctaaagaactttaaattctaatattctataattttgagctatcataggaacagtcatgtcttggttgcatgagacatagttcataggtcagtgtcagtaactgtctcagccaagtcttaagttacagacatgcatttattcatcctgcaagtctttattgggcactttctatgtgccaggcactgtgctaggtaaagaatttgaattttattctaagggcaatgggaagctattgaaagatttaagctagggtgtctgactttcattaaaagggataattttggctgtggtgtggaaaatggctttgagtgaggcgagtatagatatcagtaaggatatcaatgagggggtttgtatcaggcaaaaacttacctgtgggttgggtaagattgggttggtgctggtagaggtggagagttgactgcctatgggaaagttttaagatatatcattagcagttatcagaaactcattgtctaaaagcaaggttctagagtgtcaagcatgcacaatccttgacttatttcttattctcatgcaagtaatacctactacccgctttttcgtcacaaataaatagagtttaaaaaatcattgtaaagcactctccacataattttaaagggatcagtataaaatggtaagacattaacacttgacccatcctttcagagttgtgaatcttgaactattaatcaatcagttgtaagaaatgggaaaggcctcaaaagacagtgatctccttagatagaagtagcctattctaagtctgctgtgggacaaacacagaaagatgttggtcgcaagatgcttcacacccagcttcagcagaagaatatcagatctgtgagcaagcttcataagaagtggaagggtctggcagtagcatggcaagacagcctttcttgatctgatgacagatcatatttctaattccacctcatgttggtggcacactgtccacacacagtgagcattacaggccatcttgtgccacgttatctttttaactattttttcctcttcctggccttgctctctctggtctgtccagaaagtttctactacttatccttgaacaccttgaattttttctgcgacttcatctttccttccagccagaattagttactccttcttctgtaacattatcacttagtattttatagtgcgattacatttatcgatttgtttccctcagtagaccgtgatgacatagggacagaaaatatattgatcttcatgtctttatgaacccataaaactcatacaaacgtttattgaacacattctaggtaccagtgctatgcttgcaaattgtttactctataaactctatgaaggtagggaccatattttttgaatgagaaaaataataaggttttcacatataaatgatataactactttcaatgcattttcctcaaacttttattgctattttaaaaattgtatcattaaactaaattcttaaacttagtgctttctggctaaagtagagtttcacatttagtggctaaaggtgatcttgtatttttgtcaatctttctgtagacatttggtagttttatattattctttgtgttccaaggaggaggaatctaaacatttttctttcttttttccagggacaataattttgactatttggagtttcgcctttggattggcctgtggtccgccttcctatgtctcattttggtagccactgatgccagcttcttggttcaatacttcacacgtttcacggaggagggcttttcctctctgattagcttcatctttatctatgatgctttcaagaagatgatcaagcttgcagattactaccccatcaactccaacttcaaagtgggctacaacactctcttttcctgtacctgtgtgccacctgacccaggtgagggcattacgctttgtgtttatgctcgctttgtatttggaggaaggtgtaggctccatgcttgcaaattttcaacatgctgtcatggtcctcaggaattagtcttgtttttttctctgaaaaactctgctactgaatttgatgtctcattgcctgaggtattttagctgtatgattcaaccaggaaggagaccaggagctctggaatgtgaacataaccaactcaatattttgaaattaactcaaactgtgggatttgcaaggaattcatgtgtacattattcttgattttataagtggggaaacctggatacatgtattaacagatataaatatgtgacaaacctatcctttgctgcttctttattggtgtaggaatgtcttcctttaagtaaacctttaatacatgattttaaacttatagaagaaaaagatactaatccacttcagataatttaaagaattaaattatgaaaaaaagaaattcagattggaattgcctactggtagaattttatagtttatctctactagacaaataagaaaagaaaggaagagagaagaagaaatgaaagaaggaatgtgatgttctaggagtagatttatattgtagaatccagaaggacataacagcaaaagtaactcctggaaaggaatgtgattctctatatcttagccctttaaaatctatcataccaaacatgagttgacatcagaactttttcacaaaaaaataaaaataaaaaaatgttcagcttggtctttggaattctttcttggagtaattccattataaaattccattttataatatgaaaggcatttcaaaaaaggatttactttgagggaaattgttttagatcttctctcatagaaaaaggaatagggactgggtgtggtgtctcatgcctgtaattttgaaattaactcaaattgcagtatttgcaaggaattaaagtctgtattattctttgtacagcactttgagaggctgaggcaggtggattgcttgagcccaggagtttgagaccagtccgggcaacattatgaaaccctgtgtctacaaaaaatagaaaaaccagccgggtgtggtggcacgtacctgtagctactcaagtggctgagggagtagcaagaccctgtcaaaaaaaaaaaaaaaaagagaaagggataggcatttgtgtcagacaattacatgttagtagcactagtgattctaggttacgcaattagatacaggtctatgtcccttaaaataaaaattgatatacagtccatactttttactaaggtcttttagcaccagaagtacagcagtgttcaaagggctgggacacaaatgtggggcacattcatgcaatatccactgcgacttacagattctgaggaaaaagctcttaatgtttaccgtaaaacaaacatggttatagactagaatgcagaatgcttatgaatttaaaaaataagcaagatactactttttatgcttgtggcatgctgtttcagattgctcctagatattttggtatgcaatgcattcttctctgctacgttggtgaagaagtcttagaagactgatatgtgtcttgaattgagaaaaaagagaacactacttccctcacaataggcagtcagtaacactgatgacaagctagggcattgttgggctgtgtgctcatggattctttttgtgttaagataaattagcacacattaaaataaaacccatatttaaaagcaatgcagaaagttatataaagtagaaatttaaagattcaaactaataagaatgccatatagttatgaaagctaactagcgttcagctgtatactgatttgaaatatttgataatttaaaaagtacttggaaacaagcacaatatgtgtcattcaacccatgatatatattattattagaatcaattaaatgtgctccccagagaaacacagatgttattgtcactcaactatatggagctcttcctaggaaagaagggggataaaactcccccttcagtcagtgcttcagggaagtccagctgttcaaaatattggcttcacaaacatttaattgtgagattttcagccttcctttacatttattaatttatacataaatatatgtgtaagtttatttatttacgacttcttaggcaggtttgagtaatcatacaccaagattttctaaaggaaaaaaaacactttgagatattcatgaagccagatgtgggctttgtcaacacacctgtcacacagaaaaaaacatctaatgtcaaccccatacctacctgaggcgaatggaaacttgtgttcgttgttttataatttggatgttggcagagaaggtaacatgaaaccaaggaagacatatctaaatgtgttcaaattataaaaagtactatggttttacatgtaattttccttctaagaaggatctttgttttttttgaaaaagtgacgttaagggtggaatctattttacacttgcatagcaagtgctgacataagtggtgatagcttttcctttgtccagtttttcccaggctgtgtaaaaagtcagtgctaagtaactaggaagttgtccagaaggactctgacaattcctgctacctctagttggtaccaataaagtactgtcacaggactttgaagtcagaagatcctgtattcaagtcctggtttggctcaggccaaatgtgtgactttcagcaagttccttttcccaaggtatattagccccatcttcctaacctgtaaactaaggttaataatagtacctaccttatagatttattttgaaggaaaagaaagagctattacagataaaattcttaggacagtttctaatatgtaataagtaatcaactgttagctgccattattattgctattactgatccttaaaatttagggttagtatttagccttgaagtgtaagtaatagaataaacagacctatcttcatcatccttccttctaggcatacattgtagggcagttggcccattatgcaacaagactgttggttgtacctcttattggtactcatgaaagatatatatgtgaacatgaagaattttttaagtctatggagatgaaatctatttgtggtttggaaaaaggcagtggatagttatttgcactttcatgacaatttcatatttaacaaaaccccataagattaatgattgtgtatctcccccataaccttagtactttttgacaatgttaatacttctccataaccttactgctttttggtagcaaactgaatacattcatcatcaatttagtatttcttgatatcaaactgaaagatgatagtgagagagtaatacagttgcatatagagctcaagtaaatattctaaaaataacaaaagactggcctttcatcacaacgtgcactcttagtaaaataattcaatgagtcaataatagttaaactggcgtatgacttgtttttcaacactgggacagtatgtaacagtgaaccagcaattgcacagatggagtcgtgatcctgcaaactgagaaatgattttacaggaatggaaataggggccactaattactaaagaaacctctcttcatggccacaatatattgtggcttttttatatgtgtgtgctttgtcaaggcaacacttccttttctctttttttctttcgtcttctcacttgcttccaaaaagcctaatcatttcctaatttttcttttctaaatgcacttttttctccattcattttgctcccaactactgcttggtaacccaagtcacatacataggtttactgagcaactaaggaagcttagttgcaagtgctagtaggaaaatcagtcagaaagtttgacatatgtgagtggatacatgccatacatgggtggtttttgtgctaagatttgcttttcttagaaatgggatagctattaattagtagacgaaatggatgttaaatttcccactgtactttgatgattacatagcagagtgtgtaagaaaaacgataatttagttcaaaagccaaaagtgaaaactgaaaaatatccaattgaagaataatacacaatatctaatttcatcaccaacaccccaatttagaaatgttaatgtgataaagtgtaaatactatgtgctttagagtaaacaaaactgagtttgaatttcagtgttacccagaactaggctaattacttaatctctttgtttgataaactctgaactgggttagtgattgtgcctattcttagaggttactataaaggttaaatgagatagtatatgcaaaatagtttggcacctaatggacactgagtaaaaatttgttctttttcatatttctcactatcctacaaaagatgccccagtgagtttaatcttataatagttgtattctttaaagatttcaaacatttaattttcccataaattttcctagggaaagatactaacaaggcttctactgcaagtctgccttctcccccaaaattaacaaccagtgtgctgttatagataaatatgaaacattgaagctgtatttacaaaaaaaagttaaagcttcattgcattgtagttagagtatttaatactattgcattgaatctcgaggctacaaaagtgttgtatattatacatagtcattaagaaaaaggctttaaagtctaggggcgaggtgttcaattcttctaagaggaatctctttaatttattcaaaagcataaatactagaattttggaaatagggaaaagaacatgggcatccccccaactttcacttgttttctcttctgtcctctgtccttttttacttctcattcattcatcaacaaaaattttctgagggcctgtttcactgctttttaagaattgtgcagaaaatttttgcaatctgtccatctgacagaaggctaatatccagaatctacaaaaaatttaaacaaatttacaagaaaaaaacaaacaatcccatcaaaaagtaggcaaaggatatgaacagacacttcttgaaagaaatttatgctgccaacaaacatgaaaaaaagttcattattgctggtcattggggaaatgcaaatcaaaaccacaatgagataccatttcaggccagttagaatggagatcattaaaaagtcaggaaatagatgctggagaggatgtggagaaataggaatgttttcacactgttggtgggagtgtaaattagttcaaccattgtggaagacagtgtggtgattcctcaaggatctaaaactagaaataccatttgacccagcaatcccgtgactgggtatatacccaaaggattataaatcgttctgtaaggacacatgcataagtgtctttattgcagcaatattcacaatagcaaagacttggaaccaacccaaatgcccatcaatgatagactgggtaaataaaatgtggcacatatgtaccatggaatactatgcagccataaaaaatgatgagttcatgtcctttgcagggacatggatgaagctggaaaccatcattctcagcaaactaacataggaacagaaaaccaaataccacacgttctctctcataagtgggaatttaacaatgagaacatatgggcacagggaggggaacatcacacaccggggtctgttagggggttgggggcaaggggagggagagcattaggagaaatacctaatgatgggttgatgggtacagcaaaccaccatggcacatgtatacctgtgtaaaaaacctgcacattctgcacatgtatcccagaatttaaagtataatgataataaaaagaattgtgctacttgcagtgaagtagaatacacacatatacaaacacatattataaaatgtattgttttttaaaatagtgttaattgctttttgaatgaacaaaagtgagagtttcatttaatccaaactttggaaataaatttctaatctaatacctctgttcatttgcctaatgtgtaaatcttgcagtgactatatactcaaggcacattaatattttgaaaagggtcaaagaaaattttctgaccaggtgtcagttttacatcctgagggaaaagaaactttgctaaaaataatgaactataaaagtaagaaaaatagcctcaaagggatagacactatattgttaacaaaagggatatattttattgatttattgttgactgttccaggagaacatgcttaacaatatatgtgtaagtaaggtgagtaaattctttctcaggaaccaagtgcatccctgtctatattatcttcaagtaatagttggcttttttcctggtataaaactgtaagaccaagcctggtctggaagtaaccatggcttccagttccatacctttaagtcattcacagcataaggaggcttctagatgctctaaaatagttgtcactggagtttcaacatcatttctttctacataatttttctaatatattaataagcgctgtgcaacaatatgttatagccattcaaaagaactgctggattgcatcccctgtgttcccatattatagtcaatatgtgttttttaattagaaagcccattaaaagaaaataagaaaataaaagatcatcctaacttacctcccatgaactatatcataatatatgcaattttatttttattgtgtgccattccctctttatgaggtaggtttaaatcataaactaatggtaaaacaaggaagtataagttcttctgctgtagcatccctcaggcttgcatttgtgagactcctttaccggcacagttgacattttatcatttatggtaatagtgttttggaagagacccatcattttagtttgcttttactgtcttaacctatgttttagcagtttctgcataatgcttgccggaatcagaaaatgggattgtcatcagacctggaaaattctctagttttgggttgtgtaaaagcagatttgtaaaagtttccccatggtaatgtctataacacatctccaagatgtaatgatgggtgggtatgaaagagaagtttttgtgaaattggggacaaaatatgcccatctttttttttttttttttttgaggtggggtcttactctttcacccaaactggaatgcagtggcatgatcatagctcagtgcaacttcaaactactgggctcaagtgatcctcccacctcagcctcctgagtagctaggactacaggcacatgctaccatgcccagcttaaatatattcatctcaatatctccacagtagctcagctctttaacttccagcacaccatcgtagatgaacttgtgaagagtgcctgtagattaaagagtatacaacttgaacttgcctagttgtggtgaaaatctcaatcattaagtcttgctgaaaatacttgggaaaactaaaaggataataagaaaaaaaaaaaagaaaaacttactactgattttgtctgttttaatacttaaggctgagatagtagcaaataatttccctagaagctacttctctcagttttcctttgtcttccctcaaaagccatttttaccctttgttgcctttattgacctagaaattaaaagcatacatatttaacttaatcaaaaggtactagtgtgctcaagttatccagaacccttaaataaatctgacatgaccatgtggcagagcttatttaattttatcctttatctattttctagttacttaattgccttaagatgtttcttaaatgtaatggaataaaactttaaagtttcattatcatggaaaatagtcttaaagtttttcttgttcacatcgggttaatcagtgccacatagctgtaaccctaagaagccatgttgagggcacaggttcagattaggctaatatttattaagcaccatccaaatgccagacattttactaggggattttaatcaactatatcttgataacattgtatatttaaccatcacataaatcttgagagatagctgacattcatcccagggacaaggtctgctttctccaggtcacagagctaggagtaatcttagctgccatttatttagatctatcctgtgtttacaattttgcctacactgtgttattttatctgcacagtaaccttatgaggtagatggtttcaaatccagttttacaaatgaggaacatgtggtcaagaggtgtgaagtaactcctcaagattatgtggtgtgggagcctaagggcactatgctcagaaggtgctgggtccagaattcaagcccagtttttctagtacccccttctccacattgtattaggtgatacataaaagcagacagatatgaccttagtgaccagttgttgcttacacttgacctcacagtctcacgtgagtttgtagctgttcctgatggtacagttcctgctaatatgtaaagcagaggagccatggggtagttcctggggccaggtcactagaagataaaggggaagaacctttaacagtgcaacagatactcccctatgcaagaggtgtgccaacactgacacatggatgtcacctccttttttctctcacagctcccacaactgcagccatacttgatccacttgttctttctctaaatctctcattaaacatgaagaagtcagcttaaatgcctagtgttccattattggaatgctaagcttgtgggagttatttatatcctactgctcaaggtcatcgccaaggtctgatttttcacacacaaaaaatttttggaataaataggctaagaaggaaaagtcacagatacatttgtaaatgtcaattacttacaatattcattccctcattccagaaaatcagctaaaatctgatacatgggaaggaggaaagagatatgaaaatccaagtatggaaaacgatcaacctgtggaagctctctgaaagccagtatgaaacagagattgtcccagtggtaattggctacatctaagttagccagattcctagggcaaagggtttctttgcctcatgagccaggatgctgagtaaatgggagagacagtgtagagtgttttggcttttccatttgacttttccagaatcctaattaaggagattgcagattccatataaatggatcattctgcaattggttgccaaaatatttgcacctggatccaaatggtaaccaacggttcttgtagaccaagcttccaattgggattgatcattttcttttctgtgagcctaaagaaatttacttttaatcttgtttatggactctaacataccctgccaatatgcaattatgaaactgctttttaaatgtatttattttcaagtctttcttctgaagcagatacttattaaaataagtatggaaagtgttatatactttttactgtccttttgatgctggtcttttgggattttgagagccaatgtgctttaatagcttgtcttaggggaaaaaaattgaaattctaaaaggaatttaaatgagcagaattgatgcttatccaaaacttgagagcagctactaaaagttcagattgcaatcctattttagtacacccctggcctttattatccatcattcatttcatgaagaaagagccttgaatatctttcctcctcagtctttactccttgtttttatgcagaaaagtgtgttgcaaaaagaccttcaaactctcgtgacaggaagctgataaaattgcattaaagaatctagctcaagaagggaagcttctcaacactatccaaatagtatctgtaatttcatatatgttgcctttcctcaaaagctcagacagatcagacatttcagatcacagttgagagtcacatcatctaacattggcaagtactatctcatcttgaattctgtggccacataagtcatctgattttgatggttagaaatgctgtgtaagacaagaaagaatgctgaacaaggtcttgctaccaactctgcttctgataaactataaccctgggcaagtaactggcatagcaagcttcagagtcccatccaatatgaaatgggtataaaagtatacccattatatgctctaggatgttttaaaatgaagaaatacagtgtaagaaaatgttctttcagctttttagaacaacatagtaatataaacctagattttgttaataattatttactaacatcttcttccttttgagaatggattcattcggctttattgtttagaccaaatgtcctttagcctgtttttgtttttgtaactttcatttaagttcgggatacatgtgcaggtttgttacatagctatatgtgtgccatggggggttgttttaaagattatttcatcacccaagtattaagccaagtacccattagttgtttttcctgatcctcttcctcctcccactctccaccctctaataggccccagagtgtgttgttctcctttatgtgtccatgtgttctcatcatttagctctcattcataagtgagaacatgcaatatttggttttctgttcctgcattcgtttgctaaggataatggcctccagttccatccatatccctgcaaagggcatgatctcgttccttttatggctgcatagtattccatggtgtatatgtaccacctcttctttatccagcctatcattgatgggcagttaagttgattctatgtttttgctgttgtggatagtgctacagtgaacataggtgtacatgtgtctttgaaatagaacaatttgtattccattgggtatatacccagtaatgggatggctgagtcaaatgttatttgtgtctctaggtctttgaggaatcaccacactgttttccacaatggttgaactaatttacactcccaccaacagtgtataagtgttcctttttctctacaacctcaccagcatctgttattttttgacattttagtaatagccattctgactggtgtgaatagtatctcactgtggttttgatttgcatttctctaatgatcattgatgttgagctttttttttcatatgattattggctgcatgtatgtcttcttttgcaaagtgtctgttcatgtccttagcccactttttaatagggctggttttttttcttgtaaatttgcttaagttccttatagatactggatattaggcctttgtcagatgcatagtttgcaaaaatttccttccatacagtaggttgtttgtttactctgttgatagtttattttgctgtgcagaagcgctttagtttaattaaattccatttgtcaatttttgcttttgttgcaattgcttttggcatctttgtcatgaaatcttttcccatggctgtgtcctgaatggtattgcctacgttgtcttctagggtttttatagtcttgggttttgcatttaagtatttaatccatcttgagttaatttttttatgttgcataaggaagaggtccagtttcaattttctgcttatgatcagccagttatcccagtactacttattgaatagggaatcctattgcttctttttgtcaggtttgttgaagatcagatagttgtagatgtgcagtcttatttctggattctctattctgatccataggtctatgtgtcagtttttgtaccagtaccattctgtttttgttactagagccaggtagtatagtttgaagttgggtaacatgatgccttcagccttgttctttttggctatttgggctcttttttgtttcatataaattttaaaatagttttttctacttccacattgagaagaatctcagtggtggttcaataggaataacagtgaatatatgaattactttgggcattatggccattttaacaatattgattcgtcttatccatgagtgtagaatgtttttctattgtttgtgtcatttctgttttctttagcagtggtttgtggttctccttgtagagatctttcaccttcctggttagctgtattccctaggcatttattctttttgtggcaattgtgaatgggagtttgttcctgattgttgttaatatttaggaatgctagtgatttttgcacattggttttgtatcctgggactttgctgaagttatttttcagcttaagaagcttttgggctgagactgtggggttttctagatgcaggatcatgttgtctgcaaacagggatagtttgacttcctctcttcctatttggatgccctttatttctttctcttgcctgattgccctggccattacttccaatactatgttgaataggagtggtgagagagggcatccttgtcttgcacaagttttcaatgcttccaagttttgcccattcaatatgatgttggctgtgggtttgtcatatatgtctcttattattttgaagtatgttccttcaacacctagtttgttgagagttttttttaacatgaatggatgttgaattttatccaaagactttcctgcatctattgagataatctggtatttttttctttagttctgcttatgtgatgaatcacatttattgatttgcatatgttgaaccaaccttgcataccagggataaagcctacttgatcgtggtggattagctttctgatgtgcttcagcctattttaattccctctgtgatctgtaatgaaacagaataagaacacagataataatgcacatgtacttgctttactgctgaaatagagaaactctggcaacagctagctttagtttaacagttttacaatctaaagtcttgaaagaccagagtgaattccaaaattgaccaaaagtagggctcaagctaaatattttatctcttttagttgtttttcttgttttttttcttccccaatttatctgctctcattcatttttagtcatgaaatgccctcttttctaacttcctttattgacagtaaacaaatatttttgagttcctgttaagagctacactgggtagattttagggaaaaacagtgaatgagataagcttcttctgtccctcccttatggatctcatactctaatgtcagctatcaaaacctgtgtgtttcttcttaaaggtttatataggcaggacttgaagcatggcaaactaaaaaggcaagctagtggctcagagggactggagtagggatcaaacagtagctagcaattcagatgttaaataaactatgggaccctaaacaaacaaacaaataattaaaaaccctgatgtgttgttttataatatttctataaattaggaatatgctctaatagtttattttataatacataaagctttgcaaaataggaaaaaggcttatctgataaagaaaaatattttatagaatactttttaaatactgttttttaattttcagacacataaaattttaaaaaaggaatgaaacatttccaagaggaacgttggtttaataaattaggttcttcttcaagtgccatcttcaacctataaatgacgccacattatatgaaaataatttttaaaattagattaaatgttcatctccattatatttttattatttaatactgtctcttgttttcacacattttgcaaagataacctttctcatacactgttgaaatttccaaaagctacaaattatttaagtcttaattagtaaagcttcaatatgggaaattttcctgtacattctgaagccagtggtcaacttaatcaattatgaacagcccttgttccactagcaaaatatattgagtaccttgtagtatcagggaagttttatttcttttttttttgaaacctgaaacaaattttaataccgtctctttaaatattcaccatcatttcttatcagattagagcacagcagatgtgtccaaatctttgttttatctaggtgaaaggtgaacacatttataataaataaaaattcattgtgcccttatgttgttattaaagacatttttactgtataaccctgcttttaaaaatacctaattatgcatttaaggtctttttctattttagttttatagtataaaataattatcttttgcttacagctaatatctcaatatctaatgacaccacactggccccagagtatttgccaactatgtcttctactgacatggtaagtgacttactattttaaattaccttcatactgactgcatattgtatacttgtttataatacttataatatatgatgtcttctaccactcagcaattctggcatgaacacatacgtaacaattattgacagtggagggacgggaaaaaaaaaagccactttcctttgctctagtcagcactttttttttatttgccttaaaaaaagctgaagccaatatttacttctataacatgctttttaaaacttcttagaatttaactgccacattgcattaattgtaacctcgaaatattttcacaagggaaaatgtgagaagttggaaaatgagagcacagtatcctctctctgtttctcgtatggttaagaattcttaccaaccaaatggtgctgtgttctcttcactaagagtgattgtagcaggacctttcccctgtcacttagaacggactgtgcctctgtcacatgatatcctttcccatggctggtaaccaaggatctttaggagactggaactaagctttaaaaatgagctgttttgcatggaaggtcacacactggaaggaggcttttgtattggagaaaaaggggaaagtgctgtttcagacttccaattgtgctccttctatgctgaacatggaatcttaccaaagaatatcaatctttcagttataaagacagaagccataataccttgtgttgatagagtgcccatctctcaggagacccggacatttctacagatattatgtagtgagtgccctaacatccctttcaaagatgatgttttgtatctttcctgggcaactctcacgtgaccctcttttttgtttttatattctgtggctctcttgactgctttttttgctgttaaagtcttctctgacttttctcaaacttacttctctatttcttccatgtttgatgttaggtgtgtgaaaaagtatgtgtatatgttttaccacatgcatacagaaaggagttcaactttcagtctttcaactggtcagcctattgcctaaaaggtcttgcctaaatacaggcaaaactgcctccttctagatttgaaagaattttattcaaaattcttatagtaaaaatataattaataaactataatttaataatatatattttaattaaaatatagctaatatagttaataaaaacataagttaatttgtaataaatattagtgaaacactcacttccactgacttaagaaaagaaattgttatctaacttaattctttttgtaactaatcaagggaatcattaaaattaatgaacttttaagccctgtcgttgggaagtcctggcagaaactccagcaattgatatgtattaaaacaaaatgttacaataaggttcttgaaaaaaaatggaagttctgattgacttctagtgtgactgtgatagagacatagaggcataatgtcatttcaacttagctactatttatagaacacctactagagaccacatgtgttacacatattctcatcattgtagaccttaatatgtactataaccatcaacataaactaccagggttaattacttctattttatacatgagagaaactgaagctccagagggtaaatcacctttcttgctttaggtcacatagccatatattagtagaacaaagatttgaagtgaagtctgggtggttcttagactggtgccattcctcgtataccatgatgcttcaatgtacacaaatggcaatgtttacccttccagttcctatagatgccccatattccagggcagcaatcccttcatatgcatcaattgcataccttaattaaaatgtgaaggtgctatgttcagcacctctagggaaagaagttagaagaaaaaatgtgtgtgtgtgtgtgtgtgtgtgtgtgtgtgtgtgtgtggtcatgaaggccaacttttattttatccttcatttctcctttttcatttatatcattacccgtatttatatgttgtgtatacacacacatacaatataggtaaatgactcagaaatgagttttaaatatgatttattaccatcaatcataatgatcaattattgaggcacctactaggtgccagactcttcacagtaattgtctataattctcacaatcactttatgagttattagatgttacccctattttatagatgaaacagagacttagaaaagttaactgacctcccaaagaccatacatattacaagtacatggtaaaatgaggatttgaactcagggttttctgcctctagaatctgccttatttctgtcctttcaggaagcagcatagtgttttatgtagaggaactcacagatattgagttcttgtgtcagactgcctggttcaagtgcagggctccatgacttaataagctgtggaaccttcttagtttcccatctgcaacatcgggatggtaatagtacttatctcaaaggtactgtgagtgtcaacttaatagataggcagaacttggcataatggatggcatgtagtcatctctcagtcagtgttaggtattgttactgttctttctaggtattatcatttgattaggtcatgcagcctccataactcagaagtttaatggagagaggaaattgggaagcccatcttctgagaggctattgcgtcctccgtctgcttggttatgctagccggctctcctatcctgaacctttcctaggacacacagtcatcaggacttaattttccttttttcatttcagccataattagattgtgagagaaggtacaggaaaagtgacatgcatcccctggagccagcaaggcttgctctcacaggccttcagtacatcctgtcagatgaaggaaggtcttttcccttcagcttcactagcatgaagacaagctttctttttcatggtggtagggatatgtttcagggaaaagagcaggagagaggggtattagagcatttaaacagagattagaactctaggataactatgtctcaagataaaaaggcaggttttaaaatttccatttattgttggaatggtgtctttatttcttctcactttctccaatttttctatagatttcttgcttggtatatccctttaacttgcaaaccaaattccttaaaaggttcctgtaaacctttaaaattagccacagcttgttcacactgtatctagataatgagcattaatacctgttggcttgcagtttccagctctcagagtgtgagacaccagatttcaaaatcaaatgtcagtttcttctgaagaagtgattgaaaggatcagttagtattttgtttttccacatcagattccttttttttaaattgaggcataccttaaaatacacagttctgaagtattcattgaaatgagttttgatggttgtaactactatccaaacaagatacaggacatttccatcataccagaaggtcccatggaatgctgtattttgtttgataccctagctttctttttgggggatctttctttgcccaaatactctgcccctagccttcagatggcagatacctgagccctttccaaagtggttgaatgcctcagagaagtttctctcagctctgcttctctgcctcccatcttaagaaagtggcttccttacacttaagagaggctccatgtatctaagggggaactcttttagctttcctgtccaacccccagtctttcgtgtattacccatgcacttggcaaagaccgtgagaaaatttggtgagtggatgcagacttgatctatgcctaggactcctctgaattctgctctgtcaccccagtctgcatgtagccattaaaaattcgttaaatagaaaaattagttgggcatgatggcacacacctgtagggttatagtgagctacaatcatgccactgcactccagactgagcaatagagtgagactatgtattaatatcttaaaaataagtaaataataaaataaaaaatgtttgacttttttcctcatcttaatggtgagttttttaaaactatgatttttatagggtatctagcttgctttggttgttaggatgggagtgatggcctctcacaattttctataatcccaatcacaagcagaacaaccagtttatcttgatgtcttataatggtatagacaactgtaactcaaatgcatgctgtagatgataaggtaagatttcagattactgcaaatctggctcaccactgtgggggaaaaaactctaaataagtacatcaacaacttaaccttgaggcttttattagtggtatcactctcatttatatttttaaaagcacatattttatcagtcagtactcaaaagggctacagcacgtcctcagattacaccacttcattgtaacgttgatgaaaaaaagagaaattgactctcaggctactgcctatgtggagtttgcatgttcttctcatgtctgcatgggttttcactaggcactctggtttccttccacatcccaaacacatgcatattaggttcattggcgtgtcttaatttcccagttagactgagtgtgggtgtgtgtgtgagtgcaccctgtgatgagatagtgtcctgtctagggatagttcctgacttgcaccctgagctgccgggataggctctgaccactcacaaccctgacctggaatgataataattatcttacttatttttactaatctttcttaaatgtatgtatagctcacatttattttaacatttaatattagaaatgttttgatctttatttagaagtttggtgatgtttttgtgaccaggaatatgccatagggacttaactcttgcttatagtgattagcctatggtaaaactggtggttatacattcattttgcttaaagttccagtttccatgaacctattgatgacactgaggatctactgtaatacagaacctttaattattatttttattattattattacttattatactacccagagatgctgttaatcatgggactaagaaccttcatgatgattctaggaattaacattcatttcatgggaaatggaatgtcgtattaatattcttgtgcaaagcatccttgtgattttctctcaccgagaaagtcaagtgtaaaaaccattctgtccttaaatctccttgaagattacatattcctacttttaaaagtattacgtaaaattttaaatatgcactaaaatagaataaagcagtgaagccccatatacgcatcacctagcctcaatggctttgaacattttgtccatcctgtctcatattatccctcactttttcctttagggaggatactgtggtcttttaaattttaaaataaatcctttggtatgcatactacttttcagaactgcgagcagatccactcagtataacagggtaattctcttgaaaaagatatctcaaaaaatagattgaaatctcttttcatgagatttaccacagttaagatcctcagcaacttgatcattttctttaaatcttttcccccagtacccatttacctaaacaatctgcttcagcccatctggtctatccgctgttagatccccacacaggtgagcattcagtaagtctttaaaactgaatgaagcattgtatgttcccatatcagcatctttgctcttgatgtctctctctctaatactttacttcttttttgctgccagtgcagaaagaaatgcacatctaaagtttgtcgcttttattcccttttgttacagttttgctgtccttctgctcttactcctgctgccctttgaatacgagagttctgcaaaaaccagtccctcttttagggcttagtttaaattttgttttctctgtactcaatgaagatgattattccctcttctgaccatctgatcttcataccactcatttagatacttccttttactgggttatattattagttaatatttaagttaacatactttatttctctagggaaagttttaaaagttgttgttttatttatctttattgtacctgtaaaggttacattcgttcattcatgcacttaggtctcagtgcattttctattttcctgtggccacatttttctattttctagatgtgactgttaactcaaaatattctatatctaattgaaatagttttgccagatttagcaaacaaaaataaaacatgcccagttaaagatgaattttaaataaatattgaataattttagtataaatatgtcctaaatgttacatatgaaacacttatactgaaaatactatttgttgtttacctgaaattcaaatgtaactgggcatcctacattttacccagcaactctaaattgaaagtttattttaatttaatcttgtcctccagataaaaagagtagataaattggtagatatcttccttgaatatgtcatatattccagacatgatgacagatttcgtttgttcaatcaacaatgatttcttcagtgcctaatgtatcccaaattgaattctgctactgtcttgctctgctcttttctttttttttccttattgatgcacagtccctttggtcctcaggcaccatacatttatcatttttagcttttatccatccttagtcaaaacagttactaagtcctgggacgtctctctctctgtctttctctctctctctttctccgtccctctctcttcctccctccctctctctctctcctttctccattcttgcatttcccatcaatctcttttccttttcatccccctaaccagattatttctcatccactataaacacctcaaaagtttttgccaaccccaaagaacttgccttaaccttgcaatttgcatattctaacctattcttttgttatagtatttcttgaaaaaatagtctgtaattgctgttgcaattttttcactcccacgcatttctcagctcattgtactttttttacccatcactctgatgactttttcatagtgttttgtggtatcttcacttccattgtggataccctagatgttttacactcttttttcctgcacatttttcccttgtagttttattgtcttacaactgcaatgatcagctctttcctgatgactcctaagtagatgtctctaaacttgacatctctcctagatctaggtctcagacccactagatatctctctgaatattttcaaacttacaacagtgaacattgaggaagctacaataaattgtaataaaacattacacgcatcgtaaggaaaacagataatgtgctaagagaattctaacaggcagaaaggacttctgagattgtgttcccatttgtcttgttctttgttttcttcagagacaggattttgctctgtagcccaggctggcatatagcggcacaatcatagctcactgtaacatcaaactcctgggctgaagtaatcctcctgcctcagtctccagagtagctaggaccacaggcatgcaccacttagcctggctaattaaaaaaaaaaataatggagatgaggtcttgctatgttgcccaggctagtctcaaattcctggtttcaagtgctcctcctgccttggcctccctaaatgctgggattacagatgtgagccaccatgccagtactgtcttgttcttaaagttctgatttaaccgtttaaacagtatgtatagaattttgcataggaaataaagatcaaaaccatagagatgtgagaaccacttgtaagggctagagggcagtagcagtgagatgagttaagggtctcctgtattaaggccagaggagacaacagtggcttgaacatcaggtgtagcagtggtcataggtaagtttgttggtgaaatggaccctgcctgaagttttatggaattaaccttcactgacatcagcttatatggaacaataatattgaaataatacagataatatagatgtgttttcagtgatatctaaatagaattgtttattagctagaatttaagttttatgggagtaggaaactttgtattctgaaatgccaaatatgctgagatatgtgcatgccacctacagtttttatactgaagtccttaatgaaaggtggtatttggagactcaagtttctggatagtgatacaaagaatcatttgaggcttacaaaatagtgatcatttggcattttaagttgatgtaagcaagaagacatgtctgtcatttcatgtacatctgtatagtcttcacctcaacctgaatctctgtaagaaaatcaatagaacttcctgtcaggattgctttaatgcaacttatctgtgggcaactctagttatagagaagaattctgctggtattaaagtgctgaagtgaaattatgttaaatttttgctgattttaaaacaaagaaacctgttagctattatgacttctaaactttaaatgtatgctgctgtaaacatccatatgcagaaacctcaaaaacaaaatgagatatgattaatcacctttcagaagcagagtttgataaaagcaagaatgcagttcagctgtttacaagttgaagcttctataggaaaaatatttcagggaaagatatatagtttgttttttattgacttatgtaagcactttaccttttgagctctataaaaaaatgaactctttctgggaagagattcttcttttatgactatattactcatatcatgacaattcattgaatagtaaaagacattgatgatgtgtttggtgtgaggtagaactcttgtcttcaaaggacaggagaaatttatctttccacatttatttgcaaggtgttttcaaataactcttctgatagcatatgacatatccattagccctggacctaagaggagtaagttatgggtatttagaatggttctaagctgagacacccagtcccttccacccaaccacattggcatccatttagataggtacaattttgaaaatctcttcccaggaaagagccagattgtcacagtatgcaagaaagtgttgtgcatagcaaaagaaacttaggtaaaggatatttaagaagattcaaacatcagtataagggcgatctgtgcagaaattttattaagcaaggggatgagcaaccaggagactgcttgtcacataaaatgttcaggcagagaatgaatgttcatctttcaggactattgaatactaagggtgatagatctgattaaatcatccaagtttcctccaaactctgatattttagaaaaggtttcttaggcttagaggccattaacttttggttgactggtaattcaagtaagtcggctgttatagaagcagattcagatatagggatttggggtgcgtgtgactttattgagacagtggtctcaataaaagcagattgagagaagcagtataagacagggaagtagttaaacaaggatatggtttcagctgagttttgcttcagcctgatcccatgggagctgtggagcataaattgtgcgtagagttgctctcacctggagacgaagagggtatagttttagaccccggttagtattggtcagtaatcggctatgagagggcactacattgcaggtgaggtggctcttaaatggctaatggcagttctctagagaaaaagacagctgtgaattaagagcagctagtactcagagcaactgggggatgggtgtgctggccctatctactatgctagcaaaaggattctcctatgtattagaaacaaaaaataggaacaagagtgagctgctagagggaagcacagcactgaccccacaacagccatacatgaaaactgaccatatgtttgaggccatgtaacatggagatggatattccatacacaactacatagccttaaaggcatcacagcacatacaaagaacagatgctcataatgctgacctagagtcaagaagaaaaaaatctatactttattagaatatgcaattgaaaaagcagggaccatccatatttttatactttaattgcttaaatcaccagtccctagttatttagaaaagaaacagaatagttgtgaaagtgcttggtgagtagttaacctattacaacttttagagcattaaccatagggccatcaggtagacacgtaagaagctgtgccttacaaaggtaagtactttttgaaaaagggaaccgttttagagagtcttacattttgagacttagaatattaatgtgtctcagtttactctcaggaaggtgtgcaggaaagaagtactttgtggtttctattgaacaagtgggcgattttaaggctgttgcccaaactaggtaacaaattgcatcattctcattgtattttcaacaattgccaccctcttggcccatcttatctgttattccatgaacacctcatcaagtttcaccctccagtgcttattttcaaactgttttacagaaacttttggtataattcctatagctcatcaagtatcaaaggctgctttttatatgtcaatgttctctagaaaaattttaatgtttttcttcttcagtaccataatactacctttgactgggcatttttgtcgaagaaggagtgttcaaaatacggaggaaacctcgtcgggaacaactgtaattttgttcctgatatcacactcatgtcttttatcctcttcttgggaacctacacctcttccatggctctgaaaaaattcaaaactagtccttattttccaaccacagtaagtacctgaactttaaatgattttcattggatttacactgtatcaacaataatacaactttacaaggtgaaaaaggcacctgtaattcaatgtgtccaatataattttgtgcgttttaaacattacacttcaatctttgttcatgtgcatacttattaacgtaagtctagtcaagctttggaaaaccttccaaggactttctcacataattctgtcatatacctctcataattctgaatgtgctgaaaggaaaaaaaatgagatgaattatatttaaaaatgcatgagtgaagaaaaataccttttaaattcattgtgtttaagtacataatcaaaaactcttcatgtttatcaggaatttccatggtgtagaatttcttcagcagctgtacatttgagtattttagtacttgaattatgggctgtgggagtaaacttaaattgtgttgttacacaagtattggtgtaagatatgactgtcatatgagccaaactttccttcccgtaatgatgaatgccgtagtacagagaaacagataattaaactgggttgtgcaaacatcctgtctcccattaaaatgcctgagtgagcttagtccaaactgtgggttcatggagatgctataagaaaagactaatatttagttaatggcattttggttttttgcctgcagaatcaaactaagataatcctttgctttacagttcagttcttagtgtttaggatgtcagtatttcttaggcaatcttgattacacctgatttatatcagtgacctgctctgtacagctgacatctcatgaaacagctcttcttgcattatatgtaaaaggaatggaagaattttaaaatatgagatgcacttgatgaaattcctttttccaaattctaggaaatgaaaatatatttactttcacctagaaaatttttgactctctgattcttcttacaaaattgaaaataaacagaagggttgataatgaaatgtctagaagtagatagcccaaggaatgaaaaatttccacaaagtgaaatttagaaagaagcattcaacttagtctgcttaacatgggcattacaagctggtgatccacaggcagaaagaattcaacccacagccattctttgtttagcccacagtgtgtatacatacaaaaaaacacactctctctctcttacttgagacttttggtagaatctgtactttgcagatagttactgttttcccagctctgtgttgtctaagaattggctgtttcatgcattcagattaactgcctgttcttaaagacactgggaaatgtgctttcttgatacacctcttcaactgtgtgggttttgtgtagaacagattcctgggtaaaagtctttgaggacaattttttttttctcttgaggtttttccttcttaataagtaatttattgggcatcttggattttgtttgtttgtatttttggcttatactttgtaaatcatcaccacctgccaaagtctgatataatttaagtatagtaagtagaaaagtggaaaatttgtgaagcacttataagtcataatttgcaaaataaactagtttcaactttgagatgaatggagatcctttttctaaattttaaaatcttaattgaccaataataatgtaaactatatatttctggagtacaatgtgacatatgtatatgttgtggaatgattaaatcaagctaattaacatatccattacctcacatacttattttttgtgatgagaacatttaaaacctactcttttagcaattttaaaatatacaacacattattattagctatagtcatcatgctgtgcagtggatctcaaagacatattcctcttgtctgatactttgtacgctttgaccaatatcctcccattccccgcctccagtaggcaccattctactgtctacttatatgagtttgacattttaggtttcacgtgtaagtgagatcatgtagtatctgtctgtctgtgcttggctcatttcacttaacataatgtcttccagataacataatgttatccaaattattgctaatgacagaatttcctttgttttatggctggatagtattccactgtttatatgtgccacattttctttattcatctgttgatgaacacttaggctgattccatatcttggccattgcgaataatgctacaaagaacatgagagtgttgacatctctttgagatcatgatttcatttcttttggatacatacacagaagtagggttgctggatcatatagtagttctggtttttattttttgggggaaactttcatactgttttctgtaatggctgttctaatttacattcccaccaacggtgtacaagggttaccttttctccacatcatcaccaacacttatcttttgtctttttgataataaccatcccaacaggtgtgaggtcatatctcattgtggatgtaatttgtagttccctgatacttcatgatgttgagcattttttcatttatcttttggccatttatgtttcttcttttgcaaaacatctattcaggtcctctgtctatttattaggtgaattgctgttcagttttagtttgatgcaatcctgtttgtctatgtttgcttttgttgtcaaaaaataaccttatgttgaagtgtaatgataggttatttgatattaacaataatctttgcccagactaatgtcatggagcttttcctttatgttttcttttaataattttacagtttcaggtcttatatttaagtctttaatccctggctattttcttttttttgtatttttagtagagacaggatttcaccatcttggccaggctggtcttgaactcctgacctcgtgacccactcgccttggcctcccaaagtgccgggattacaggtgtgagccaccctgcgtggccttaatccattttgaattgattattgtatatggtatgagatgagggtctaatttcattattctgcatgttgatatctagttcacctagcactatttattgaagagattgctgttaccccattgtgtgttcttggcatctttgttgaaaatcagttggccataaatgcatggatttattcctggactctgttctatcccattggtctagatgtctgtttttctaccagtaccatcctgttttgattactatagttttgtagtagattagtgtgatgcttccagctttcctctttttgctcaagattggtttggctatttggggtcttttgtgatttgatacaaattttaggattactttttctatttgtgtaaaacatatcattggaatttggatagggtttgctttgcatcagtagattgctttggtagtatggactttttaataataccaattcttcaaattcatgaatacaggatatctttccatttactcctgtcttcttcaatatctttcatcaattctttataatttttgaagtatagcacattcacctccctggttaaatttattcttaaatgttttattcttttgtagctattgtaagtgggattgtgatttttttttcagataggttgttgttggtctatagaaacactactgaattgtatgttgattttatattctgcaactttacttaatttttttattacttctaaaatttttttggtggagtctttatgtaagatcatgttgtctgctaacagagacaatttaacttcttcctttccttcctttcataggttatatgtgtctaggaatttacccatttcttctaggttatttagtttgttgttgtataattgttcataagtatctcttagagttttttttatttccttgttatcaggtgtaatgtctctttttaatcactgaatttatttatttcagtcttcttttttttttagcctagatattggattgttggttttgcttattatttatttatttttatttttaatttaattaattagttaatattttttgtttgtttgtttgttttgagacagagtccctctctgtcacccaggctggagtgcagtggtgccatctcagctcactgcaacctctgcctccctggttcaagcgattctcctgcctcagcctcccaggtagctgggactacaggggcgtgccaccatgggacctggctaattttttgtatttttagtagagatggggtttcaccataatagccagatggtctcgatctcctgaccttgtgatccccctgcctaggcctctcaaagtgctgggattacaggcgtgaaccaccatgcctggcctattttattttatttttgagatggagtcttgctctgttgcccaggctagagagcagtggtgccatctcagctcactgtaacctcagcctcctgggttcaagggattcttgtgcctcaacctcctgagtaactgggattacaggcgcttgccaccgcgcccactaatttttgtattttttgtggagacgaggtttcactatgttgaccagactcatcttgaactgttgatctcaagtgatccaccagcctcggcctcccaaagtgttgggattactggcgagagccactgcaccccggctgattttgtttatctttaaagaaacctcaacttttagttttgttaatttttttaacttgtcttagtctttatttcttctttgagttttattatttccttctttctaacaattttgagtttagtttgtttttgtctttctagctccttgacatgcttcctcaggctgtttattagaaatcttctttcgatgtagtcatttattgctataaatttcactcttagaactgcttttgttgtgtcccatgggttttggtatgatatatttccattctcatttgtctcaaatttattaatttcatttttaatttgtttacttacacattggttatttagtagcatacatattcaggagcataaacttccatgtgtttgtaaaggtttcaaagttttccttattgttgatttatagttttatattgtggtcagaaaagatacttgatatgatctctgttttcttaaattttctaagactagttttgtagcctagcatatgatctgtcctggagaatgttacaaatgcagttgagaagaatgtgtattctgtagcagttggatggaatattctgtaaaggtctgttaggtccatttgatgtatggtgcaactgaagtccaatgttccttgttgattttctgtatagatgatctgtccattgttgaaaatggggtattgaaattcactattattgtattgtcttctgtttctccctttagatagaataataatatttgctttatatgtttgggtactctgtgattaggtgcatatagatttataattgttttattgaatcgattcttttattattatataatgaccttctttgtcactttttacagttttcgacttaagtatattttatatggatacctctgatcacttttggtttccatttgcatggagtatctttttccatcctttcattttcagtctgttgtccttaatagtgaggggatctctagtaggcaaactatagtttggtctttttttttttttgtccattcattccctctgtatcttttcattggagaacttaatttcatttacattcaaggattttattgataggtaaggacttactcctatcattttgttaattgtactttaattattttaatatccttcattcttttcttcctctcttgtttacctctgtggtttggtgctaagctttgtttcttttccctttctcatgtgtttatcagctgtaatttctatctttgtggttgccatggggctaacataatgagtcttgtaattataatactctattttaagctgataacaacttaactttggtcacgttaaaatactttagacttttttgctccctcccacaatttatatgtttgttaccttaatttactttcttatctactgtgtgtttcttagtcactaattatggcttttcttgttttcgaccattttaagtttaaaccttcatactagagattgaaagatttatgtagcaccattataattctgtgtttgattatgaatttacctctactggtgagttttatactttcatgtattttcatgataataaatatcatccttttgtttacagttgtagctcttaagcattttttataagactgatctagcaataatgaattccctcagcttttgcttgtctggaaagatctttattatagctttgctggatgtggtattggctaacagttggtttttgtttccacactttgaatatattatcccattctctcctgactggcaagatttctgctgagaaatctgttaatttcctaatggagattctcttatatgtgacttgatgcttttctcttgcagcttatagaattctctctttgtctttagcttttgacagtttgagtattaatatgccttggagaacattgtttagggttcagtccagttgggaacttttgagcttcttggatcaggacatccatatttctcccaagactttgaggttttcagtcattattttgttaaataggttttctgttattttatttgtctcttctttcactgtcacacatataatgcaaagatttattcacttaattcttatttattttttcctctgacttgattgggttaattcaaaagatgacttcaagttcaggaactctttcatcttcttgatctagtctgttcttgatgctatcagttgttttttttatttctttcactaaattcttcactgccaagatttctgtttgattcttttttatgatatctttcacttttttgaatttttcattcagatcatgaattatttttctgatttcactgaattgtttgtattctatagtatctctctgagcttctttaagatcattattttgaattccttttgatctattctataaatattctttttttggacctcctactgaagacttattgtgtttcatgggggggggggtgttattattatttttcttttttgctttttttgtattttttttaaatatccaacctctattctaattcagggtacatatacaggatgtgcaggtttgttacataggtaaatttgtgccatggtggtttgctgcacagatcattccatcacccaagtattaagcccagcatccactagcttttcttcctgattctctccctcttcccacctccccctcccaacagaccccagagtgtgttgtttttctgaatgtatccatgtgttctcatcatttaacttccacttataagtgagaacatgtggtatttggttttctgttcctgcattagtttgctagggataaatggcccctagctccatccatgtccctgcaaaggacatgatcttgttccattttatggctgcatagtatttcatggtgtatatgtaccacattgtctttatccagtctatgactgatgggcttttaggttgattccatgcctttgatattgtgaatagtgctgcagtgaatatatgtatgaatgtgtctttataattgaacaatttatattcctttgggtgtatatcctgtaatggatatataaaactttatatataaaatggatatatataaaacttaaaatatatccagtaatggatatatacccaaaggctttttctccacaactttgccagcatctgctattttttgaccttttaataatagccattctgactggtgtgagagaggatctcattgcagttttgatttgcatttctgtaatgattagtaatgttgaggtttttttttttcatatgtttgctggccacatgtatgtcttattttgagaagtgtcttttcatgtcctctgcccagtttttaatgggattttttgtttttttcttgaagttccttatagatgctggatattagacctttgtcggatacatagtctgcaaaaattttcttccattctgtaggttgtctgtttacaatgatgatcgtttcttttgctgggcagaagctctttagtttaattagattctgtttgttaatttttgcttttgttgcaattgcttttggtgtcttcatcgtgaaatctttgcccatgcctgtgtcctgaacggtattgcctagatttttttctagggtttttatggtttggggttttatgattaagtatttaatccatcttgagttaatttttgtatatggtataaggaagaggacaagtttcaattttctacatatggctagctagttctcttggcaccatttattaaatggggaattatttcaccattgtttgtttttgtcaggtttgtcgaagatcagatggttgtaggtgtgtggtcttatttcttgattttctatttagttccattggtctatgtgtctgtttttgtaccagtaccatgctgtttggtttctgtagccctgtagtttgaagtcaggtagcatgatgcctccagcattgttctttttgcttaggattgcattggctatttgggctcttttttggtttcatatgaattttaaaatagttttttctaattctgtgaagaatatcaatagtattttacctggaatagcattagatcttcaaattgttttgggcagtatggccattttaacattttaacatattgattcttcctattcatgagcatggaatgctcttccatttttttctgtcatctctgatttccttgagtggtggtttgtagttctcattgaagaggtccacttccatcattagctgtattcctaggtattttattctttttgtggcagttgtgaatgggagttcatctgtgatttggctttcgactttcctgtggttggtttaaagtaatgctagtgagttttgcacattgattttttatcctgagacttagctgaagttgcttagcagctcaagaacctttggggctgagatgatggggttttctagatacagttttatataatctgcaaactaggtagtttgactcccagtttggaaaacgcatttcaggatatcatccaggagaacttccccaacctagctagacaggccaatattcaaattttggaaatgcagagaacctcagcaagatacttcacaagaaggtcgtcctcaagacacataatcatcagattctccaaggttgaaagaaaagaaaaaatgtttagggcagccagagagaaaggcaagatcacctacaaagggaagcccatgagaccaacagtgggcctctcagtggaaatcctatgagccagaagagattgggggccaatatttaacatcttaaagaaaagaaaattgaacctagaatattgtatctcaccaaactaagcttcataagcaaaggagaaatcaaattattttcagacaagcaaatgctgaggaaattcgtcatgaccagacctgctttacaagagctcttgaaggaagcactaaatatggaaaggagaaacccttaccagccactacaaaaacacactgaagtacacagaccagtgacaccataaggcgaccacataaacaagtctgcaaaataaccagctaatatcatgatgacaggatcaaatccatacataacaattctaactttacatgtaaatgggctaaatgccccagttaaaagacacagagtggaaagctgcataacaaaccaagactcatttgtattctgtcttcaagagaccaatctcacatgcaaagacacacataggcttaaaataaaaggatggaggaaaatttaccaaacaaatggaaaacagaaaaaaagcttgggttgcaatcctagtttctgacaaaacagacttcaaaccaacaaagatgaaaaaagacaaaaggtattacataatggtaaagggttcagttcaacaagaagagctaactatcctaaatagaaatgcttccaataagggagcaccaagatttaaaaagcaagttattagagaccgtcaaagtgacttagactcccacacaataatggtgcaagactttaataccccactgacaatattatacatatcatcaagagagaaaattaacaaaggtattcaagacctgaactcagctctgcatcaggtagacttgatagatatctacagaactctctgccccaaaacaacagaatatactttcttctcatcaccacacagcacttactttaaaattgatcacataatcggaagttaaacactcttcagcagatgcaaaagaactgaaatcataacagtccctcggaccacagtgtaatcaaattagaactcaggattaagaaattcactcaaaaccataaaacatggaaattgaacaacttgctcctgaatgacttttgggaaaataatgaaattaaggcacaaatcaggaagttctttgaaactaatcagaacaaagagacaatgtaccagaatcactaggatgtagctaaaacagtgttaagagggaactttatagcactaaaagcccacatcaaaaagctagaaagatctcaagttaacaagctaacatcacagctaaaagaactggagaaccaagagcaaacaaacccgaaagctagcagaagacaagaaaaaccaagatcagagctgaactgaatgaggtagagacatgaaaaacccttcaaaagatcaacaaatccaggagctggttttttgaaaaaattaataaaatacataggccactatctagactaataaagaagataagagagaagactcaaataaacacaagcagaaatgatacagggggatatcacaactgaccccactgaaatacaaacaaccattagagaatattatcccttaatagtgtttataatataaacacctctatgcacatacactaggaagtccagaacaaatggataaattcctggacacatacaccttcccaagactgaaccaggagaaagttgaatccctgaatagaccaataatgagttctgaaattgaggcagtaataagtagcccaacaacccgaaaaagcccaggaccagatggattcacagctgaattctaccagatgtacaaagaagagctggtatcatttctactgaaactattccataaattaaaaggagagacttctccctaattgactgtatgagtccagcttcattcttataccaaaacctggcagagatacaacaaaaaatgagaagtttagccagtatccttgatgaacattgatgcaaaaatcttcaacaaaatgctggcaaaccaaatccagcagcacgtccagcttatccaccacgatcaagtaggcttcatctctgggatgcaaggttggttcaacatatacaaatcaagaaatgtgattcatcacacaaccagaactaaggaaaaaaccatgtgattatctcaagagatgcagaaaaggcctctgataaaattcaacattcgtttatgttaaaaactctcaataaactagttattaaaggaagatacctcaaaataatgacagccatgtatgacaaacccacagccaatattatactgaatgggcaaaggctgtaagcattctccttgaaaaccagtacaagacaaagatgccctgtctcaccattcttattcaacatagtattggaagttctggccagggcaatcaggcaagagaaagaaataaaggctattcaaattggaagagaggaagtcaaactagcctttttatatttcttgtgtctctatgttgatatcacacatctagtgaaatagtcattttttaaaattcatggagtatcttttgtagggagggatttttttttttctgtaaatgggtcttagggtgtcatttggtatagtatattggctttcattctgggtagactcagtagcatggttgccatacattttcttcagcttaatttttgtaagcaatctgtgattgccttagtggcctacttcatgggggtttgtgatggtggtagtgtggttttgctaggctctttagaatgcctgggccagtttcagaactgggaacatttgtgcatgatgggtcagcaggctgtgtggccagcaatctggggtttggggaccaggggtgccaccaggtagcctcttgggtaaggagcatggcagactggctagctgttcagtgactttcctgctttgcaggtcctcttgttcctcatgggtgaagatgccccatgggtttgagcaatgggttcttagttgtactgttggttctatgctttgtacacctggggttgtggtgctgcaggcacctgtgtaaacatggtgaaatgagggtgaggcctcaaggatggagagaagcagtggcttctgggtcccaggacaggattccctctaacagttagtccagtttaaagatggtgccatgccatagcaccttagtttgcagggtagagtatatacaacctgagctcctactctggggcaatgcagctgtgtaaactcctagaaactccctaatctgaattttggacttgtgaggacaggggactctcctgtagcaaggacttctggtatctctggtggctatggggatttctgggggcctccagtttgtctttttgtcataataataaatcttccttgattctgagccaatcccagcaagaagatagtgtgacgaagcagaaggatgccttttcctttgtctatcctgggctttcacactccatagggatttcactgcttctccggatctctcccaacataatttctatcactctaatgtaaatgtaattatttatttgctattttggtccctttttgtggagtggatgagtgccaggcaattctagtcggccatcttaatgaagtctgaaatgaaaatttttatgtcttcttatgaattgatccctttatcattatatgatgactttctttgtcttgtttttttttacttacaatttattttatctgatgcaaatacagacatccttgttttcttttggttgcatcctttcagttttaaactacgtgtgtcctcagaggtgaaatgagtctcttttaggcagcatatagttggatcttaaaaaaataatccattcagccattctgtctttttagtggagaatttaacccatttacattcaaggtaacttttataggtacagactttccactaccattttgttaattattttctggttaatttgtagattcttcgttctttccttcctcttttgttgttttcctttgtgattagataattttttccactgtgttttgatttcttactttttatcttttgtgtgtcttctagagatttttgctttgtggttaccatgaggcttacataaaacatcttacaattataacaggctattttaagatgataacaacttacctttcattgcataaaacaattttgtacttttactttatatctcccccaataatttttttatgttttggattttacaatgtatatcttttaatgttatatatccctgaacaaattattatagcaattatcattttaaatagttttgtctttatcctttatatcaaatatataagtaatttacaccttacaattacagtattaattttctgaacttaactatacacttacttttatcagtgagttttatactttcaaatgtttttcagttactaattagaatcctcttcttttaccctgaagaattctctttagcatttcttgtaatacaggtctggtggcagtgaacttgctcagcatttatttgtctgggaaagtatctctccttcatttttggaggatagatggtattcttttttggcaatgttttccccttatgctcttttttttgttttattttggagatttgtcttttatttttcattttttaaggtgtctttagtatttattagaatgtaaataaagctgagtgctaattttctctaaacttaaaaaatacaactttgatctgggcctttgatacttttggtctattttattttatttattgcacaaatttatggggtatgtgtgagattttgttatatgtgtataacaaaaggttataagggtattaagggtatctatcacccattttcaatacatttttgttaagtatagtcactctaaccttttatcaaacattgaatttgatccttctgtctgtatcattatacctataaccaaatttattctctgccctacccccatcacccttcccagattctgttaactgtctttccactccctacctcaatgtgatcaaattttttagcttccacatatgagtgataacatgcactatatgtctttccgtgcctgacttatttcactaaacacaatgaccttcggttttatccatgttgctgaaaatgacattatttaattctttttatggctacatagttttccattatatatgtatatgtcacattttctttatccatttatctgttgatggacacatagtttgatcccatacctttgctattgtgaatggtgctgcggtaaacacgtgagtgcagatttcctatccctttgatatagtgatttcctttccttcgggtagattcccagtactgcgtttgctggatcaagtggcaattctgttttgaggtttttgggaaatctcaatagtgtttccatagtgactgtggtagtctaccacagtctaccaaccatataaaacatttctaccaaccatataaaacatttcctctttctctgcatccttgtcaacatcttatttttggtctttttagtaatagctactctgactggggtaagatgatatctcattgtagttttgatttgcatttctctgatgattagtgatgctgagcattttttcatatacctgttggctgttactgtgtcttcttttgagaaatgtctattcgtgtcctttgcccacttaaatggaattatttgtttttcttttcttgagttaagtaccttgtatattctaaggttagtcccttgttggatgaataatttgcaaatatattttctcattccataggttgtctcttcattgtgtagattatttcttttgttgtgcagaagctttttggtttaaatcccacttgtctatttttgtttggttgccaatgaatttcagatcttaatcataaattatttgtctacaccaatgtccaggagaattttccctcggttttcttccagtatttttatagttttgggtcttacatataagtctttaatcaatgttgagttgatgtttgcatatggtgaggtaggagtccagttgtattcttctggatgtgggtatccaattttcccagcaccatttatcaaagagggtatactttacccaatgtaagttcttgtcagcttttttgaggatcagttagctgtaagtgtatctttatttctggattatctactccgttctgttggtctacgtgtctatttttatagcaatactatgctgatgtggttactacagcattgtaatatatcttgaagtcagataatgtgatgcctccagctttgttctttttgctgctcaggattgctttggctattcaggcttctttgtggttctatatgagttttattaaataggatttttttttctaattctgtgaaggtggcagtattttgaaacagatcgcattgaatctgcagactgctttgtacattatggtcattttaatggtattaatgcttctgatccatgagtgtgggaagtttttctatttgtggcctcttcatttcatcagtgttgtgcagttttctttctagagatgtttcacccccttggttaaatttattcctaggtattttattttattgtattgtatctcttgtaaatgcaattaccttttaaattattttcttggctagatcttggtgtatagaaatgcgactgggttttgtgtgttgattttgtatcctgcaactgtactaatttttttaatcaaatctaagagatttttgatagagttttggggttttattagatgtaagactgtatcgtcagcaaagaggcacaatttaacttccccttttccaatttggatgtcttttatttctttctcttacctggttgcttcagttaggacttccagactgtgttgaataggagttgtgaaagtggatatccttgtcttcttccagttcttagaggaagggctttcaacttgtcctcattcagtatgacattagtggtgggtttgttgtacaaggcctttattattttgaggtaggtatgttccttctattcctagtttattgagagtttttatcatgaaaggatgttgtattttatcatattgtttttctgcattgattgagatgactgtatgatttttgttctttatactgttgatgtgatgtcacatttattgatttgcatttattgtgctgagctatccctgcatccctgggataaatcccacttaattgtggtatattatcttgtagatgtactgttggatttgggttgctggtattttgttgagaatttctgcatctgtgcttatcagaagtattgacctgtatttgtctttttttctattcttgtctgtttttggtatcagggtgatattagcctcatagaaagtattaggggatgatatggtttggatttatgtccccacccatgtctcacgtcaaattgtaatctccagtgtcagaggtggggttggattatgggagcaaatttcccccttgctgctctcatgatagtgagttctcacaagatctggtcatttaaaaatgtgtagaacctcccccttcaccctcttcctcctgctgcagccatgtaggacatgtctgcttcccgtttgccttccattatgattgtaagtttcctgaggcctccccagccatgcttcctgtacagtctgcagaactgtgagccaattaaaattcttttctttataaattacccattctcaggtaattctttaaagtaatgcgataattgactaatacagaaaaattccctcctcttcaattgtgtggaatagtttgaggaggattggttagttctttgtttttggtagaactccacagtgaatctatctagtcctgggattttcgttattgggagacattttattactgattcaaaatcactactaatgatggatcttttgagattttctatttcttactgattcaattttaattggcatgtttccaggaatttatccatttcctctaggttttctagtttattattctatacttgttcataatagtctctcacgatctttgtatttttgttgtatgagttgtaatgtgtcctttttcatttctgattttacttggatgtcttctttctttttttcttgtttagtctagctagcagtttattggctgtgtatattttttgaagaaccaactttttgtttcattgattctttgtatttttttagtctgtatttgttagttctgctctgatctttattatttctttttttcctgatagttgtggatttggtttgttcatggttttctgtttccttgatgtgcatttttagattgttaacttgtaatctttctacttatttatttattactgtaaacttccttcttcatactgttttgctgaattccacaggtttgggtatattaggtttttattttcagttgtttcaagaatttttttgattttcatcttaatttctttgttgactcaaaggtcattcagaagcacgtttaatttctatatatttttataaatttccgaagtttatatttgtatttatttctagttttattccattgtggtctgagaatatagttgatatgattttcattttgtgaaaatttttagaaattgttggtggcctaatctatggtcagtcctggataacattccatgtgctgatgaaagaaatatatattctgcagttgttaggtagaatgttctgtaaatgtctgttaggttcatttggtctaaagttcagtttaaatcggtgtttctttgttgattttttaaatctagattatctatttaatgctgacaacggggtgttaaaatcttctactgttattgtattgcattccgtcttttcaggtctagtaatatttgctttatgaatctgggtgctccattgttgggtgcatctatttttagaattgttatatcctcttcctggattggttgctttatttcatataaaatgacttttttaaaactgttcttgactcaaagtctgttttatcttacgtaagtatagctactcttgctcacttctggttttcatttgcatggaatatctttttccatccctttagtttcagtctatatgtccttactggtaaggtgagtttcttataagtagcatatagttagatgctacttttgtaagtccagtcagcagttctatatcttttaagtgtagaatttaatctgttaatatttaaagttattatttatatgtgaggcttcatttctgtcatattactaatagttttctgttgttttgtatattctttcttcctttctttttctcttattatttgtggtttgggggatttctttttttttttttttttttttttttttttttttgagatggagtctcgctctgtcacccaggctggagtgcagtggcatgatcttggctcactgcaagctctgcctcccgggttcacgccattctcctgcctcagcctctcgagtagctgggactataggcacccgccaccacgcccggctaattttttttgtatttttagtagagatgaggtttcaccgtgttagccaggatggtctcgatctcctgatctcgtgatccacctgccttggcctcccaaagtgctgggattacaggcgtgagccaccgcgcccagccaagggatttctgttagtggtactatttgagtcctttttcttactcttttgtgtgattgcttcaccagtaatggctgtgctcccaaaatggtgccctgccatagctgctcaggtcttagtggggtgtgagtgacccagtgcaaattcccagtctggtgtactgccccactgggtttctaaaccaccacccttgctaatgtcagtgttcatgtgggtagaggagctcttctgtatttcagattgcagccgactgtgtaagggatgtggaccactgaagttctcttaattaccctttccctgcaatatggaacccctctagtctttctagccacttgctttcttccttatctgtgcctcaggtgttttctgtgagttccttcttggactcttgtggtctctcctatgtgttctattcgaggtatgtttctctagtcataattttggttcttctttctggaaagagtaggtgtctgtagtcagccatcttgcatcagaatccttcttcagctctttgaatatatcatcccagtctctcctggattgtaaagcttttggtgcaaaatacactgctagtattgttggaactctcttgtatgtgatttgcttcttttctcttgctgcttcaagattttctctttgtattatattttttgtcaatttcattatatcttgatatagtatttttatgttgaatctgattgaagacctttgaccttcctatagctagatatttatatttccctagatttgaaatattttctgctattatttctttaaataaacttcctacccctttgtctctctctttttcttcttgctctcctataacttgaatatttgttcttttgatcctgtcacataaatcttataaactttcttcattctttttattgttttttttctctactgactatatattttcaaataacttgtctttaagttcacagattcttctgcttgatcagttctgctgttgatgctctttattgcatttcttaattttcttaattatattttttggctccagaatttctatttgtttttcttttaataatttcatttaaaattttgaatgtaagtaatttcagtctctgttacatttctagttttggtcatttattgttttcttgattttgtagcatcctgtctttttagaaagtttgctgggcttccttaaaataattattttgaattcttcgatagttcatatatcttcatttttgagggatgattactggggctttattttttcctttagtggtgtcatgtttccttgattgttcttggtcttgtagctcctgatttgtttctgtgcatttgaagacatagagactaatttcagtccttgcagaatgtctttgtctggaaaagtttttcaccaatcagcctgtctagagattatggcaggttttctgttgtgttccacaggcaggcttgctgcaggacttcccagttaggctgacctggttcttgtgtaaacaggtgagtgcacctggcacctgggtccatggtttggaactggagcctaagtccttgagggcaggcctggggcctgggtccatgagggctggcctagaacttgagtctgtaggagtggtccaggagccttggttcaaggagtcttcctggcttcaggatgtagtggggtgggtgtggaccctgtgtctactagagcctggctccatgggtaccagcctagagcctgaggctggcttggtgctggggtaggtgtagagtttgggatcatagaggctggcctaatgcctgaagccaaagtgactggtctggtgcctgtggctgtgggggccagcctggaagctggttgtatgggtgcttgcctggagactaagtctgtgagggctattgtgggtcatgcaaccacagaggctgtcctgaaacatgggtctgctgaagtgggcctggatcctagatctgctggagtgtggggcttaagggtctagcctggagggtggagccacagggactgacctggtactgggcaagcctggagcctatatgcatggtacttacctggtgcctaaggccaggggtgctggcatggttctgcagcaggcctgaagtctggggctctctgggctgacctcactctacactagtctggaacctggggtgggcctggagcctgaggccacaggggctgatgtgatgctggacaggcctggagcctgtattggcagggactggtctggaggctgggtctgcagctggtgacctgaggactagggccatagagtctggcctggtgctgggggtgttcagagcctattatacctggggttaccctggacctggggctcatctggagcctagggccactgggtttggcctggcagtggggtgggcccaaagaccaagtccccagagcaggccaggagcatgggattgctgagccagcctggtgtgggggcaacccggatcagtctgtggttgatcctagagtctggggttctctaccaactagagtctggggttgtgggggcctacccttcatttgggttttaccgggacagacctggtgttggtgtccaaggcaaagactggtactcatttccctctcctctcaaacagagggtttccctctccaggatgtgttgcctgaggttgaagaaggggtaatgtggagagtgtaaaactgtccttcctaccttcttcaatgtgtcttttcttatttctatgttaatctgttcccttagctcttgtgaaagtattttaatcagtgcctagttgttcaaatttatgtttctgcagggcaatgaccattggaaagtcttagtctgccatcttgctgatatcatttcccagactaaatagaatggtcattttaactttctatgtatccaaaaccttttccttctggcagtaacacccaagttgaggataactcttcagacttaaagaaattctcccctcataagagcctaagcaggtaatttctcagtcattgataaatattgctaagaatgtcatgacaatgtaaaactagaataatgatagcattctagttacaattcttttaaagaaagttctcagcatagtttagaattgtatataccaaattataaaatacacagagaggagaaagtatgtgtgatttctaaaggtcagtgtgtaactgtgtaggttttcagtctgtcatcctcccttataccccaactcatttcacatttacagctaagtaataatatatacataaatacatatgcatacataaatgaatattaagaacatcattttttttgacagagtctcgctctgttgcctaggctggagtgcagtggcatgaccttgggtcactgtaacctccgcctcctgggttcaagcaattctcctgcatcagtctcctgagtagctgggtttacaggtgtacaccaccatgcccagcatattttgtatttttttgttgttgtttttttagtagagactgggtttcaccatgttggctaggctggtcttgagctcctgacctcaagtgatctgtccgccttgccctcccaaagtgctggtattacaggcgtgagccactgcacctggccaagaatatcatttttatctctcattcgccaaaatatgttttaatttaagctgacattttaaaatgtggtttctgtaggtaggtgcagacaggtgtatagattctaatatatattcttaaatagtgttttataattaaaacatatgcttaaacattatacataagacaggcttttatagctgtggaaacaatcaaggctatttttagttccttcctcacaccaacaattcacatgaaacctctaaagactcaaaatgctcatgttgagtgacaatgttcttgccatgcaaaatgtctcattctcctttagcttacacagtcatttctcttttgttctctcatttttaaacatttgtatgagttgttaagactttaaactactttaaaacacttagacttctcttttattagtcagatcaaccagcacaaggtcggatacagactaagtactcaatacttcttgactagtggaaaccagtcaagtacagattagtgctgcattttgtgggaagagcacaatgtgtgagaatccaggacctgtagattctagtgccagcactaccactgactaacaatgtgctctttgatagctatctacaaacttcagttacctcacctataaagggaaagtttggctagatgacaattaacagccttttgagctctagtactttataaatttaaggagttttctggctccatttcctatactcttctaggcttatagcaatgattgaaccttacaaattagcaaaaaataattatctccatcatatcacatctgccagtctctctttgtggatgattcacaattgtcatacagcaaaggcaaattcaaaacatggttgactttcttgtcaaaattgaacttactcatttctctgtatttcttttttttgggggggtggctaggggtgggagagagagacggggtttcactgtgttacctagcttgatctcaaactcctggcctcaagtgatcctcccacctcagaactcctggccttgagtgatcctcccaactcagccttccaaagtgctgggattatgggcatgagccactgcacctggtctgatcaaaattttaaagtcatatttggtgtatgagtcaggattccatcaggaagcaaaggatatgctcaagttaagataatgtgaggttttgataaaggcattatttatgacaggcatgagccaccacatctggctccttatattccttatctcagctaataacatcacctatccttagggccacccaagatcaaaatcttttttcttctcctttattttttttaaatgagatgaggtcttattcagtaacccaagctggagtgcggtggagtaatcatggcttactgcagcctcaaccacctgggatcaagcgatcctctctcctgtcttccgagtagctggaactacagtcacactccaccaggcctggaaaattttttatttttatttttgtagagatggggtgttactgtgtcgcccaggctagtcttgaactcctaggttcaaacagtcgtcctgcctcagcctcacaaagtagtgggattacagatcttagccaccacacatggtctgatcaaaattttaagtcatatttggtgtatgagtcaagatcccagcaggaagcaaatggtatgctcaaattaaggtaatttgaggatttaataaaggcactatttatgaaggtgaggttagagtatatggaaaccacagaagatgtggtgtcccagacagtgagactggggagcccatagtcgaccacacaggttaacttcctaaggcagagagtgtggtagagggggatagaggatgaatctggtgtgacaaagaaagatgtccattgcatgtggcactccaggtttttctttatcaaattaaacttatcacagtccttttctgataagtttattccactgcagtctttctcctttacacttacacttcgattccactcgttctggctcccattacctttgctgaggcccatggtcaatgacccagtctctttccatacctcacggagccactagcaatccctcagtatgaacacttaaaatgaaacagattaccttttctaccctgtctatcaggtatttaatttgtgtattagacagttctacagagccctaatgctcagtggaacatgggtcaaataccagtactccattgacagtcttttttgtattcaccatcctttttaaaggggtgtatcagtctgttatcccacactgtaactggtctgttctatcagcctcgagtctttagtcagagtctttagtcaaattctttcagcatcaagacttccattaggaatatcacagcataatctgtgattttctgtggcaggtggctcagggcattaacatgaaatgttcttccagagtcctacaccaacaaatgatcataaacatggaacaaagatgccatcacgcaccttatgtgcctatgtggtggcaaatgaaaaccatagcttaaaaatagagcaggattggggttagtagaaatcagaaagccacagatttgtggtggcaaaatgaaaaccatagtttaaaaacagcagtattgggactagtagaaatcagaaagtcacagaaccgcatgaattaggcaaaattattgatactttgatatagtcacattcagtgtggctggcatatgtaacaggcccaagaatgccattcttaaggaacttcttgattttctaattttcttccttagaatatgcattaattctaaccctcacatgaattggtgtaatcataagattatttttaatatacttccttgttgttattgtcatttaaataaacaaaatcactaaattccaggtaacatcaatagctgtaacaccttctatgctatatttagataatgcagaatgttctttgaagtgtggcgcttcagaaactttaatgaaaacataatgagcattttagttaggtgacagcatttagtttttattgatgtaagacacaggaaagtctagaattgtacaattagctgtattctagaaccatttttttaattgacattttggtctgtggccattctattaaaattgcatgtgtttaggttataaacagccctttacaagaatcagatgacatccccattctggtttcttttgctctcaaaaattatcttggtgaatggtaaaaattgtcaaactaaaacaatatattaaaacaggagtaagaaataatgggcatgtattatatgtctcactttagtgttcgccatcttgggtggcatttgtcttctttagtgacaacaaagcaaacgactctgctatcactaaaggagaaccagattttcaaattcttgaggtattttatatcaaggaaaataatttttaaagtcaaatttgtttttaatccaaaattgtttttatacttattttcttaagaatgacaaagggatatttagttataaatgcaacttagtctgttaaacatttaacaaaaactatacaaatacttcagttcttacagacatatgaccaaaaataaaaacacagtcgacctgaattgagccccaagaaaaataggttgggagcagtgattggccaaaacatttcgagaaagcttttagtggttgcaaagaggtagtctgtggatagaagtaataactttaaccatggaaacctcttggtcctgagcactttcagcttatttatccatcagagaaaagtcaacaacattgaaatccctgcactaacacaaaatggtctcctatcccattttgggattgtctaagttatacatatgactgattaattattatttttaaacttttactcttgtgtattaatataaattgtaaaaccatcttctttttaggccctggaaccctttatgatagtgatttatttgagttttatctaagataactctattagaggttcaaggaatgttgataatttggtcttaatgaattttagtgttaggactttaaacaccatctagtgtaacatcactgctgacatgtgagcttcatgctgcttgaatgcttcctagaacaggaacctagcatcctgcaggcattcttgatagaaacacaaatctacctttccgtagcctctgtccacagggtctgcacttgccatctggagctacacagaacaagttaatttctctttcctgtgatagacttcacatagttgaagacaaattctccctgcaatgtctttaggcctgccatcatttttcttgtgatgtgttttctgtattcccaaatcctccggctgaccttttctagattagctccagattttcagttttaatttagaagatagtaaccagattgagatgtagtattttccatgtggtttgatcatttgcttctggtatacacacattgggtttcttgttctactgtgttcttttgagacagaatggaagaaaaggtcttttagtgattgccaaagtctcctcagcatctttgctgaaccacttcactaggcttactctccttcctgtagacttccattgtcaagctccaagcccgacccagataaattctccagttcatctctcttctttgctcctcaaatctctttgacttagaacttatggcactaaaatcgtagagtcaaaatcagactttccttttattaaattctgattatagtgggtattattgaatcaaagtacagtgaattaggattattgctatgactactattaatgcttttttttttgcatagtgctttatagcattggctactggggggtcatatttcaaacttttagggtattttggtgcctttttgtgattaccaaaatagccataattgtctggcataatttttctttcatgtaaaataaatgcttttttacactgctgtttagcattttccaagcaccacaatcactagaggaattgacatcataagttaaaatgtactgagagcccacagggtgcctgtcgttgtccttgtctctttataacagctgtatccattgagaactgctctgtagactcatggccctttccctccagttaatttaggagcagctgcagcccttgcaaagtgaaaaccaaatgtcctctgggatttccaagaaacctaattcatttttccactgtaaattaactggcttctcactgttagtgtctctatgattgtgactctctcaataattaatacagtatcatctttcatggatattatgtttataatagatttattaagttgttttgccaaagaaggagagaacagcatatgtttatttgaatttccttttccatccacttaatttcttctttgctttggtagtttaaatatttaagctgctggcttcttattagattaattgagatactgtctaattaatcccgcagaggacagaaatattattctcctcttcatttttataattaaaaatagtaaacaaaaatgaaagagttcaaaactagtctgatataaaaaaggcattacagtcttaactgagacatgcttctctttccgtctttcataaattgaggtagaaattatatgctgtagcacatccatgtatcatttttaaaaacttttttcatggcaagctcttgctatctattaattatcttaatttgtgttctcttagattgtgataatttatattcctaagatattgaagtttgagcctggagagacttaacatttgatttggatggacaaccacaatttatgatgtttgttcaagctagatttgagggctctgaagccacaggtttgggcatgaactcttgagggaacaggttttctcatgaaaaccttggcacttctacttttaaccattaccagtaacagctgttaatagtagagaattaggaactatgactttctaatttgatatctttattgatatattgacctacatagcaggatgtttttggagtttttgaaagagatcaagtttgatgaaatgaaagggaaaacaaatgatgaaagaaaatcacatactcttcttttctaaatgcgcttaaaactgtgagaagggcccaaagagagcagttcttatctccttaaagtcggactgagaagtcttatttacagaccccattgtgtatctagtagactatgtactcattgctagacatttttagggcactttctacttctactatgtcagttttgcctagctcaaattaaagtttcattttagtatagagtaagacatgaatagcctgctaaaatagcacccctacctgtcttctctaattaggggatttagagttgaatataacagtggtctggggaaaatcaatttccttgactgtgaagtttaaactggattcaagatctcagaaatgaatatcttaataataaacactctccaggagtgatttctgctgtaattaaactaatattatacaatttaaggggaaggaagtggaaatagaagtttgtatgttatgcagactatatcaccctgactgtgatttttaatgaggttaagcaacactattaatagggtggcttttttctccataaattttaagaactgtaatcctgacatgtattaacatgagtgtttttagctacttttatgcctgtactgtaataatgccacacttgacaagtaagtgccatcacgtatatacatatgtattatgtatatacatcatattatacgtatcattaacatatctctgtttgtttatatgttattagtttctatggctgttttgtcaagtcaccacatacatggtggcttaaaacaacaaaatttatatctgagaggtcagatctggatgtcaaaattgagatctggagatcagaaatctgaaatgggcctcagtgggctaaaatcaaggtgtgggcaggactgcattccttctcgaggctctaggggagaatgtgtttctttgacttttctaccacctaggggctgcctgcattctttggctcatgactcttttcttcaactttatagccagcagtggccagtcaagtctttctcacactttattattctgacactgattctcctgcctccttctttcatttacaagaacccctgtgattacattggacccacctgtttaattcaggctaatcttcctaaactagtggattggcaacattaattttctctgcaaccttaatttgccctagccatgtaacattacatattcacaggttgtgggaattaggacgtgggcatctttaggggtatattatactttaatctgcttaccacagtatctgacttaaattttaagatgagtacactgggtgctatgttaatagtgcactgaaggggcgcaagtgcagaagcaggaagactatgtaggaagctaatgtagtaaaccatatgagataaaatggtggcttaaacagggtggtactagcaatggaggtgatgagaagtggcaggatcctagacatattttcaacataatttgctgaccaattagatgtgggatataaaagaaagaagagttgagtatattccgaagttttaggtctgagcaatggggaaaattaagctggcattaattaagatagagaaaactattcaaagagcaggtttagggtgtcagtggtggggcagtgtgggccagggaagaggagccagggggagatcaagcacttagtttttgcataagtttgagatgcctggtagtgattttagtcaagcaggtctgtcctccaccagggccagaggtataggtcctatgggaatttctgccaaagaattgcagattgaatttacttgccaccgtgtatttcccttctcctctttattaaaaaaaaaaaggaggagagctatctgccttttaaataactatttgtcttccttcagtatatataaaaaatccaagtggaggtgtcaggtagttagatagataattctggaatttggaagagtggtctagcctagaaatataaattttttgttctttagcatgtaaatggcattttaaagcatgagagtgaatgtaatcacttagggagagaatatagataggaaagaagagaccaaagtctgaactctggaacactgcaatctcaagagtttggaggagttgaaaggaaaccagcaaagaagaactagagtagccagtgaagtaggatgcaagtcaggtctgctagatctgatttccaaaatgtcttcagaatgccatagtattcttagatcagaacatggtaactggtatattacagacagttgcttttgaaaaattatattggataattggactatttccatacacatatcctgctatcagagttccttccggatccactgatagttctgcatttactctctgtccatgtaatatgaggtttttgaagtttaatgagatactcttgagaatatatgttaatgccatctttagagggtgatatatctgtgtaggctctgtattaaatatgagagttcagaatggagtaagaaattcagttgcttcattaagctacagaaattataattttaggagatttgacaattttatattcttttgaatatcctcattgttgacaaatttcttttgctttgaatggatttaactttacagagtatctgcagtaatttgtgtgttgttgaatagagcgaaaattggaaaatcaatataacattctagaaggtaattggcatcatataccaaaacacttaaatttttatatagacattgatatagtaactcttctgacaggaatttattctaaggaaacagtcttatatatatgtgcaaagattttttttatgatattgttcattatagtgaaaagttaaaaacaatctaaacagtagagtattagaaaaatagattttaggataaccattcagcataatactatggagtcaacaacgtataatattatggaaaatatcaaatgaaatagaataaaagtggaaaaatcaaaatatcaaacagtatgtgaaaaattctgtatgtacacatatatatggacataaatatgtagaaaaggatatatttgcaagtgttaaaattcatctctacatagtagaattgaaaaacattttcttttttcattattttttctaaatattctacaatgaacatatattaattttgaaacaaaaaatatatttcaaagaagatagaattatggttcttcaggcatgtgcgatagttaatgtgggtaatcaaacagtctttgctcagtactaaaactataaaaggaatttttaatttttggaacaatagcaacaccattaaaagaaatggatagcttcccaaagagaataatttgaaaaacagccctgatttggatttggaagttctgggattttgagggggtgttggggtacattttaaattgagctttaatttgcatagtaaaattcacagattatacatttgtgtaaccaacatccaaattaaaatacagctggtatatttgtctgaaaaaaaatcattgtttttctttcaacagtattataccttaaataatttcttaaagcagtatagatctttcagggcattttctctttgttggtacttggaatcatgcgtcttgatctcactatctcttggagtagtgtggccaaattagcagccccatacatgggctctcagtgatgaggttcagtttgccatgtaggttttgcagggcgtccagtttatggaaagctgagaatgcctcctctaccaactaaagaagcagaattgcccaggtgcctggtagtgactttggtcaagcaagtcagtcctccaccaggaccagaggtatatgtcctatgggaatttctaccaaagaattgcagattgaatttatttgctcccatctatttcccctctcctgtttattaaaaaaaggaggaaagctatctgccttttaaataactatttctcttctttcgaacaacttataggatatttgtgttgcccactagttgcattttctaggtgaggattgtaagggtggtaaataagaactaacttccattttgcctttgcaatgacctctggtcctccagtgatttatgacctactggtctagaggggtgtttgtaacttcctgacatactcctgaactgcttcataggaccatcttttgccagaccaccctgaactgccagtgtcaacactacttgcacaaaacttaataaatgagttttctccagtattgagcccctaagaaacatcctttttttgctgtgactccagatacttctaaccaaaattagctctgagtggcagttccatgtcattaatgggcttttaattttttatttcttggatttgaagtttcatttcaaagaccacctgacagtagatcatttagttattccagtggtctgcagccatgagaacttctagaacttgaaataacaataattaacttatattaggagagtttattatgttccaggcaatattgttaagcactttcatggcttttcttacttaattctgataacaaaccaatgaagttgtagggattattttggctatgttttgcagatgaagtaattgaagctaagaaagggtaggtatttacaaataggaaataatggtgcaggagttccaatagtggttgtgctcccaactgctgtactatattatctacccaaattgattcctgccatctattggttcttaacattattgtgtataattgatgttaagttgctcataaaaggctggccttctcttcctcagtatgtacttttcaagaaagctaaacctagcaaatctagccctccaagaaagaaaggaactccaggccaaaaggaacagctctgatcctgctgctagttagtatcaggctcctgacacctggtaaaggtcaagcattgaacactagggcttttaccttacccaccttgccaagtaattttcattcctcattttagtttctgttgactacctggctgcagtaatactattctctttcaagaaatcctttgtcttcagaggcgtgcatccactcagcccatcactgatctcccttccttcatccagcagcatcagaagctgactgctcaccctgagataacttcataacctctgactcaaccttggttttatttaggagcaggcttccttgtatataacttggctatgagcttcatgaggacatgaattgtatcggttttatttactgtggtatccttagcaccaagaaaagtattgggaactgagtaaattcttgttgaatgattaaattatgtgctaacatgtgtatgcaccgtatgggaagctcaggtatctgtgctctggtaatgcccttagtcctcattagtgccactagagactacagaacaatctcaagcaaacaaatggtatatgctccccttaccaacttgcaaatggccattattcacccacttcatgggaatggtcatagtttaatgctgtattccttaaagcccagaccttgtcctgaccagagaaatttggagagttatcagataatggcagtcacatgcaagaagtggtagaggagagatgtcccacatacgtgagactttaagtactaacctggattgagaaatattttatttgacaaaactagtgcagctgtgacatttctatctttcatcacttgacattactttgaggtcttgatatttacttcactcaagggacagaaacttctaagccctcccatgctagatttttggtgttttcaggctgtcttatgagatttatcttactctgtactcacagtgctgcctcccaaataacacacagaatttctatgttgttgtgcagatttttataatatgtacttagttttcattcttatgcaggtgaccttcatgttgcaagcaggatgagtttatacagtatctcaggggtacgttctatttgattgccctccctgcctacacacacacacacacacacacacacacacacacacacacacacacacacagaaagagagagagagagagagaaagagcgagcgcaacctgttctttgggatacattacattatctagccaggtgatgtactaatacaaaaacaattttaaaaataatttttctgcactctgatacctccttcaatttgttgatgaagctgttgctataaactattagcaaatacaaagttcttcattcagttcaaacacagacaaatatatgtatctggtgctaaatggttcctggtttcttttttatttttccaggcaagaaaactgatcagtgattttgccattatcttgtccattctcatcttttgtgtaatagatgccctagtaggcgtggacaccccaaaactaattgtgccaagtgagttcaaggtaggtgaatgtctatcttttggtcattcctggaactctttttctttctttccccctattctaatttattgtgtttctctttgagttagttttgtacaattatccatattttttttccaaaatcagtccctcttaggctcatatatacatgtagtttaatttcttcactacaattaaatgtcaagactagggtttttatttaaaacaactgataatactattataaactctggcttatagttttagaataaatatccaaaatattttatataacttattaccttgatctatataatgactctgggaaatacgtattgtaactatcatcctcctgattttttcttttttgagacagggccttgctctgttgcctaggctggagtgtggtggtgcaatctcagctcactgcaacctttgcctcctaggttcaaagaatcctcccacattagcctcccaagtagctggtgctgtaggcacataccaccacccccagctaattttttaatgttttgtagagacaaggtctcactatattacccagtctggtcatcatcctgattttataaagttaagattgaagctcaaagaattaagtaaaatgcctaagattatggaactagtaatgtcaagatgtgaagttagaacccaagcctccagaagtctagtctaatactcttttcatgctatgaaactacctaccacacgcatgtatatataatgtgaattgtaattattacaaagtagatataataattacttaacttacgaacctattgatatgtgtaggtaatggataaaatttacattccagtcattcctaaatatattcctagctaatttttcactacaagtcttttatctattttctagaataatcctccttccctccactactgagatcatatatttgctaagaattattaagctagttgcagttttagtttaataactgcttaatgaggaagggatatatatgttataacacacattattttttgaattgtctctgctatcacatattcattagtaaagataagttctcacccattcaaccattaattcatttgagttaatatttattgaatattgagtcaggctctaagctggaaatttgaaatgcattgatgagtaagacaaatttttttccctgacaagctcacatctgctaattgtagtaaaatgaggttagattcagtgacagaattatgagacagatgatgggaatgtcctcagaagagaagtgagactttcttgatagcaaatatggagaaaataattcacagtgttctattttagttttttatttgcattgttgaatgtaaggaaaagcgtaggaaacccttttttttctgtagtagacatatatgatctactgatggaaaacagactaagaactgcaaaaatgacagttttttccagtttttttttgtgattttcctaaaatttacccagttattatagatcattatttcatatgtaaaataagagaccagaatttttacattagttcacttatataaaaacagttatggctttttatatatattatgaagctgttaaaattcggcaatagtataaacaatttcattataattgctaaaacccatgaacaaaattcatggtgatttggtaatttcttgctacctttttactgaatttcttgctatctttttactttttaccttttactttttacttgctacctttttacctttttacatttggagttttcttctggctactctttaaacttaaatcagtttcttccattttgagtccttatcttaaaccatcccaaatatgcaaaatgccattcacttattttccaacagcccatactctttctctactttctttaaagaattgcctcaaaaataacatcctttgggagagttttggtgaataatcttcattctctagctcataactgtttatatttctcaatatgttggttatccaaatataaaagcatgtcttcccgttggttttttcaccaaatagtatatattaacctgataattttctgaaaaatgtcatctgtctttttcaagccaacaagtccaaaccgaggttggttcgttccaccgtttggagaaaacccctggtgggtgtgccttgctgctgctatcccggctttgttggtcactatactgattttcatggaccaacaaattacagctgtgattgtaaacaggaaagaacataaactcaaggtaagtgtccataataatgtctgtcattgccttctactttctttttagtacttgaaaacactaattgattaaaaaccaagggagctttgttgggagttactatagctaatgttccttaagagtccgcagaaccagagatcactttgtattggtacatgtcttcaatataacactttagggagagctcatttaaatctgaaaaaaaaaaaaggtttcaaatcatatttctttcaccagcaaagagaatacaaacataatttactatttagccacagtcatcctacatctgattttagtggagtaactatcctcaataaagacaatgacaatcaaagatttaattaatttatactgagcatctgctttctcttaaatcaactcaggtttattcttaaagattattcagatagttcatggttgtaagctggtggtgtacatcctgttttttgtcttcacatacttgtgtcagtatgttattaaccataaagaagggagaaaaatgctttattttggacattttaaaaatcagttattaactttgttatgagtctaaagaaaatgccttagtggtctgggatatctttcaagagagctgcctaaaatgctcttactttatataatgtttttccagctccagtgacttttttagttgcaatggatttttacaataccatttgaagaagtgagatatgaatggtaacaataataagagctattatttagtggagggctactatgagccaggccatcttctaagcactttgtattatatattaactcgttaacttttcataaccaccatatgagggaagcatgaaaatgcattagagtctgttacccagaaggagaggatattactaagaatagagttcaacacagtaggtatagcaggaaaaatattcaggaaatataaagaattggctgactacagaaacccattgagcagaggaatgagagagatgaggaagattctgataaactatccaagtagggagaacttaaaaagctgtagatcatggtaagaaaggagtaaatcccataataataagaccaggagaagaaaattaaaagctttggtcaaagaagagatgtttagattttgagagtttggaaggagagaaagctgagattgatgaactggtccaaagcatgtggctagctcccgaagcatgttgacaatgacgtccatcaaaacttgtaagttagagtaatgtgagtctggtgaactgaaagtatcacctgcctcaatattgatatgattggaaagtggcacagagcatggtagagaagaacatcatgggaaagttgctaaaaccataagtaaaagtatataactgtcctggaggtcggcatatttagtgatgtggaagggcagaatgaagaataactgggcttcaatacaaggcagttcataaagcacgaaaacaagtgaggtatgctcccatctaacatggagagtaaaacaaacaaacaaaacaaacaaaccaacaaaaaaactagactgtcactaaagaacaaatctctgcaagaaatcagtgctcccaaaggaaaccaagtggttttcacttatgatgaaagaaaaggttgcaaattcagttggaaaattacattaaaatgactttccccctatgcccactcctgccgtgagtagatactgtactgctctgagatacttttaattctaagatcattgagcttctcacattctggtaatgttgggttatttgcacttgttacatggcagctgacttaagaattaagaagtggaagatgctaggccattaaatggttatatctgcaactggcacagccttacttctttactttgctgtagtcaatgggtcaaaatagtcacaggggcagcctccattcaagggggtgaggggggaattctccttttaatgggggaatggcaaggtcgtattacagaaaaccgtgtaagataggagatgttttccagccatttttggaaaataaaatctgctacatttgtactgaaaaatttgccatagtctagatcttggtgattgcttccccgtggtatcatttaagcatatatacatatatacatatatacatatatatatatatatatatatgtatatatttatttatttatttatttttagacagagtcttgctctgtcacccaggctggagtgcagtggcttgatctcagctcaattcaacttctgcctccggggttcaagtgattctcctgcctcagcctcccgagtagctggaattacaggggcatgccaccatgccagctaatttttgtatttttagtagagacgggtttttgccatgttggtcaggctggtcttgaactcctgacctcgtgatccgcccaccttggcctcccaaagtgctgggattacaggcatgagccaccatgcctggcccatttaagcatattcttctgtcttctgtgcttcctttaaattggccatttgatctagaagcttgaggagatatagttttgatattgcatatctatctatctttgtgtatgtgtatatatacacacatataatatatacacacatatatgtatatatgtgtgtatatacatatcctttcttatatgtatatgtatatgtatacacacatatacatatacatatcctttcttaccacgatctacagctttttaagttctccctacttggatagtttatcagaatcttcctcatctctctcattcctctgctcaatgggtttctatagtcagccaattctttatatttcctgaatatttttcctgctatacctactgtgctgaactctattcttagtaatatcctctccttctgggtaacagactctaatgcgttttcatgcttccctcatatggtggttatgaaaaggtaatgagttaatatataatacaaatatgtctacatatatgtatatgtatacacatatgtctacatatatgtgtgtatatattatacatatatgtgtatatatacatatgtgtgtatatatacatatgtgtgtgtatatattatacatatatgtgtgtatatatacatatatgtgtgtgtgtgtgtatatatagagagagagagaaagagagagagaagcccaagactaatttataaaaggccagataactttaaactacaagtttgccttaggaatttcgaggccacagagataatgtgaattccagctctaaacccaattgtagagttgtggttaggaatatccctatcctgggagattctttctttcttttcccttcttttggcattatacccaatggcaaggctgagagaggcatgtgttcccactatctttctctgtggggtattttttttttgattggccaactgagtatgccatgtttagagtgtactcgttttattttgggtggtatctcccatctatgccctctcccacagagcccgagaattggtctctgtcccaagagttcagatggtcattctaattcaggccgtaagcctccaaggattggcacggtctctctcagggcagtcccaggctccagggcttactaactccaaggatttgcttcttcgcgtggctgttgttttttgtatccaattgttcctctttctagtggatgagccatagtttctaaaatatattttctgtgtctttttgagcattttcagatgttctgtattgagagggtttctgatgttggtttagtttaccaaaggctagaaatggttgttgactaatatttttattctgaaaaaaatttgttaacaaattcttaattatgatctacggttggctagatttatcctgtatctttggaggtaaataaatctcctactaatttttactcactatgttttcttattgataaaattcagaatttagaatttcggaagtttaggaatgataaaatacagacatttttaatcttattttcagtagaaaacattagaaaatcaaggtttattagggtttgcctcttaaaataagagttgaatatataaaaaataagttttcatcaccttcagaattgccacttgaaatcattcttttgaataatgagagttatggaataggtgtcagtcttttgtcacaaatctaatgataccagtgaacatttcatcattaatcaaaggcttttcactctgaaaattgttttgttcatattttgttaggaaaggagagctgtggaatatgaacactggagattctgtctaaaattgtaaagggccttaactgctatgaaattgtttcaaaagagaaagctgaaactgagagagatagaagcattgtggtattaaaaacagcatgtttttgggtggcatttgctttggcttccggtcaagtggctctggctgtctgttctgcttgggatgggatccacctttccactctgctgaacacctcagtattgatgtaggaacgccaagacacttggctttctttgaccattattttggttgtttatgccctgcattagccctgcagagtgctcaaaagcaagccagggtcagcaaggtcatgattcctttaaggtcattccctgagtcattggcagaagaaggaatagagtctgagcttcagactgcaaagtcagagatacttctcacaaggaaggtgatttcgagagtgttatagattgggggtaggagggagaaataatttaggatagatatctagaaatagatatgaggtggttgtggcaaccaatttgctctgatatcttttatgggaaaacccttaatttgagggtgttctttttggataactcccaaattcctatttttgccctactttcatttttcctttttatttctactctcataatcctatagactcagtccttttattttatgcctagactcttctaaagggttagccataataaccaatcttccttgcttcattccaaaagccttcattttttttttaaatgctattcttgtatgtcagtcctgtgtttttaaactttcacactttggcccctttaaatctttacctctcaaagaacttccatttgtcctagcctgggttttaagactctttgccagagtaccacgacctaagtttaaaatggctttcttcaaatgctagccagtgctctagtcaaatgaacagttgagttttccttaagcgtgacagtttcttctgctaggtactccagccagaaacctcttctccttacttcctaatgattgctatttttcaaaatcctctccatcctttaagataattcaaatacaaaaacttctcagtgtagctttcacctttaatgtaatttatatttctcttgtttttgctcttagtatatttgtattactctgtggcacagatcacatatttcttttacagtatctgttttgtataattactttatcccttttcttggccaaaatgttttcaaggtcaggaccatgttttattcctcttttcagctctcgtttggcccaccagtttcatatggtagactcaataaatacatgttgatgaattttattctctttggcccacatggctctcagttgttacactgtgtgaaatgggtgataactgcaaaacatataaactctccacttctcaaagtgtgtgcttatattggtcaaagccctgtttagatgtcatcactgcagggagtttttgtgaatttactgtagacatagttaaacacttcattatctgtactttttattatcgtttccaaacctctttgaatctctattcagagtgcattataatttgtgtacaagtctgtgtccccttcttcaattctgagccccttggtgggaggaaccatgtcatggctcttagtgtccccataaatgagcatattgtctggatctttgtgggcccctagcatgaacgtctattctgtgtccctgcatgtcccagtgtttactgctcctcacctctcctttgttatcaactatgtaccacatgtaaactttaggccgctgggctagtctttttctttcatagattttgatttctgtggatttattcctaaatgatttgtactctgtattagtaaagcatatacaatttcaaaaggaaataaagtttcactttctctccttgtacttaaaataatctccagtttcagaaaatagaacaaccgtttggtttgtattcatggaaacaagaagtcttttaaactttaaagggcatatttaaccttttgagcatttattgagtgcttgctatgtatggaacacttgtgttagatgttgaagataaaaattgttctacattgccgtctgtgccctgaaggagtttaatggattttccctattcaccacctgtctattacaacaccaaggttggaattgaccatgcctttctttgtgccttgtaccttgcatgaacattaaattatttgttttcatgtctgccctcaattaataatctgtatctgtcaatgaatacttattaaagaatcatttcctatccaaagatatgagcaaatgcaaaaggcccagggagggaaggagcttggtatatggagaaacatatagtaggccagtgtgactaagacttggggaattaattcattgagatgaggtcaaagttaacggggccaggtcacatggaacaaagtttctgaacttcagcattattgacagttggaaatttttttgttggtggtagctttcctgtgcattgtaggctgtttatcagcatttctagtctctggccagtagaggcatttacaccctccagctgtgacaaccaaaaatgtcttcaggcattgccaaacgtcccttgggagtggagatgagagcaaaatagttctgggaggaggctctgatgtagaaacttaaagataattttgcagcgtttagtttttcattctaagtgaaacaggaatcactttaaacagggaagtggcatataatgatttcgatttttaaaaaagattcattcgtgaggagagtgggttgtcagggacaagagaaaaacagggacgtttgtggtgagagcagcattgagggctgagggttggttgctggatggtgtgaaggaagaaggggaatttgcatggagcactgaaaggagagaatggctttaagcaaatgtcaaggagtagaagcagaatcccaattcaaagagtggcacataggaaagtgcaggagcacagaatatgcaaggcacatttagggatttgtagagtttctggaatccctgagggcctcctcagagttttagatgcaggagcatggaaagggaggctttgtattgctcggccttctcagctgcctgtggcctcccctattcagcgatatccagcttgggcttgatggggtcagaactgcatttgaaacactcagtctggcagcagtgaggatggatgggggaggaacaagagtggaggtgggtggggggagctgagtggaaagggaaggtgggtgggaagaggctgctgcataatccaggagagaaaggatgagaatctgaaaaaggtaatggcagtggggaggaggagtacagaacagataaaaagtttcatatgttatttttgaaaaatactgttttccatatttcttgcagtattctttatataaaaaggaccagtatttgaatattatttttattccattcaaatctagtcattcagatacttttaactcaaagggacatcttagaagtggcttgtttttatgcatatataggtggttttgcagaaacaacttctctgacataaccatttgcattcttgggtctcatggcaatagtttggggcaacatgaatttgaagcatagcttttaccattctgttcaacaaatgtgtctccagagtttaatgtttgtcggacactgtactagacatggtaagccttacatgttgaaatttggcaaaataaatttatcacttttttatctttgaccttgttctccataaactctccccagtgttgttcctttagtttaaactgcatcttctcaaacctggattataacagtgttgtcgtgtctgtcctctgcctctaatcttgaccactcccaatataccgtttatagtcccaacagagccatccttctaaatagaaatctgattatatcacttgcctgcctaaaacccttcagtgacttcctattgctcttgtgataaaaaattccaaagcctttagcaaaacataaaagttcttaacttctctagcctaattttctacctcccccatcttctcctgtgcaccaaatctatttcattttctcagaatggcaacttgctttacatagtttttcacgtacttcttatctctgagctggttatggctcatattttagaactcaacctaaatactacccccatgcaaaccatccctgactttgcgctaagttgggtacccctcctggatgctttcttagcaccctgaattcacccctactgtaggcctttaacactgtggttttataaacacctgttgttttgaccagctctaccattccagtaaaccactggagggaaggactgtgtattatttataactttacctccagggtctagcagagtgccattgaatgagcgaattagcatttattcatttatccatcaaacatttatctatagtatccattctgtggtacgcactgtgccaagtgctagtttggtggtgaacaaaaacatacatggttcctgtcctcatggaactgtgagagagagaggcacaattcacataattatgcacaatgtgacaccgcaaatgtggctgatgttgtgaaggagaaggagatggtatgttgagagggagttccctaatgtgatggcacttatattgagacctaaaatgttagcaagaattagctaaatgaggctgggtgggaagactattttggacacccagagaaatcagtgtgtatgcataggccttacaaaaggaggtacctggtgagaaccagtgattgaaataatcctgtgtggctgcaatgagagagttgaggctggagaagaggtagaggcagaccaggtagggccttcaggtcacattggtgattttcccttccccttaagaacaaaaagaagtccagtgtggctgaggagatggaagactttttgaaagcagtgatgtcaagggaaacagagtacttatctatctgtaattattttatcccagaacctttgtttattctgatggttatatatagttacctttatagtccatcatctaaaatcttcatttcaccctctttcatatgggcctttttgctagtcttggacatatgtaactcaaacttgttttagtggaaatagatccagaaagcatcgagatgatgcagggtaacatgggtgacttttttttacataagctattcttttgacccattcatctggctagtgtccacatccttagattactacaggttttttggtaacaagatttgtggattcttctcattattaccctgctggtacttctaatatggacttcagtgatttagtctaaagagggcataaaaattctgtgatgtctctactgtttttctccttttttacctccccacaaatgtttctcatgtctgtgaatttacaataaagtgttacatttttttcatggctaaacaagagtttataattgccagtaaggggagtatatgcatgctatttttccttttctaaaaataaacatttattgagaatcagctgtgcatcatgcactctgctaaggtattcagaatacagagaaaaaaagatacagtccggtcctcatattacttacagtctaatgtcaaagacagatgaatacatacataatttcagaattagtgtgacgagtgttgtgatagaggaagtcataaaatgcaaagcagggaaacataaaggaggagaactaacctaacttgacttacttatctcacctaggttgaggaaggaaaaccaaccagaaaaggtgagggttaatttaagccttaaggatacataggactgagcgagagaaagaacaaaggaagagtagaggttattccgggtagaagaggctatgttggcaaagacacagaaagcatcagtgaaagaaacacatatgaggcattgcaggtggttgaaagtggtggtggcacaggatccaagcatgagagagattaaagatgaggctgcagatgtgaacagaggccagatcatgaatgaaccatagtggggtcttagacacacaaatagggaggagggagaaaattctgtaggctccaccttaaggtatagccagaacccaaccgcttcttaccatcttcactgccaccactctggttctaatcatcacagtttcttccaatggttatttagtcttactatcttttccctattcgcctaacacagcagccagtgtgtttagaacataagcaaaccatgactctcctccatttcaaaccctccagtggtttcccattatactcattctacaagcctaggttctgatagttctccgtagtacttattactaggtgagaagctgcatattttatttatttatggtattcattgttgtctccctcagtagaatggagactccatgagggcaagattttttttgtctgttttattcacagatgtgtcaccagcatggtactaagttggcagtcaatactcattgaaagaatgaatgactgaaatctcagatatatcatggtattcacctcactagtcattattgaacaaatttatttcagctcatcccacctctgccctcctttcctctgccttacaccactctcaattcaaactattatgccttcctgaaaagaactggttttatgaatgtatattaacctatatctattcataatcccaagtagatttttgttcttagccaagcctggactaggtgaatacatgcttttctttcttgtactagctcccttgcctgtgatgagttctcagaacatgattagatccatgtgcgtgagccaggggtgaaatcttggcatttcagtgagaggagagcagtgttgtgacgaactgtaacaagatctgaatgataacagtcaccaggttcctagtgtaaatcacatcctcattttttaaaaccaacctctttattccttggattggtcatactctggctcttggcactgctgcttccctgctgtgaaaatggactgctctattttctcaggctccataggggtatcaagtatttgatttcttcataaatagagcaaagaaatagaaccatagaataacattgcggacacatttaacaatatttatttaatgagtaaaaaagctagatcttttgttacattgtctgctcttccagtcagtaaatgttattgtgaccattgggcaatgtttgaaatcggcctattctgattaagggagtgtttattacgttaatggtgatatataatagattgttaaacatttactttcacatattatgaaagctgagaaatggcctacataccttctcaatcttgctttcggatccttacataagttgagtactgtctagatgaacagcatactactcagcgctgtccagtagagaaggcagggtgcctgctttcaaggtgcttattatgtttatcttaacaaaaacaaccagtaccactactgccgctatcaccatttattaagcacctatgacattaacaactacagtttaaattgctacaagatgctttgcctgtgttacttcattgaatggtcttaagtcctctatggagtgggcatatatatctccattgttctgattagaaaattgtatacagataggttaggaataaacaaataataagtgtatctttgacttaagtcttaaacagttattcaacactatagtacagaaggtctctaccatagcagctataagatgcagctgtgtgtttaattgctagggggaataatacaaagaagataaagtcccctctttcaaggagtttaacttaccaagcaaagcaagtcagtttcctttggtcatcttaattcccctctggaaatatgactagatagcgaatatgagtcttttcttcacatggttttgttatctctttctacagaaaggagcagggtatcacttggatctcttttgggtggccatcctcatggttatatgctccctcatggctcttccgtggtatgtagctgctacggtcatctccattgctcacatcgacagtttgaagatggagacagagacttctgcacctggagaacaaccaaagtttctaggagtgaggtgtgttaactcagaggaaaatggctcccgaaaacacactgtgcacacatctatgtggcaatcataaggatatgggcagatttggaggagacagggcttgtgatgattaatttattcctatattttttgttccagaaaggactaaattttcatcagaggtttcagtgatttttttagtttactcctcatgatatatcattttcatggatttccaaaaggctaaatgttgcaatataaaactacaaccagattactttttttcaacatgcaggtgattttggtgctgcagtgtttactgtatcacagtcatatgtgaaggccctaaaactcttgagtctgcttatgacttttaagattctgtaatgggaaaggtattcttattttccaattcattttctgtccccataaacactgagaaactttaacctccagacgttcaatttgggtagctgtgaagggcaggagtagaaggtttttatactctgttgagcactttttacagcaaactctgctcataagtgcttgggtagagagctcacatgacagagccatcgtttcccacggcaaaacagtgggtgattcttttttggggtggggagggggtgtaggatgggaattatatttgttgaaaagtacttttgttgttgtagatttggaaattagactgatgtgatttattgtgctaatgaaatttccttgagctgtttgttaattggaatatgggacaatgtaatatctgtctcctatgaaagaaggtgtaagggtaattacacaagaggataaattgctttaaaaaataaggtcttcaaagagtccagtaattgatggaccaagagcaagtgatttttctttcttgattccaaaaggagcaaaaaatttagcaggattacttctttcttcgtgaattcaaatcacatattgcagtcactttaagagatttttttatagttacgttgggtttatacgctatccttgaggtattatttacatgatatcaacacctttgttgttttagccaaacattgattttgtcaatgtgtagtttttttgaaggtgaaaagacaagagcatgtttatgaagacaagaggtagattggtaatcttttgatttggtttcagggaacaaagagtcactggaacccttgtgtttattctgactggtctgtcagtctttatggctcccatcttgaaggtaaatatgtgaaacattcacctcttccttctcagaacactgacatataattggacatgtgaagagtgaaattcctcatgagatatttgcgagattctcatcagttctgtaacacactgaagcaggggtcaagtagaaagagagctttaaatagcttttgtcttgatttccttctcactctttcatcccctcccttatccttagttttgcagttatttgattgaactatattaaattaacaatatccaaactttctgatctgtgaaaatagtagtttcatgcaattgaatcagactgatcttctccccctcctccacacacacattttttattctccttgtcttttatacattctttcttctatcaccttccatttgcttgtatccaaatcttgtccctcttccctcattaggctcctaaataacatgagtgatgcaggataaccattttgatatttttcgactattcttaattattactttgtttctattttatttgaatcagatggccttataattcacaaaggtaaattagagtaaaattactgactcataattagaaagctttagaaatgaacttttgaagaagaaaaattatatgatattggttgtttagaaaattaggggtcaatatataggtttattgatgggttggatatctgcctagatagataaatgcaaactgtatgtgacaacctattaagaagtaaactaaaactaaaaactaaagaaagttagtgtatacctcttcatgaagtttccaattttcttttatgatgcaaacattttatttttttcaatcatataaacatgcttgcgaattattgatagtttgtatcttatgctttatactacagtacaaagcatgcaattcacccatggacctaacagctataaacaaccactgttaacgatatccttccaaattttctcttacaatttttatttttaaacattttaattttaaaggcttttaaaatgctcatataattacataagtaatggggcagtacaatcttctgaagaattcaaacaatatagaagtacacatagtgaaaagcaaaagccctctgttcatctaaagttagcaaattttatgtcagttgccaatcagatgaaattgaggaaagtggaactgtaatatctttgatctgtaaataagactaagattgccttcagggtatttagactgatgtatacagtatgcacaaaatacttgttaaacagttaaaatatgtaattattcatcttttttccttggtttccacaatgtcaatgaactggtttaattaatttctgactggattcatgaggaaatatgtatctcatcttagacaagacattaagattaaaaataacctcagaaaagttgtttctgactatgtacagagggctgtaaaagagtacagagcttatgttctgcagggacagagggaaaccttttgtcacctttgccagtgcaaagcaagttatgggataagtgtgaagatgtggtgactttcacagcattgaatctgctgccaaatgctttatgttcttccgttatcctataggcaccagcacatcagctggtggaaagcctaatgacagtgttaccttttaggcaatggaacctcatccagtgagatcatttttagagagttcactgcagacaattatgagcccatgttgtgagaagctctcctggaaatgaattttccctgtgggttccttgaaggtgggctcacttcaagtaggtgcagagtttcttttatgagctctctttgtgctcagtcactagtgagggataaatgggcagaatcttttcatcagttctaatttactcatcgcctcccccatttttcttttatttttatattatttcttttcattaatacagtataaaatcctaattcaaaaaagtcagatgtgtttaaaagttccttttgtgtgtatatgttacagcaaattggctttattcctagagaatctgacagttgagtaatcatggatgattccaaggggacacagagaatagatactgtataattactatttttaggagagatgcaagacttacattttcaacaacgcctcttcctaactattttctcaccctgcacccaaatatggctgcagaggagttaaagctgaaagttcttttgttctttacaatgattcttttcacccctgataggcaaagtgccttagtatttacagaaacagattagaatgagagaaagaaggcagagagctgtaagagatcagtgagcatgagctttctttccctttgaccttccttaattgatccatacctgggctcatcctcattcagctgctagtgttcatgattgtggctatttccacctggcaattttgagttaccccaagtagtcattgtaagaataaatgaaaaatgcagtccagcaaacgtttttgttaaggttttccccaaaatgtgggaaatggaattgttttggcaatatagtttatagcatactgtacacaacctatatttaaaaacaacaagaataaaacagtcaaggattcgcagttgtgattctttacttcagtaagttaggctattccttacttcgggaatcacaactcctgataaagtcagctactttcagattatgtaccattgaggtttggtaagttaagtgcgtttatcacaaatcccttgttagctcatttgaaaagtcaatacaggaagaagcagatattgagggtacagtttaactaaaacctaagttatgactaagtaagagtcaagattaacaattaaccttagaattcacaaagaaagtggtgtcaggggttatgttggagtaggaaaccttttttcctcccctttgtgactatgtgtttttttagagaaccagaggacaacttaagagaatcattttacttaagagtctgtctttgaaagggcagatcaaatgaatgggaaaagagaaatgtgttacttttactttttaaaatgaaatggctcaacaccatttctgcaaactccatatatccctcacaagtttaatggtctcagatgatcctagtaattttctttcatgcattaagcagtgtaggaagttgtttctcctgcctgtttatgcaagcttactttgaaaatgaagtttttcatttttattctgatctctttgctgaggtccgtcttttatgtggaagaatgtaaggaattacagttttaagttcacgaggataccccttgaccctagccagcaacagtcatacatgcctcaaagcactgaatctaaccactgattcggtactgaactgttgggaagcaagaataactggcgcccctggctggttaaacagcttagttctgtgtttctgcagcagaaatactgcctggtaagtgagtattctgtatggggaaactagaggaggctaaagagcatcaaaaagatgaaaggcacttccttgagcttacttttaccatttttctggcaagtctgaagaaataaaaatcaagtgaagttcactgctacttttgttgcctttgcttgaaatagtttaattcaagttaattaggagtagtcaaatttatctttaagatttgtttagtgttctaaaatcaggatagcatttaatttgtatttggaaaatatttgttgagcttctacaatatgccacaatatgtcactttgttcagtgccagggaaagcaaaatggtagagatgatggtaatggtgatgatgatgatgatagtagtagctaccatttattgagctcggcatttgattaagggctcaacacagatttttaaaatttagtccttcaatgaatgacacctacaaaaaattgtctctcttttacacataagaaaatttattaatgacttaccaggttacaaagttcgtaaataatagagtcaaaatgtgaattcaggcagttctgacatgaaagccaatctcataaccctcagggtttacaaccatttaaaacaaaacatagtacttgctctcaaagaactcattcactttcattttccatgagatgatcttctccagcttctttgatccaacttccagtcctttcatgtgcagataaatacagcattttcacaaactcctcatcatacctcattccagtttcttcaatgactaggaaccagattgcaagtcagtacttccttatcagcttagattttcaagatttaagggaattaggatattatttgaataacatgtttctgaatatagttgttactgctgaaagggcaatatagtagaacttaaataagaccagggctttgaatctgacctttgcagccattcttctggtctgtactcctgccattttccaccctgaccactgaggaccaaggagagttctgctgggcaattgcagcaggcttcttgacttgccagtcaggtcttcatgataattatgacattaatacctcatttatcatttattatctattcagaatgaggccctggactagatattttatgtgatatactctttatcataccctcttttaaatgagaatactgaggataagaaaagttagtaatttctcaatgttacataagtagtagggccagaatttgaaactaggcctgtctgacttttgtgcccatgctcttaatcaggatctcgttctggattgtacattcacatgtacacacacacacacatacacacacacatacacacacacacatacagtgacgattattctgctagaaggtctcactgctgtactgaattctggttggacaactacactctacccttatttttaaatttacccttttctcgtttactcttctgggaatattcaaatactatcagcacatcaaagggaggtataagtgaaaaagagtagaactgcattcaccagaatttgaaaaatttggtgacatggtctgagtatgttaactcctattttgattttatctcaattattccatctgcttgtagggtcaatacttgatttcatgtatggtaatcttatttataattatacttttgtgctttctgggtatgattggttatccataaaatttcctttacataattttatcatttggcaattcttgatatgcctgtatggtatactttgtgctgtttatgttttaattactcctgtcttgctttgtaaaaatatctacctactattactatgtaaattatactggtttaacttaagatggagttccatcttcttaaaatgcatcttctctttcctcctttgagaaatttctattgcaagaaatgattattttgtgatgaatttttaaggattgacctcctgtgacccatgaactaaatccaataaaaagtatcctctaacccaataattctgtcaagtttcatcaagttttccatattggaagatttttattgagatgttgcattatcataaggaaaatggcaaatttcaaaagacatatttttatcacattgaagttggcccaaagtcaacttaatagccttctttatatgtattatttccttttcaacaaagaataactgtttaaaaaacatcttcatatctaaagctatttttctacccacaacccatgccattctatgttactgataccttctgattttattttgtggtagatttggtgatatctgtaataataaattcacagagaatggaactaagcaccaaggcaaaagtgtccttcactttgacattagaaccacattagaaaaaacatttagctaagcctagctgagggatgaggatgaggccagggatggtccctttgtggtggctttctttcaagcaagaaaaatgctttacccagattaaaaaggaactactgcaggaattctaactagttttccatggttgaactatacttctcttttcccttcttacttttctttccttccagctgccccacccccaccacccaccaaattgaaaatgaaatgacaagaaagaaatatgggagatgtttaaaaaatgaatcaaagctatgcaatgatccttctcttagtttttttactttatggtacatttatacacaagaatcacaaggaatagaaacatgcacattgcaaaataaatgaaggcatgtgtcagaaataaagaggcttgagtgtgatgtgttcacctctttgtggtgactgttaggtattacagcttccccagcaggaacatcatccctcctacccccgtcaacattctatgtcacttttagttttttctgacatcaagagcaaaattagctacattaaaattgttagtctttttttgaagaagcatttgatgttttgtatatataaataaggatatttatttcatataaatttaagcatccctatggctagccaataaaaattggaaatatttgttacacattttagaatttactcattctctaatagtggccaaagagtctcagatatggaactactttaggcaatcacaaggagaggctgatagaaattgtgcttcacttagtacgtgcagtatttttaaaattactctaaagccatactatgttttctggttacaatagcctcctttatgtggatttggtaagattggccttaattgacttgcggttttagtattttagctttgaaaaatcctgaaattacttgaacttcttttcaaattctaaggttgagaaccttttgtttttcaaacagaagacttcccagaaacagaatcatccttgatttgcttagtttcctcagtactagggacatttcaaaggtctaggaatagatacagtttacagacatcacttctccttgttaaaacactttgtattaatataaaatattttttgctaatgcatgaaaaggtattaattcagttttaaaagatgtgtattaatccatgtgtgtaattaattgcttccaagtgctccaaggtcctttcaagcagttctctttagttagttctcataatatttgcaagaagcgaggggatagtcttttgatgtttattttattgaaagaggcatctatataccaagctgatagactatttggcaaaaattattaaggacaaaaatgaacagactatattgaaaggaacttgatctcaagagtgaggcaaccatctattaatacctctgtttctgtctacctcacagtccatagaagcatcttgtttacatagttattccttttcagggtgaagggaaacataacttttcctccattaattaaaaaaaagttattagtaaggtcatgcatgctcactaaaaaaacaagcatccaatgaaaattgaaagtccattatacccttcttcatttatttctattacaaagagtttagaagttcatcaattgactagtaaagcatactagttagaggtcactaagttattatatcctatattttagttttagatttagcctttatttaaatgattcctcttcattcctcttttttcttgttatcatttttaagttgtatccatttttttccttctagtttatacccatgcctgtactctatggtgtgttcctgtatatgggagtagcatcccttaatggtgtgcaggtaagtttttgaatagcaatgtaagtacagtagtgtttttctagtagtaagaatagtccagtaacagatctttgaagaaaagtgctaatcattattaactgctgagtttttaaaatgcatttattttctacttcaccattcacctgcttttcatttctggtttaatcaacaagttagccagtattaagaaaagttgccatacatacccattgtttaaataggctgttaaaagtcatttaaccaagaaagcaagaggctataatctttcttttccttccccttacccatctttatctcctttttactgtctcaggaaggatacctaactctttctgtgtgttcttaaagatagtgtttatccatttgccttaactctatactaaaaacaggctattgatttgcttttcacatggctatgatcaataatcaaaagtttttttaccaataaaagaataaagtcaatgtggttgatgtattgcttttgttgaaaacttcagctattcataactttgggaaaactgacacacttttaataaaatcattatcaactgggcatggtggtgcacacttttaatctcagctacttgggaggctgaggtgaaaggttcacttgaacctgagttttagtccagcctcaacaacatagtgagaccctgtctctttaaaaaaaccaaatcattagggagaactttgtaagggactttgtctttcaattgggttttaattaaattggcaccaggaaactggaagtacttatgctgttttctggcaccttgttaactgtagccttatttagcacttagtaatattttaatgggaaaagactgcatgtcctgtgaacatcataagaatttatttgaaccccttcaaaatagtccttgcttttgcttattgaattcagattaatttggttttaaagtcagatagaactgggcaagtggccagactaccaaaaagagaaaaggctactttacttttctctgtttaggtctgctgagtagagttcgtcatcttttggatatttgttacaaaatacaaggtggttcttcatagagtggactagatgaatgtgagtttatttgtgctcatgaaacttttgggaagcataaatctgtaaaaatattttatttttacctgccattgtaaatattctttatttcccaaaatggaaaaatgtgaaacagaaatggcccacagacaaatagttcttatttttatttgctcttaattacctggtctagatcagaagtttaattctatgtgttttaggggctttattggttgaaactcagtgcatgtttatttaattaaaaagaagaaaaaatcaaccacataataatgatggggaaaaacaaccagggtccagctagtagatttcttaaattctgcaatgctattgcccctaatggcttttctctttctttctttctcgattctcccttgtttagacctttttggtaagatttcatttagaaaattttgtaatttgtaaagaaattttgtaacccaaactttataaatgagaaggtcctcaccagtcaaaaatagttctagagggaaaaagaaaaccctttaagtaggaaatcactagagaagattgtgatggtctaatttacttttgcacttctttccctccagaaagaaaatagagatattatttcagagttcatattgcatgattattcaattcaatagctatttactgagcatctttcattgaaagatcctgtgataggttcttgaatatcttcccattcgtcactggcaaggtcaattcggcagttattctttgaagcacagcacctgacacacagatgctcagtagttatttcaatagctgtttatacatcaccatacgatagcatcccttagattcagatgttgaccctgaaactcactgtagtattcatatggcttttctctgaaaagaaatggtgatagattgctgagtgtattagtcaaagtatgccactcagataagtaatatggaatttatgaaaacataatgtattcccatttttaagttggatacttcctttatatccttaaaacattctggaaatgtattaatatatgatgcatagtgtcatctcctctttgttcagataagacaactgaggcagagtaagatacatgagctagacatcttccttcagcatattagtactaaaataggcaaaagatccactttcctgagactcagagagtaaaaatagaaattaggagatgagctcctagaattttttttctttgtgaccttattctttagtggccactttttcttatacatctacataacattcccgcaatataataataaagatttgaagacttgtgctttagtgtgcttgactaaatttctgcattccttgaccattcctttgtcctctgaaaaggacactgcttgcctaaattatagaatataaatcagtagtgattagttaggcatagtggaaatgtaatgcagtaatgcagttggactcctttcctctttcctccccagttcatggatcgtctgaagctgcttctgatgcctctgaagcatcagcctgacttcatctacctgcgtcatgttcctctgcgcagagtccacctgttcactttcctgcaggtgttgtgtctggccctgctttggatcctcaagtcaacggtggctgctatcatttttccagtaatggtagggattcctttaattgaacgtacctgtgagattatatgagtatcatgtggttattgttatatggaagacacacatgtcttttatgtgttgttccaaatttttccagctttgacctcatcactttgatcagttgtaatttacatttcccatgtttatggttgtctaggatggaccttagaatcaggctcacctaagttcagatactggccctcgttcatgctcagcagtaaacttctttgaactactattacctcatcagtaaaatgggagttgcattgttgtttttctgagcatcaaaaattaatatcaagcatgtagcacaatgcctgacacatagtagacaccagtgcatgttaattactttttaaatgttgtataatagaattaatctaagtaagagtgtaggacatttcagttcaagtaataaagaagtgcttggcaacttgtgagaactcatccagtacattagaggaaatggagtgagaagttcactttttacatttcttgtggtttgcataatggtaagtttaaagataaggtgggactctctatccttgtcatagtatgatgagaaacaaggtaaagcaactaacgtttcactctgagtcacaagtgaaagaagagaaaaaggagttctgtatttggcatcactactgaattttatactttaccataactctttacttcttgcaagaaaatgcatatatgtacacttaaaacaagtcacaaagggagcctcaaatctgttttatctcccccacagctttgaaaacagaattttcctacacttaccacattttatttttataagaatcctcttactcttagccagtattattattttatttttcatatttgttgtttgaaatttttttcgtccaaggatgcaagaaaaaatggatattaaatactagtgatatttgttaggtcagatttttttcttaatggtggcttatgtctttctttcctttttttaaaaaaaaactatattaacttactgaaaagcacactgagtatgagaaacactcaaatatacctattagtgttatctgcctacctacaaattttgctgaaaccaagaaaattgaagctagaccaggatacatttgaattatatccaataaatcactttttgcttgtgctaaataataattttaaaatggtttacttttccaaagtgtttttgtcttttcagaacttttatttggtcacaaaataattctgtaatagaagttaggacagatgttatttatttctctaggtgatgaggaaactgtcatatagagagcacgatgctgataaagacaactgcttaatttgaagcaagtcaggatgcctataacttgctgcatattaattttaatatagaataaagatatctttaatgtaccttcagaagttattcttcaagagcaattcatagaaccaaaaatacacaggtcaagaatatttgttttggaagcagacaactgggaccctttgtattattcagttatctgggttcatctccctcacagacattaaggaccttggacaacatacttaatgtctctaaccttcaatttcctcagctgtatgataaaaataataatacctattttgggggtttgttctgaagaataaatgagataatattgcctgagagtttaacataatgtctgggacatgttaaatattcagttaacggtggtgattgaagtagcccagtgaatgaaatggtctatgcatattcaaatactacctcattgtgaatactttgaagatgtcttagtgttatatgtgtcgtacagattttcttgattgctaaaaacctttatgatgttttaatttttaatacttagaaatcatatgccagctatttttttactttaaacttttaattattttatttaaaatctcacatggaaggcaatggttttgaaaaacaatcttttcacattaaaattctaattgaatgtgatcatgcattttggtgaacaaaacaaagtgagtttcaactaagacttttataaaacaactttccccatgtagaaaattatgagagttcactcggtataagtccataccgtcaagatcaggtctgtcatactctatctagccttacacaaagtaggtttctgtggtctttgataggagagtatctatgcttgctgtgacttcatctgacatggtttctttcatacttttaatatttgctctttcagatcttggcacttgtagctgtcagaaaaggcatggactacctcttctcccagcacgacctcagcttcctggatgatgtcattccagaaaaggacaagaaaaagaaggaggatgagaagaaaaagaaaaagaagaagggaagtctggacagtgacaatgatgatgtaaggaactttccaaattccaaaggaaagctagttaaagaaacaaatgtgaaaattgtccctttttatacctgatgtgaaatggagggctgagttctaagaatgtttatctggacatgtggtgtattactcatttcacctccctttgccctttatattctctggttttttatgttttctgaattctttctgtaaccattaatacactaataatgacataatgactaataatgacttctaaaaaatttaaaaacccaccacattaaaaaaattctgatctcatagatataaaggaagtttgcttagtaatgctataaaatgtatttggtttctattaataacccagggcttatatttgagataataactcaattttatgtaattttaagcctaatgtggatagatgtcaatgatctcacttcacgtgatctgtgaatctatttgagtaggctctccaccaaagttctatgctgttatattaatattagcattatatttatactgatatgattcagcattatttttctgtagttcttcaataaaaagaaaagggaatgggagtttggggtctttttacataattatagtggttagtgtcatagtccagagggtcctcctccaattaggtgattaagttgagaagtaaaattgttgcccagttttttctttaggagaccagctcacagaaatacagattctccagcagggatctgtaatcagtactaggaggaaaactgggatttgtttactttaacacatgcggacaccttattccagtagccttttgaaaagattgccaaaataatgttttccatttgaaaatttgctctggattttacacagtgcagtatcacaaatgattttttgtgcctcattacccattctaaagtaggaatattgttaattgttagtttctacttagtacttgataactttgattgatcattgcatactttatccttaattgtctcaatagcttgttatcacattatttatttttgttcccattttacagatgaggagatttagactgagaaatgttaaatatgttttagaaattttaaagctttattgaggtacgattgacaaataaaattgtatatatgtaaggtgatgctttgacatatataagtcatttttctaattgtacacagccatagtggcaaggccaaaactcaaatccaggcctctctggttatttctaactggtcaggctatctgattgtattctttttgtagaacttggaaatagtacagtgaaagaaggcaagagacagaattggatttcacataaattgattcaataagaaaaaggcttaatgcatgaggcacatttagctaaagagaaaaagaggtgaaaagagctttatgtctgtcatcatccatctgcaatgagaacaggtatatagattttgtttccaatgatgacagaaaaagaatgtgtttaaactacagaagagactaagacgtaatagtccgaagaacgatgtgtttacacatttaatagaaattaaaatttgaaatgaatttctggaccactcaagaccaaaaaaataaaaggctgcctgaaatattaaaataattaaagcagtattttgtccaaaataaatatgtcaacttatgtacctggacatcaaatttaaagttcattacacattatgagtgtgtgaagtcggggattatggaatccccctctgtaatgatttttgagaaaaaatagtaaaatatcagctttggagaatgttttaaatgtactgctctctagtgacaaaagttggatcaaaagaactccttagaagttcttccaattcttagatatgatttccaacaaatcctatttcatttaaagtgtttttttgtattaatatttaccatgttcaactctgtgtttccaacagatttcttgaagccaaagtgtcgtacttgttttttacctcttcctcttcatcctaccctttccaaaacaaacaaacaaataaacatatacattggttcctaggcagtgaatccagctaggcaatttagagtacgtctgtgcagtatgttctgtgtgttgaactcattatttaggggctccacattacaaatgtggttctcctaagtttactttttagtcatagggtttggggcccatggatatagggagtcatgcggggacatgagggttacagctataatataatatttatgagcacaattagtgaaaattatagctcttcttgttacattgatccctttaccattatgtaatgcccttctttgtcttttttgatctttgttggtttaaaatttgttttatcagagagtaggattgcaaccactgcttttttttttctttccatttgcttggtaaatatttctccatccctttattttgagcctatgtgtgtctttgcatgtgagatgggtctcctgaatacagcacaccgatgggtcttgattctatccaatttgccagtctgtgtcttttaattggggcatttagcccctttacatttaagattaatattgtttatgtgtggcatctttatttttttttcttttttgctcgttgaatgcattatcttagttctctaaaaggatactgttgttcattaacctctttagagtcataaataaaggaattttccatgtaggtaataggctttatgttaagattttattaacattaattctcattttattttcaactaaaaaccatctttttggtacttttaattaagagatatattgggtctttcagcccaaacatagacttggaatcaatataatgcatttaaaaaaaacaaagtggtaatctttgggaaatctattataatttgggctaggtggcttgttctttaagcagtcccatgattagctgcctggttttgtcatttccattatgattctctgcttatctgaccatcatagacacctttttaaacattttattttcttatgttttgcttacattttcagatatctttggcacaagctaattgaaatgaacctttatccataaaatagtacttaaagtaagagaggaaagtttattttctagtgtacatagaaggcttcttgatagtggatatataaaaagtctgtcacttgttctagaaggaaagatcggtcatgattttatctagagacggaatcagcataaacaaaacaagaatttcaagaccgtattataacctgggaagtttcctatgtttaatctgtttttgcattgagatcatttgcttcacacatacaactcataaacattgctgattgggagtctgatagaaagctttacaattcagttgtagatcgatctctattttgtgcagttatagttttaattgactcaataccattaacttagaagagtggaaaacaaatgtgagggggaaagaaggaatgcagttaaaagatggcaaactggaagtaattataaggcttttctccttagtagtatgtaaatgattatagaaaacggtttgatcgatgctaggagataggaagggctgtataataaaaacattctaaaacctcttgtacatttttttcacagtctgactgcccatactcagaaaaagttccaagtattaaaattccaatggacatcatggaacagcaacctttcctaagcgatagcaaaccttctgacagtgagtagaactaacctcttgcatgcttgcttgaatatgatttgcacttacagagaaaacactttagaatggccatctgcattaactttccctcaattttgtttttcctttttctatgagaagatttacacttaattataataaaactttgtttttacataccctaagcttcattcttccttttatccataaacttttaaatttttatttggtagtcttttctcttacccaaatcatccccagtttttccaatggctaaattaataaccatgtttttaattgatttttctttttttttctgttggtattgagaattgcagcttataatactacatcactgtcactgtttgtcttccttaggttttaactagtgatcaaatcagctcaaaagagaaattgcatcattggtctctcagtgatcaataaatcaattgttaatattgagaatttggaaaaatttaattttgattaaattagcaatcatgaagtattagtacaactttctagatataacttatatgcatttgctttctaatctcttcattctcccttttgctatttcaaaattattattataactgcactgatctttctagggtgatagcctggtgactacggtgcaatggtttgtgacatttttctcttctgtaattgaattaacaggccacttagtaatattagtgaccatttcagactttcccaatagcaggtagcaattgccatcaagctactttctactttgcgttctcattgaagaaaatgcatccttttagattcagatgcacttcagagtacactgatctgttacagaaaaagacagttaagacacttttatttctattttaccatgccacctcaactacaataagaggttactgctatcaagaaaagtttggaatgaatatctattgataaaaaataatgggtatattagttatcaatcattgagtaacaaattacaataaaactcagcagcttaaaagaacaaacatgttttcttacacaattcctcacattcaggaatgcaggggcagctgattttggttctggctcagagtctctcatgagattgccgtcagagctgtcaagctgtcagctggggctgagtctctgaagactattttttttttttccaggaagaaatgaaaggatgatttgaaaattatagtatactccacagtgtgggagtgggcccaagaatagggactcaagggccccattacaaaatttttgggagtttaaataccctctacttggggtacgccctatgtaaatggagaggatgaagtaaagttacaaactcatttatttggcccacgccccatggagaggatatttcctgtcatagccgaagtgtgaattggccttatgttccctgcctccagacactgttttcctgccacatctcctcactgagagatgtgatctccatacatcttcatgggaggcagagggaccgatggtcttttttctgtaactgcttcatgctggcttggggcatactcctacctattggggatccctgaactctcaccctgctctgtctagtggaggcagggtagcttcttgatggccagggtgttgtcttcacctggaactggctggaacctttgttgtgtgatcatctgaagctgatggtctctaggcaagaggaaatgaatttggttaaaaaggggaaatttttttaaacaaaagtctgggaagccattgttttgaactaagctcatgcactgggccccaacagaccaaaccaaagcaaaatgaagtcatttgtgctaagactgtaaggaaacacgtgaattctagaacagagcaggttttgtttcttcttctgcaaatctctgtaacaaacattcttgacagcataggtatccaccccctgaggttcccattaaatattttagtgtctgaagctgggtgtctgcttccaaaagcatactcatggggcccttgggatgacctttgttttttacctgtgggtatctccgtagggctccccatgatatggcctccctcagagccagtgataaaagagaaagaaaccaagacagaagctgcagtcttttataactaaatctcagaagtaacggaccattacttctgtcatattctggtggttatgcagccccacactgttaacactgggaaggaattacacaaagtcataaataccaggagacaggatcactgagagccatcttggaggctggctaccagcctggatttgaagaacaaagaactaaagcagtcttacctttggtgtccagtttgtaacctataacttgtaaccgaggctaatttctgctaacccctattaatggggtttggttatgaatttctttttgagtttaaactcctcaaaccatgttctgacttcatttttctccatggagcattaatagcaaaagcacagtctaacagacatgtgcctagcatgtatgtcttctgttggcatcataacctggtatagccccttataaagaaatgtaaaagctattttttaaaaaaattactagccagaatttgaggctcatggaaaaagtttatgtgccatttgcccttcatcctctcaaaaccccttttaaaggataaattgcaagttgatatgatattagaagtttacttaaacaaaatacacttgagcattttgcctgaaatgtttcctaatgtcatgtttatctttataatccatgatgaaagaacaaaactgatagaagtagtgttgcagtatgagtaagtgcctcaaaaaaaaaaatctttttttccttatgaacaacagcaggcaaacctaggaatactgaagatggaaggaaatccaaaagcaagccttaggcattaagagaatgctatcaccctctaaaaatgatttgcttcttatccttctcactgacaagacaacagtgatccatcccagaaaacctaaagtaaaagagatgaagtgattttgtcttcatcacactagagtcttagcttaataccttgtttattgaaatgcctaaacttgtcttttttactcttaccagttatggaagatgcatcaattttgtgaagatttttgttttatacttcaccaaagatctaccatttatgtttttaaaaaattttattttccaggagaaagatcaccaacattccttgaacgccacacatcatgctgataaaattcctttccttcagtcactcggtatgccaaggtaaaggagagcccagtattttatgtttttctgtgggataattgccccacagaaatgtagttaatggtgggttattgacagaacttcttgttctccttcgtctctattatttatcttaaataaattacccagtgaccaaaacttgttccagcttttactagtagaaagcattctaagagacctagttactattacaaataatggaatctttcagtatcattaagttacaacccaggatcaacattagctcttttaatttcagtatcgtccctgatttaaagaggtaactggcactttctgacagttcttctccagtggtttctttccctcttaatgaagttctagggatttcagattctacttgattttctgaaatctctgaatgtttttattatgtcagtctttttgtcctttaatttctgacagcattacccacctggtagtacctcttttccttttgtgtttgttgtttttattaatttaatctaggtatgagatcttatgaatttttttacttgaatttcttgactctgctggtaaccttcatcccatttaaaatgtttgtttttaatacacaaagagaatataaatattaaaagagaacaaagaaggacacatttgacttctatacaatgcataaacatttgacagatgatgaaggaaatctgatttacttactacttttttttttcctttttctctagtcctcctagaactccagtaaaagttgtgcctcaaattagaatagaacttgaacctgaagacaatgattatttctggaggagcaagggaacagaaactacattgtaacctgtttgtctttcttaaaactgacatttgttgttaatgtcatttgtttttgtttggctgtttgtttattttttaacttttatttcgtctcagtttttggtcacaggccaaataatacagcgctctctctgcttctctcttgcatagacacaatcaagacaatagtgcaccgttccttaaaaacagcatctgaggaatcccccttttgttcttaaactttcagatgtgtcctttgataaccaaattctgtcactcaagacacagacacgcacagaccctgtcctttgcctctattaagcagaggatggaagtattaaggattttgtaacaccttttatgaaaatgttgaaggaacttaaaactttagctttggagctgtgcttactggcttgtctttgtctggtagaacaaaccttgacctccagacagagtcccttctcacttatagagctctccaggactggaaaaagtgctgctattttaacttgctcttgcttgtaaatcctaatcttagagttatcaaaagaagaaaaaactgaaggtactttactccctatagagaaaccattgccatcattgtagcaagtgctggaatgtcccttttttcctatgcaactttttttaaccctttaatgaacttatctgttgagtacattgaagaatatttttcttcctagattttgttgtttaaattatggggcctaacctgccacttattttttgtcaatttttaaaacttttttttaattactgtaaagaaaatgaattttttcctgcagcaggaaacatagttttgagtagttctacctcttatttgtagctgccaggctttctgtaaaaattgtattgtatataatgtgatttttacacatacatacacacacaaatacacaatctctagggtaagccagaaggcaagatcagattaaaaacaccatgtttctaagcatccatttttccctttctttaaaagaaacttaactgttctatgaaggagattgagggagaagagacaaactcctatgtcatgagaataaccgatgttctgataatagtagcatctaggtacagatgctggttgtattaccacgtcaatgtcctatgcagtattgttagacattttctcattttgaaatatttgtgtgtttgtgtatgtgctctgtgccatggctggtgtatatatgtgcaatgttagaaggcaaaagagtgatggtaggcagagggcaaagtcattgaatctcttatgccagttttcataaaacccaaaccacatatgaaaaaatccattaagggtccaagaagtctgtccatatgaaaatgagggtaaatatagtttatttcccaggtatcagtcattataattgatataatagctctaacatgcaatataaaattcataggagtattaatagcccatttacacatctataaaatgtaatgggattgcagagctgcagagtacagtgtaacagtactctcatgcaatttttttcaggatgcaaaggcaattattctttgtaagcgggacatttagaatatatttgtgtacatattatatgtatgtatatttcaaagtaccacactgaaaattagacatttattaaccaaatttaacgtggtatttaaaggtaatatttttaatatgatacattacatattgtgaatgtatactaaaaaaacattttaaatgttaaaattataatttcagattcatataaccacaactgtgatatatcctaactataaccagttgttgaggggtatactagaagcagaatgaaaccacattttttggtttgataatatgcacttattgactcccac

SEQ ID NO: 35 - DNA, 10793 bp, Homo sapiens
tccatctatatatatggacttatctttatgtattcaaggccacaagggtacactgatcattccgattttaatcccacacaacaggattcattccagttttctctccatatacataacttccttctctgacaataggaaacctaactcccactgtcttcagtagatttatttgatcagtatccctgtgtgtaaccaatctcccgtctctgccaccagcctctctcccacatggatcccctccttgcctcacttggactccagcactccaggcagggcctttgctttccccaggatgctccctccaccctgctgggctcccacaccccacaccagtccaccccttgagggcacattctccccacatcctctctggtacctctggggcacgatggcttctccctccgccacctttgctatgccccactttgtggctttaggacaggactcaggagaaagggaagacaagaagggaaggaatcccttggattttttaaccaaaaaatgcatcaagtacatggagacagagccacaaaataatcataacaaatattctaaaccaatcagacagccagccccagatcaccctataagggggcattgctaccccgtgacagctgggtagcctgggcaaattccctaacctcaccgagcctcaatttcctcaatggtaaaatggggaaaggacagtgcttccctcgtggtttgggtgtgaagcttctgtgagttaatgttagtgaacagccagcctcagcccctacccaaggtagctgctccgcagatgtgatgacaaccaccgtgtgtttctcagaatcctaggaaataagggcttctttctagaaggcagggccaggatgctgcgtgggtgttccctggcagagaggctctgtggccctcaggacttcatccttctgcaggcttgtgtgtttgttttatttttttggcacgcctgcagccaagttggggagggtttcctggacagaggtcctttggctgctgccttaagacgtgcagcctgggccgtggctgtcactgcgttcggacccagacccgctgcaggcagcagcagcccccgcccgcgcagcagcatggagctctggggggcctacctcctcctctgcctcttctccctcctgacccaggtcaccaccgagccaccaacccagaagcccaagaagattgtaaatgccaagaaaggtaaggagggggacagagccctgtgccatcttccagggagcaggtccccctctccttagtgtgtcctcatgctcctttccttcattttcctccttttgagtcatctagggaacttgagtaaagtgggctttggggcttgggggagttctctcatagcagagttggttgtcagaatcataagaatccctgacccttagagttgggaagaaccttccagatcatccaaactgatctttgctcttctctcctcccctcatccccaatattttaaagaaaccaaacctttggcctgggagtctggcagcgctcagcccttaccagggagagctgcacaggctgggctttggagtcttccaacctgttttctcaactgtaaaatggggacagtggtatttgttcaaagacttctcatgaagattttatgatacaaaatatataaaggcacctcacttgttgcttgatgcacagggaaaagaaaaagaagaagaaatgaattctcatttctgtagcatatcacagccttcaggaaataaatgtaactcagactagtccaccagaagcagctttgctctgctttgtagcctctggggattggggtgtccctcggttgctttggctacagcaagacttgcccttgcagccccgcctgcagtgaggtcaccccaggctgtgttgagacaacatcagtggaatgtcatggcaatggacggggctgtcacccccccagggagcagaggctagaagagagtccaaggggatgagggtggggactgaggcagagaaacaagcagctaggaccaagggcacagaaaaggaaagaaggggctgtgggggcctcccttaggccctcccggggctcttcataaatggacagttgcccactggccaggaactagtgcagtgcataaagggacatcggggccatggggcctcacaacactgtgacaaagaatggggcaaatctggctgctgataaaaaaatcatcttcaagattcagtttacaaagtgaaaaaagaaacattcaaaagagaatgagtatgatgctgacatttgctttgaaaaagggatttatataataatacatttttacttgtatgtgcataagttctttctggaaggatccacaagagtgagtaacagtgattacctctgggaagaaaaaccaggggctgggcgcagtctcaactgggaaagaaaccagctttttgaactgtttggattttaaaaaattatgtgtgtatattaccttccacaaaatgttcatttaaaaagagaagacaataccgtgcatagttacgtctatgagcattagccaaaatcgccaccaagggagagcctttgtaaaagatgcagctccaaaggcaaatcatagaatttttgaatgtggaaaaccatcgccagcttctcaagtttaccaaagattcagtattaatataattatgtaaatctttttaaactcatgttaaaaaaaaaagggtcagagcacgtgatgccttggttctctccagctgtcacacttgaaccctggccctatgtggtctccatagaaggggcccctggagttccagggctacaggccaacagaacagccacccaggccctgcctctcgctgaaacccatggcagtctcccgcccaccaacatggcaggcacttatagagctctttctccacgtaggcaccagtctatatgctggacacacagcagagaaacaccgtctctgctcttaagacatgaaccatggtggttctcactcaggcatcaacatcatctgggagatacattagaatccaggtgccttggccaggcgtggtggctcaagcctgtaatctcagcactttaggaggccaaggtgggaggatcgcttgaggccaggagttcaagacaagtctggccaacatggtgaaaccctgtctctactaaaaatacaaaaattagctgagtgtgatggtgtacacgtgtagtcccagctactcaggaggctgaggcaggagaattgcttgaacctgggaggtggaggttgcaatgggccgagattgcaccactgcactccagcctgggtgacagagtaagtgagactccgtctcaaaaataaatcaataaataaaataaaagttaagaattcaggtgcttgggccccacccctggaaatgctggtttagggatcttggtgagtttagcatctgccttttccacaggtcttcagggattcctaggagcagccaggaatgagaatctcaggggcaatctagttgcagggctggtgcccaaaagtacgggagaaagtccaaagaagggacggtcatgccagaggagaccagttggtgccagggccaagagggggagagcaagtggcaggactggcaaaggaagggaatgccagcatatgctaagtccttgtcctggccctcagggtgggtgagaagcggggagcctagagtacttctgggagctcatctgttcttggggccacatggtcacacctggcagggaagctccggagggaaggatggcctcataggagtcacaggcctttagaacagggaactgggggaacctggagggcatccattctaacatcacgcagaaggaacctgaggctcagagagtgggccagcacaaaggcctcctgactctgcccagggccgtagagacacctactcccacagcttcctcaggtggagctaatgagagtagcttcctgtaccttggacagtccctggaggaaactttgcacatatgggcaccttggtgcaaattacaaaaggtacctcctctaaactgacaaattatagaaaggcatctctttttctggtctgacccactctagccagggcaaggcttaggagacaaatgggccttcatgtgtccctcagcagaatgcccttcttcagtgcccccttgcacagcctcacatggcaccctatgctggtacatcacgtgactgggtacagtgctgctataactggtggaggcagtctctgtgtgaggcacacatgacctcaggctggtttgccagccccaaactctccctttttttgccttgctcatcagggtgtttttgctccagtttggtaagttacatcgctaatttctatatacacaaccatgtgtcttgcctgtgattcttctgcaaaggcaccttatgggtggacgaaggctctgatctcactctttgtgagtgtggaatgtatgcagacacagccaaatggaccattaaagtgtttccccacccacttccccaagctgagtgcagcctttcctgaagccctggtgtttcagaaagaccagggtccgccccaggagctctaaacttacacacacatagaaatatgcttcccggcaccctcaacttacacacacatagaaatatgcttccccgccttcccctgctgactcttacatgactggctgccagcaggacagctcctgttaggaatccgtttgtgtgccatggggaaggtggggaagagcatggcttcagagccatgtgcacctgggttccaggccagccctgccagctggggctctgccatcctcggccagttggtttagggcagcctgggtttcctcatggtgaaatgctggtggtacagaatgacacgttacctgtgtcatagggttgattatgagcatcacatggggtgacatgtagaacggcttagcccagagcctggcctcctctgtaagagtggaaaacctgggttccttctgccctcatcttattagtagctgtgatgggcacacactcagccaagcactgaggtaggcagctctgcgtttcagttctcttagtcttctccagagtcctaggaggtggggctgtcatcatccacttcatacatgagggaaccaaatccagagaggctgagcagctcgcccaggccacccgtgtctgtggcacctccaagccctgcatatgcgtgccccaggctggagtgcctgctggtctgtgtcgcattcctccagcctggggaagtgaacctgggggcttcttgagggctcctgctgtgcttcctgtgctgttcttccctggagctgaaaaggtagctgggtggtgggggatcactgaagcctgtgcctacaccctcacccctgcctctgctaatcccagccccatctgatccccagcaacaatcccaaacaaatgcagcacaggagcaagtgaaggatgggccccctggcagaagtcacaagtggttaattagactaccaccagcaaggatagagagagagaaagtttcccaagatatcaaggttgaggggagtcttttcctctcatccctctgcagctaaggtaggatccttcctgctcagtccctgccccaccctgacatatttcctcctgcttcagatgttgtgaacacaaagatgtttgaggagctcaagagccgtctggacaccctggcccaggaggtggccctgctgaaggagcagcaggccctgcagacgggtgagtgcaggcagtagcctctctgggcaggagcgtctgagagaagggcccaggccagcagccagcaatgctcttctcgcctccgttcagcatcagggtcctggctccattagtccaggcctatgggtgaaggcaccaggttcagggagccccacctctttctcttggggagatcccctgacacgtgtctgcaaaactcacctggatgtgtacggccaaatctctggccacagctgggtggtgtggaagtggggatgtcccaagaggacaaaaaattctccaacaagaatccactactgcccaccagaagtgaccctggagcgctcgatggggcagaggtagtggcccaccctagcaaagctcccaggagcccctcactcagctggcctctgcagccccagagagctccacactcctgtgtgtcagcagctttgctgaccctgtctctcttaatcgtaactctgctgaggtgggatttgtcagctccattttaaagatgagctgtcagctccatgaaatgtcagctccattttaaagatgtgtcagcagcaactgaggcatagacaggtcctgaacctggctcatactcacctcgttggttagttgactcgtggaagagcaagagttgaatggaggcaggctgcccagtgccaagctgggccttggtgttcctggctctgcactagccagctgagggagggtgcacagaatcaccaagaacagggcccaggcgcatggtaaggtcatgccctctggccagcatacctggcagcctattgtttctcactccccatgttcctgtcatatagtctgcattttccacatacctccgatttacctacctttatatgacctcaccttccattctatggagaacacagactcacaatactgatgactatttacatgtgagcccactacattctggcactgttcttgatgcttgatgcagactcacaatactgatgactatttacatgtgagcccactacattctggcactgttcttgatgcttgatgcacgttaactcattcacagcacacccgtgcagtggtcctgttactacatcctcacccttattttccaccgagaaggaccttgtgacagccgaaaggagcagagcctcacttagctctgctatgctgcccctcgagttatcagctgggaaatcaccttgactcctcagcaaatctataaaccaccctgtgtccacagccactctcttacctgttgcttttgtgaccaaggcccatccatctgcaaggccttcccttccccgcctgcctcctcagaaacccccaacagccttctcaccggatggttttacacactccctcccattcatatgctttccttcagcattcacactgccatccttctgcactcccaccacagggcctttgcatgtgctgtttgggcaacctgaattgctcccccaagatccacctaataaatgcctccagcattatcttctcaggagtcactaatccctcatctcaatcagctcctcagttataagctctcccagaacagtgtcctttcttttatcacactgactgcagtctgtaatgatacactcatttcctgatttgtgtctgctgcctccactagactatagtaagccctgagaacacaagggccatgtttgcttttcattgcccttgtctcttccactaccctgcccagcatagtgcctgccacatagcaacactcagtcaatctctgttgaaggaaggacaaacatgtaactttggacagcttgcttggcatggcaggtaggaagagagtgctcgagaaagggagcatctccagaggtgtttttgacttcatgtaataggaaacctatcagtggcttaaacaaaaagtaagtctgcaagtaggtagttataagtttttgttcagaagtttcacctcatggtcttcagatggctgccccaactccaggcatcatgagtgcattcaaggcaagaaggaggaagagtagcccaaccacatctgtctcatttatagggaacgtagtcttccacttccatctcattgacaagaaatctatcatatggccacctgcagctttaagaacatctgagaatgcaagaatgtagcttttccagcctctatagtggaggtggacaagagagaagggatttggaggcaacagtgcctggcacagcgggtatgtttagaatgagcccagtgccactctgagcctcagtttcctcatctgtaaggtaggcagggtaaactctaaggtctctctcatgtctaagctctgtgctgtgcaaagtcaatgtaacccaggcatcaactgccacctggggtgaggtaatgaggtggggacctccctgaaaaaagttcatgacatatggaggcccaaagcatgacatatgaaagcccccatgtctgctgatttctaggaagctgctgggcttcttggggccttctcctgttcattgtcctcacaacccaaagatcaccttttcaataaacccacccaaagcattgcagagctctgttgacctaaccagagttgaaggaatcagggggcaacctttccctcctccaaccagcatacacatgggaggttcccacctggtacatctctgccaggcacaaggaggcagaggtgatgcagccagggccctgctccctgggaacctcaatatattcatggaatcacttgagcccttgaaagctgtgtaggaatcagagaagataaagagggttgattccaagcagatggcagggcaggagcagaggtgtggaggactagcataaatcgacaggatcatgaatagaccagagcaacaaaatgttggcagcaatgatagtatcacgagaagtagcattgactgaggactacctatgtgttggagggaggttcaggtgagggtcctaggaagcaactctgagatggagtttaacccacaggagacttatcaggagataccctcaggatcaacccctgtgctagggaagggatggaaggaagcaggagtgggcagaaggagaagtcgagctgtactgtggtgccacgaaagcctcagctgacttcaggagccctgatgacgggatgacccttcggcactgtcctgagtcggggcaagagggcttatgggtcagtcttgggtgtaggctgctctagggaggggcacggccttggaagagatggctgtcttctgctgaggcagtccctgcaggaggctgaaagctgaggactttcttcctgcagcattcctggcagccagggcagtgaatccttcatccccaacaaaagtctaggtagcacgtcagtgttaccagcaggaaggaaaggcaatgaaggccgcttggctaagctgtaggatagcacgaggtaggacagctgacttggggcagagtctgtgggtagacacctctgtaatgcttcaggccccatgtttaaagtcggttgtggtgtcagatgcccatggggacactgggatgctgtccattgatatttgttgagtgaaatggaagtaactgagtgggaatggatagaggggagtgcagacatcccccaaagtggtggggtcaccagcaagaggacaaatgcagacatacacctgtctgtcaagatattcctttccacagaaatctttagtaaaaggtgaacgatttatacgatctcaggagaaatcagagtatgtctagatatttcagctagaaatcaagctgaaaatgcaaactgcaaaacaaaaatagattttatcctcctaacttgaccaaatatgtgccttcatcacaacctttggggccaggctcaaactgagaatttgtggacacctcagagtcccttgcctgatcgccggcctctgaccacagcctgtgcccagcacttcctgtcttctctcttgcagtctcagctctatccactcagccccaccctaccagccctcaggagaactgaccctgcaaaaggcacttggcaggccctggaagcttgcttgggctgtttgggtagggatttggggccctgggtacatgaagtgtggcctaggctgtaggtgggcaggtgccctggccctgcaagctgcttgatcttagggaggggcatggaggaaggagaaccagagcaggtggctgtggctgggctccctgggaagctgactctgagacagagctaatttgttagggtgagccctaggagccacacatgtgggggcggggggaagaggaagtgggcagagggagagctgagctgcagtgcaggcaccaggccagcctctgtgacccaaggagatggggtgggtaaaggccagaaatgactgaggtggaggcctgggaaggggtgtcagctggggctgggtgcttctgtagcacaagggctgccttttctcccagccgcgggagcaccaagacctcctgagtggggatctggatctgtacattagtggccaccacagccaggtcctcaaagtgcatgaaccatcaggaccccttttgcctgggtctaaggggctgtcaggactgatgggataaacgggatgggatggaggacggtgggcttggcctgggcggttggctctttgcctggggaacagggggaccttcggtgacagccatttctccccactcccagtctgcctgaaggggaccaaggtgcacatgaaatgctttctggccttcacccagacgaagaccttccacgaggccagcgaggactgcatctcgcgcgggggcaccctgggcacccctcagactggctcggagaacgacgccctgtatgagtacctgcgccagagcgtgggcaacgaggccgagatctggctgggcctcaacgacatggcggccgagggcacctgggtggacatgaccggcgcccgcatcgcctacaagaactgggagactgagatcaccgcgcaacccgatggcggcaagaccgagaactgcgcggtcctgtcaggcgcggccaacggcaagtggttcgacaagcgctgccgcgatcagctgccctacatctgccagttcgggatcgtgtagccggcggggcgggggccgtggggggcctggaggagggcaggggccgcgggaggccgggaggagggtggggaccttgcagcccccatcctctccgtgcgcttggagcctctttttgcaaataaagttggtgcagcttcgcggagagg

SEQ ID NO: 36 - DNA, 10556 bp, Homo sapiens
accccatgtgggacacagaggacctgcagtagcaggagggcacagctaagagaggagacaagaggcagcttgggggcatgggggggaccccatttccccaaatgttggagccgcccttaagggaacttcccctggactcctctggaggtcttgccagatgggagaaccaggggtccattcagaccccagtctcttctcttcccatctcatctctccacctggggggctcaaagaacctagctcctcccctttgaccccatcagcttctccctcaccgaatcctcttacaatccatttcttaattctgccccatcaaccctccctggtcatcacataaacaccagcaagggcagtagtttagggacagctttgctctgtattcgaagaaaggtctttggtctgcttagaaattaagtttggagcagcctgggaggaaatagaagagatgagacccagagaatcaatggccactgccaaagagagataggagagcctttctgcggccactgattcaacaaacggcatcacacgcccctcagcctctcatctcttcgaggccatctccacccccacccccacccccaccccaaggccattccaaggtcccattcaagaccactgcgcaggggtggcgccagaatgatcaaagtcatcatggggcactcatctttgtgtgggtcaagcactttgtggtgtcgtgtccctgttcccaaaccagggaccaggagtaggatgggggaggggcagggcgccgctgctgagtggagaggacgcggagtgggtgagggggccttgcgcacagggcaagaggtggccaggcagggcgggggaccggggagagcggaggatttcagatgagggacaggggaaggtggagaggggagggcaggccccgccagggggaggagccgcctcccgcgtccagctgtcggggctccctcccgtcgcggctccgctataaaacccaggccggcaggatcgctgcacccgcggcggcctcctcggtgcgcgacccccggctcagaggactctttgctgtcccgcaagatgcggatgctgctggcgctcctggccctctccgcggcgcggccatcggccagtgcaggtgagctcccgggctccggccccaggtgcccctcggcggtcccctccgtgcccccagctcccgcccctgcagaggatccccccgcgggcgaccggtgagcgtcggtggcgctggggtcccgggttgcgtgtgcgccgggggccgcgagggtgcgggaggactgggcagcgcgcgagcttgtgtgtgcacacgcgtgtcagcaccggctgggggagcgtgtgcacgggtgtgcgcggtgagggtgtgtgcgcgtggcccggcgagacgagttgggagtccctgataaggatgcgtctcaggccgggcgcgggtgctccagcctgaaatgccagcacgttgggaggcagaggcgggtggatcacctgagcccaggagttcgagaccagcatggccaacatggtgaaatcccatctctaccaaaaatacaaacattagccggacgtggtggcacacgcctgtaatcccagctactcgggaggctgaggcccgagaatcgcttgaacccaggaggtggaggttgcagtgagatcacgccactgcactccagcctggtgctccgtttaaaaaaaaaaaaaaaaaaaaaaaaaaaaaaaaaaaaggatgcttctcggacccgcctcaacgcacgccttcttttctcacccagcctcctccgtctgcccgtgggtttccgtccgtcccgctgggactcagcgctgggtgactgccccgcggccagagcaagggcggtctggcagggtcctggaagccgcgcttcccacacgggttccttgcccctgagggtcgcaagctcccctggcctccctaacctccagcgctgaattgggagcctggcgggggcggggggtgggggacccggagccccaaggcctctgcggagccggtctttccggacagggtgattttcgtttaaagattaatggtgaagccgagctcttaattattcctctaggtgggaggtggcaggaaaggcatgttaatatttgataagaagctaaaggcgcttcaagcggctgggcacagggatccgatcctggaggcaccttctttgcaaccccagaccccatcaccggaagaccccctctgccagttctcagcccaaccacccctcggatggttcttggggtccacgcaggctgaaacctcctctcccaagttaggtgctccatcctcaaagcggcggagtgaggggtgaaggtgtcctctgcacagagaggagccagcgtgtgccctttgcagcagggactggctgagctgtcttagagggtcgaggggcaccttgcagcctctccaccgggcccctgggagaagaaagagaaaaagcagaatgtggaaacttttatttgtagggttggacattggaaacctactaagcagctagaaagtagaaagagaaatgctttgcagttctggtgctttgtagctgtgtggtcttgggtaagtcacttcctgtcccatttgcaaaacaggtgttgtcattctgacttcaggggttttaagcgtttgaataagataatgggtttaagtgattagtgcggtgcctgtgtggcacgtggctggtgtgtcatataccaagtttatggggctctcccccaagcctggggccagtgtcaggaatgtgtctcagctcacccctcacacaagctgctatcccctttagtgccaaggctttctgactgggacctgccttccattcatcttatggaggactcaagctgagaagggaccaggttgcatatggcgacccccagagcatctctgtccattgagacaagaggccgggtgaggatatttggtccccttcagagccccagacccctggccgggagcgactgagactttgcccaggaaacacttgggttgtgctgagctgtttttcaggattatcccctgtccctcagagggggaggtggggtgagcaaggtccattagagaggcttcttcagccatcttgaaataagggggaggggtggcaggtcagtcagtgtggggggcagtagctgggtgacaggcgactgactttcggtctctaacctctggtcagggtggatggactaggtaggatgtggcgctggacaccgagacctctgggtaggtagcccctctccttcccaagccctcttgggagtggcctgagtcagtgggctggtacttacctgcaagggtggccctctcattcaacgaagacaggaacctgagtggtgggtgctcctgccaccagcaccccaccctcatccaccgacatggacctgacccctggccttgacctcaccaccattatgttttcctggctgctgcttcctgaagaaggtagttacaagtgcgttcagccaagcaggtcaaaagtctccatgattaagacagtggatcacaggtcaccactacaaacctaggagctgcggccagagccagggaagaccaaattcctaagaaaagctaagcctggaccagatgggccccagggaggctgtgaggcgagttacagggggctccaccctttgcagctggctcttggggatgctggctgaagggaggcttctcctggaatggctgcccccgggccctccagtcagagaagaggccagcccaatcttcaaaaccccttcctccttcaagacctctgcgggtggggacatgggatgattatggcaaggaactgtcatggtgcaaatgccctctgatttattatctccttagtcaccagcactgggaatttggtggctgcacctgtcagaggcgtttgaaccagagtgactccattttgggtgagagctaggaaaatgaggccgagatttgctgggctgcattatcagaaagtcaggcatttctagcctctagatgtttgcagttaagggaacaaattaataatatttactacacagacccagacttgggaaggtccagatactccgatatctggagagcaaaggcattcctaattttgctttaaaaataataatgttggctgggcacggtggctcacacctgtaatcccagcactttgggaggccgaggcgggtggatcatttgaggtcaggagttcgagaccagcctggtcaacatggtgaaaccctgtctctactaaaaatacaaagattagctgggcatggtggtacatgcctgtaatcccagttactcaggaggctgaggcaggagaattgcttgaaactgggaagtggaggttgcagtgagccaagagcccaccactgccctccagcctgggcaacagagcgagactctatctcaataataataataatatcaattcttggataatgtagtaattaagaaaattaatcctttatcacaaacccttgtagcagagcacatgtccccatatatacaacgcattgaatgcattccttccttctctgacttttgggaatgtcctactctgtctatggagtagctgtcctttcaccactgtactttcttaataaacgtgcttttcctttgcactgcagactcaacctgaattctctcttgtgcaagatccaagaaccctctcttggggtctggatcgggacccctttcctgtaacatgccttctgtcagaggaagattatgggactcagaatgtcagataactcccctgtggagactgagcaaaggcagagcgggagctggaggcttcggagctctgccccactgctggggtggcgagtggccactgccctctgcagaatccacccacatgggggtggttcaggtgcagcaactcccagggacagcagagccctgcccggggctggggatgggccatcagggggaggacactgcagctctgaaaaaggcgatgccagcagggaaggagaggcagtgatcagggcagggaaactccaaagcccaaagcagctcttcgtggccagttagttttcctggggatgctccctcatggctccttccccatcctgtccccactccggggactctaccctggcttagactacaagaagatgggactgtgggggcagcccaggcaagaagggagagggtggatgagctcagagacctcagctttggctgagtgggaaccgtgcttttcttaggaatttcctcatcttgatttctttccaagtcacttcatttctctcctctctcggcccctccttggctttggccatctgctcccaaaaggaggccatggggtgggtgggaggggtgggggggagggaaggagttgtcgatgggattttactaagtgccaagccgcctgaaacctcatttaatcctccccaaggccctatgaggtgggtatgtttgtctcatgttacagatgatacaactgaggctcagagagcttaagggacttgcccccaaacccatctaagccccctgagcggctcagccagaattccaagctctggatgagatgttgtgttcgccctgctggtgcagccttttaaaaaaattaatagactttatttttagagcaattttaggctcacataaaaattcagcaggaagtacagagggttcccataggcccttctgccctgcatgcactttcccctcttattaacatcttgcatccatgtgggacatttgaggtgcagcctttttttcagagatgctgggttctattgccctgaggcagagccctcagcctgtccccagagatcaggactgtgcggttgaggggcaggggaggaagcctggctgctttcctcctagcgggagctgtgagacgctagccaagaagggatcttagtaacacagggtgagacattctggggaggggccgcctaatctcctccctcatcttggatctgggaaggctgcccggttgaacctgactctattgtcccaggagcggaggctgggccaagtcctcctcttctcctctcaccagcctcttttccaggtttggggtgggggaggtaagcgcggaggaggctgctggtgaccaaaggatggagtatccaagccagccccatgttagagatgagtggcctcagagggcttccctggagggccagtggctgcttggcctggccctgcctggggaacagagccctatgccagctgacctgttgatcagcccctgcttggttttcaattgagtctctttttctgggccctcaatcctgctgccaggaacactccatcccagcccaagaggggctccaaccccaggggtaggcccagcctctgatcctcctgtgtgtgtgagcaacaagacacacgcacgcacacttcacacccttcctctctgctccagagtcacactggtgctacgaggttcaagccgagtcctccaactacccctgcttgggtgagtacagccagtccaggggactgctctttgtgcatggtgggcaccacgcaagccgaaatggagaccccggaagagtgggaaggggaggggtgatggtggcttcccaggcagatatcagttcccagcatacacacacacacacacacacacacactctctctctctctctcacacacacacacacacagatatacaaacacacacactcacacagaaacacacacacaacacacacacaagcacacactcaaacactcacactcacacatgcacacacacactcacactcacacaaacccacactcactcacacacacaaacacacactcacactctcctgtcctggtgctcagggaccagggagcatagagtgacctgagtcttcactggcacctgctgtcatcgagagggcatgttccctgtggaataaatcggtagcagcattaaaggaagaaaggcgttttgctgtttcccataataaaacggggagttgtttctatcccagtgacaccccttgcagggtgcctgagtgatggtcctttacgcttttatttgaatgctgaccaattcgaatgcaaaccctgcagtctgctgtgttttggtgactgagcagtgctgcccgctcctgaccctggcccacctggtgttggggtcaccagggttcggggaaccagctcctccagggttactcctctccctcccattcctcagatgatgctcagcgcccttcatcagcagcccccccgggggtcccactccacagtttccaaagccctctccatccacctcctttaaactctctgacatcccagggaagcggattatctctgcagttcccattttacatttgggaaacccagggcttggagaggccatgtgcaccacctcatgaagttgtccctaccccggagctcacagtcaacagttggcaaccctgttcccaccctgttccacactggggctagactccccagccttgcatgtatgtttctgtggaggaggaggaggagggcccagggagggcgagagtggagttcggagctgagcatccctgcagcacagccttcaggccaccccaaagcgtttctgtgtgggaactgagtgggtgggcctgacttcagtggggtggtgggggctacaccttggtgccaggcacccgactctcagcccaccttctctccctgctcagtgccagtcaagtggggtggaaactgccagaaggaccgccagtcccccatcaacatcgtcaccaccaaggcaaaggtggacaaaaaactgggacgcttcttcttctctggctacgataagaagcaaacgtggactgtccaaaataacgggcactcaggtgggctggatggaggccccaggcaggcctgggcacccgagttccccaaggactgagaggatggggctcctcccaggagggtgtgccagacccaggcccatctgtgctgtgaggtggctgaaaatcccatgggggaggacagcttccaggaggagagagcactctagtatgttttcgttacttttgtcagaccagtctgggatgtgggggcaggaaacgttccaggaagaaggacatgtgcaaaggcgcggaggcatggaacagctcggcgtgttcagaggactgccaggagctctgtgtggaggaaggacagacagtgaagccaggcagagcccaagcaaggcccaggggcagctgggctggggcccaagggcagatcacccaggcctgaggagtttggacattaccccgaggacaccagggcaccacagaggaggtggacgcagaggaggcaccaggacagagctgcagtttggggcagtggagggtgcaggagagggggaggcaggcagggagaccaaggaggaggccagggaaaggtccggggctgtcccaccctgtcccaccccgcgccacccctgcaggccagaaccagagctcatgaaggttgggaggcaggagacaatgtcccatctgggtgaagctgggatgaagagctagaggaggctgagggaggctggttcgaggactctgccccttctgtgctcccagtgatgatgttgctggagaacaaggccagcatttctggaggaggactgcctgccccataccaggccaaacagttgcacctgcactggtccgacttgccatataagggctcggagcacagcctcgatggggagcactttgccatggaggtgagggccccttcccgactgggaccttgtctgggctctgggcgcgcacctgccttgggcaaggagggtagtccaggcccttcataggtccccttttcacccctccaccccgaccagatgcacatagtacatgagaaagagaaggggacatcgaggaatgtgaaagaggcccaggaccctgaagacgaaattgcggtgctggcctttctggtggaggtgggactcccatcccccacttcccggggaacccggggctgagagcttcttcttaggattcagagacctgggactccagcgaggcaggagggggcggggagactccaacttccgcctctgtttctggggttgcatgtccccgggccaggtggggagcccagagcctcaatcccagaagctgcctggccttccgcccccagatcgggagaatgaactggccaccaccactggctccctgcagactttctcaagacccttccctccctttccaggctggaacccaggtgaacgagggcttccagccactggtggaggcactgtctaatatccccaaacctggtgagtcaggatgggggagaagggcttggggtgaggggggggattcctcccacaaaggaaggggtgggtgtgcggggagctgggctctcagagtgcaggggaagaggggctccttctcccaccctcactgacagtgtcctctgcccctatctcagagatgagcactacgatggcagagagcagcctgttggacctgctccccaaggaggagaaactgaggcactacttccgctacctgggctcactcaccacaccgacctgcgatgagaaggtcgtctggactgtgttccgggagcccattcagcttcacagagaacaggtgcacagggcctggggcagggcatgggctcccactgcctggctccccagaaattatccctctgtctgccctcagaggtccctcaggatacaggtggggagcccaggtaactgaagtccgttgttaatcatcgacattcactgaagacaggcaagaaaagcctgagctgttccatcaccagattgggggctagacaggaggcaggggaaggtggagtcattcagaaaatggtgctggggtttctatcatgaacgaggctctggggagacagcagtgagcccaaaggacccaaatccctacccttgcactgctttcattccaaaacagtggttctcaaagtgcggcccctggaccagtggagtcaacatcatcactgggggaatttgttagaaatgctaatcctcagagctactgaatcaggaactctgggggtggagcccaggcatctggggcccaacaagcccgccccccagctgatgctaacgcatgctcaagtttgagagccacagtcctgtagtaagagtgacaagagaagcaggcattgcgggccccctggggtgtgagtgaaaggaagccaatgggcacttagccttcacccatgccacgcacctcatttacatcccctattcttatcatcttcacgaccaccttgagagccaggggttcagagcccctctttcctaatgagggctcccaggacaggatgaggtgcctgcctgaggtcacacggcagggagtgcagctccccctgccccgacctgctgagccccatcacttccgcagatcctggcattctctcagaagctgtactacgacaaggaacagacagtgagcatgaaggacaatgtcaggcccctgcagcagctggggcagcgcacggtgataaagtccggggccccgggtcggccgctgccctgggccctgcctgccctgctgggccccatgctggcctgcctgctggccggcttcctgcgatgatggctcacttctgcacgcagcctctctgttgcctcagctctccaagttccaggcttccggtccttagccttcccaggtgggactttaggcatgattaaaatatggacatatttttggag

SEQ ID NO: 37 - DNA, 9897 bp, Homo sapiens
gttgcatttttcagatatatcctaattctttcatagatattcagtctctactccacctctggccaagcctttcctggtggtaggaaactggggacttgagtcctatgttgtactgtgagggtagagaatagaagagaaagcatgagagaaaagcatgaaaagaagaatcaaaagaaagcaatataagaaggaaagagaaagaacagagaagtgggaagacagtggagggtagaaactaggaccggaagacatggggacaagctgatgcccactgcacaacgtcctcacaggtagttgggccatttccccatctggggtacagaggtggccagggagcccatgagaaatgaggaaactgccttcccaaactactggagaaagagggtgggggtggtgatccacatagctgggctcaggaggaaagagggctgggagtctggaccgggggaacctcgggtcaagatgccacagtttctaactatggagggcctgggggcctggactcctgggtctgagggaggagggcctgggggtctggactcctgggtcggagggaggagggcctcggggcctggactcctgggtctgagagagggaggcctggggcctggactcctgggtctgagggaggaggggctggggggctggactcctgggtctgagggaggaggcactgggggcctggactcctgggtctgagggaggagggactgggggcctggactcctgggtctgagggcggaggggctgggggtctggactcctgggtctgaaggaggaggggctgaggggctgggggtcctggaccctccatctgagggaggaggggctggatgcctggacccgaaggtctgaggaagaaagggggtccctgataggccactgcggccattgagacttggggtggggcccaagcctccattttgcaaggccctcccctccccacccttttctgggctggctgcttaagggctggtataaaggacttgtttcctgctgaaaaagcagaaagagattaccagccacagacgggtcatgagcgcggtattactgctggccctcctggggttcatcctcccactgccaggtgagtgatgagcccagcctggaggagattccctggaggccgggcaagggaaccctgctgagatggatttgctcttgccactccaggagtgcaggcgctgctctgccagtttgggacagttcagcatgtgtggaaggtgtccgacctgccccggcaatggacccctaagaacaccagctgcgacagcggcttggggtgccaggacacgttgatgctcattgagagcggtgagaaggccctggcgtgcagagaccccgccctgtcccctcagtcccttgatccctgtgcagggacccgggagccacccctccgggggatcgactcctagggtcccggtgatcccctttccagcctctcagcctacgccgtgtagcagcgtctccctccaggaccctggaggcctgacctccatcctcgcttgcctccctctttcggtccaggaccccaagtgagcctggtgctctccaagggctgcacggaggccaaggaccaggagccccgcgtcactgagcaccggatgggccccggcctctccctgatctcctacaccttcgtgtgccgccaggaggacttctgcaacaacctcgttaactccctcccgctttgggccccacagcccccagcaggtgcctgcgggagggtcgggaggagagggaggggctgctagaaggggatccgctgagcacagaggggctgttacggagtccctcccaccctcgctcgctatcccgaccctcgctggctccatccctcccctgactgctccctgaccatcgccccgccccgctccctttccatccctccccactcactcccgatccctcccaccgacctgccacccgggaatccccgcacccctcctcttctaagagcaaacaggacggatttctgatatgaaatcaccattaactgggttatcctgcattctttttttattctgttgcgtttggttcaagaagttctcctgcagggtttttgctatttcctcttcctaagggagactgaactgtaactttccactttccttgtctggtgttataaagagtctagggagatattttgcgcttcttttattggaacagcttgtgaacacagaagtctcctgttcttggaggtttagtagcgcttgcaggtgaaggcactggctcgttccagggcaccccctcattcccttgaccaatgagtctgcttctgtgtctcccctcggaaggccagactttgttgaaaggttcagacttgaccatgtctgagtctacatttggcctcagcaggcccctcctccaccctgcccaccccccacccccacttgccacccaagacacccccccttttcttttctttttttttttttttttttttttttctgagaaagcgtctcgctgtgtcgaccaggctggagtgcagtggcgcaatctcggctcactgcaacctccgactcccgggttcaagcgattctcctgcgtcagcctcccacgtagcagggactagaggagcctgccaccacgcccggctaatttttgtatttttagtagagacagggtttcactatgttgcccaggctggtcttgaactcctgacctcgtgatccacctgcctcagcctcccaaagtgctgggattacaggtgtgagtcaccacacccagccaagaccactttctgtacccagccctgggtgcctctacccagacctcctgttcattctcccttcctcttttatggattacacttctttattttcccacatccagatcccatgatgggagctgcagaaggcccctttgggaaggctgagcaggttgactcttgaggccagcaaaagtggggtgcagagaaggtatctgatcaaatccagtgccctctcagtgccccctcactctgtctgtcactttcctagacccaggatccttgaggtgcccagtctgcttgtctatggaaggctgtctggaggggacaacagaagagatctgccccaaggggaccacacactgttatgatggcctcctcaggctcaggggaggtaagcctgggacatcggggtccctgtggggactgaactggaaggtctggggactgagatcttaggctttggggagtgaggtgagctgaggcacggcatgagacccagaggagggtgggcctggcttcctggagctatgcctgcctctgagggttgggtggtcctggaggcagcatcactgactctccctcgctccccctttctgcaggaggcatcttctccaatctgagagtccagggatgcatgccccagccagtttgcaacctgctcaatgggacacaggaaattgggcccgtgggtatgactgagaactgcgatatgaaaggtgagtcctgcccctaggctgtgccctggactgcagcctcggggcacgatgacacatggggcatccagagccatcacaccaaagccagcaggaggaaggtcaagggtgcagggtgggttgcttggcatgtggctttaggcaacagtgagtgctggggcccctgctggctctcaagctgctgagagtgactggttgcttcaatttctgtgtctccacacccctggccttgggtaaccctaggtctcccacttccctaggccaccgtagcctctctcccacccgtatcagcccccgccccgctcatggtgctggagtgccccagcagccttgcctgcacaggagagaacatcagagagaaaatcaaggggactttgggtgtgacagagaaagcaagagttaaaggaggacactgagagggtccccacttacccatttaggtgctgccatggaagagagtgccagggaatgtctccataagaagggctccaaagcaacaggaagccatggtggggaggtgggggtcttataggaatcccagcttccctcctagaagcaaagtcttccctgcccctgcctcagtttccttgtctgcccacatcacgctaacccttagagcttagaagagagagttgtgtgagctctgcacacattcctctgtgtatttggctgtttctccctagctaggctgggagcctgaggctaggggcttggtaccactggcaccagggtttccagccttgggtagctcaggagacggctcaggaagggtaccaggaggtgtttgctcaagtgaggacatgcagggctcacttgagcaaagctccctcatgagtcagaccctgtttctacctgaagggcctccaggactaggagggggaggtgctacagacacagatggtcacagcttgaggtgatcagggctgtggcaaacggggatgtggggcctggggcagctcagaggaggaaaatactgatgttgttggggtagagagtcaaggagggctttacagaggaggtggcctgtgaaccgtgtgttaaagatgacctacagcttattggtagaagaggaagaggacattggtggcagagggaacagtgtgtagcagctgcataggcctggaggtgggagtgagcctgctgttttcaagaagagtccctcactccacctgagaaggactcatcaagatgagggggtacagctgggattgggggtgattcgaagttttccaggtggacaaggtgggtgtggggtcgaagagggagctgctccaagccaaaggcacagcaggtgtgaggctgaggaggaaatgaactggcatgccttcagaatggatactggtgggggaggaagagttaagtggggaacctggtggtcgctcaagtacctgaaaacccaggctgaggggtggaccctctcctgaaggcaggggagccatggaagattgtggagcagggagggcagggtctgagccatttatctttccttttgactgatgctgctgttaaggatctggccctggtctctgggaccagatgacactgataacccagaaggtatttcagaaacaaatcagacgcaacacatgccacacacacagcccacaataagcacagcagacacgaatgcgtcacaccatgacacatacacaccacacatcacataccacacacacactcccccatacccctgacataccacctatggaacacaaatcacacacagagcacacaatatgcacaacacacacaaatgcatcacacgagtgcacaattactacgtgtacatgtagtgtgtatgccacatactacacgtcaggtaccacacacactctccctctcaacatatcagacatgcaatacataccacacacaacacacaatacacacaacacatctggcatgccacacacaccacatgcaagcaaaacacagatacacagaacacacaccacaccaaacacacaaaacaaacacataccacatatatcacacacagtatgtctacacatgcacgcaccacacaaacataccatgaacacaccacacaccccatacaaccacaccccccacatgtatactacgcactcacacacagcacacatacctgcacacatcacgcatgtgcacacactacacaaacgcaccacataaaacacagcgactatgcaccaatcagtgctgttcatagagattcatctgctttcaacactggagccagatcttgcaggctgttttgcctccctggtgaagtgcagttcagcagtttagcagacagtgagcatcacaagaccaggcatcagaaactgggggaacaacaagacgttggggaccaagtgcaggagagaagaggcttcagggtgatggaaccgcttataagaagccgcagcagtgggagggctgggtgcaaggatgcaggttactaaaaggggccatggcagcagccccttgtgaagaaccaaggggcccgggcagataaggccctggctgcccctagaggagctgggcagcggtcccagtgagagagcagggaagagcccacgtctgaatcagggacacgtgggtcccaggcccagctctgccgccgaaacagctttccagcctcagcttcacacgaggatcaaaagtctccatatctcatggagcctctttccctggatttggggaagaggaggggatggttgcagacatgggacggaagcagatgcaaagaccatgatgtgggtgagtgcctgccagaaacacctgtgcggagcagagtgatggagggagcagggaggcggccgcgtcttatcaggcctcccgggccattggaagggcttagaattttattctccagaatggggacctcctggagtcttcggagcagaggagtgacatgaactgacttaggtttacctagcctccctctgcctgctgggtggagaatggagcgagaggaacagtgacaggcgggtgcagggattgccccaggagtcaggtgggagtgaagcggggggcttggaggcagcagaggtggtgacgtggggttgggttttgaagattttctgcagctcaagccagtaggattacttgaggaacacaatgtgggagagaaagagcgtggtcaaggacaacaccaatgtgttcagctagactggcagaaacgagccgccacgggtgtaagtaggggagatgggagtggggagagaagggtgggagaagggagcaggagccatgattttgattttgtcatctgtgaagtatgcaaatgagcagccctccagggtggcatcggttctgcaggtcgcatgtgttggtggaagctgggggctcagtctaagagtccctgcatcatgggaccgatcccccctgctctgtgatggccgtgaggggaggccaggggctgtggtttcacactagagccttgagggcctcggggccaaggtagccgaggatggtcttcagtacctgtctccctcctgctcccaaccccgaccctgagggtccagagtccctgggttcccagcctacctctgccactcacaagctgtgtggcatgggcagctactgagcaatcctgcctctgtttcccttgttgcaaatgagggtgttgattgtgatcacaccacctactgctggggtgctgtggggaaatgaggcatcccagataagctgtgttccctggaaccttagatgggtggatctgtgggaagcaatgaggtcagccaggtgcagaggcagtgctcagcggcagtgctcagcccaccctggcccttcgcatcttgtttggaacatagggctttgcaactgaaaggtatgagaaaggtctcaggctgccttccttattattgaaatgaggaccttaaagctcagatggggaagcagagatgggatgaggataaggaagagcttccattgctctcacagctaaagcaaggaacggccgttcccccagggctgtgagaggacgtccctgcgggtgttcaagcagaaacagggaacaatgggggtgggatttcgactcccaagtcccttctgaatccttggttaagggaatctgtggccaggtcacctggagtgtgactcaagagtgtgatcaccttccctagcccaggacgtggagggacagacatggtgggttcctggcttacacacaccctgggattcctctccccagattttctgacctgtcatcgggggaccaccattatgacacacggaaacttggctcaagaacccactgattggaccacatcgaataccgagatgtgcgaggtggggcaggtgtgtcaggagacgctgctgctcctagatgtaggtacgtggactgaggtagaagacgaacacctgtcccaagtccctggcagctccctccaccccactggattctttcccctgaatttcctgctcagctcccttcacatctgcaattttcaatccgactcttcttctctctgcatcttgggttccccttatgaaaactgggggtgaagcagtgggaatgacagtgtctgcctttctggggaggggtgaccacgtatgcggtaatccctgcccagggtggagaaccgtgccaacaccgaggactctcagtggcttcatacattctggaaatgtttatccagcatttgttttaggtgccgcagatccaatcccatctgtattcctgcagctttatatgccttgagaaacaggaaacaaacaaacaaaaagcagcaaagtatggggaatggagatcccagctctgcagagaaatctggcaaggaaaaggagataggaaaagtgaggggaaggctgcaattttaagctcagtgctcaggggagactcatggagaaggtgacctttgagcgagaactgggaggaggcagagcttcgggcaggacccaggccccagcctccgtctttgccccacactaaacatgacccagcagttgtgatcagggcattcaccctctgcctggggggtattgtgaagggcagggagtccagctctggagcccctgctgccctgggagctgcccagtccccagcccagctttccctctcaccctcaggactcacatcaaccctggtggcgacctaaagctgcagcgctgttggggctcaaaattcccagaagaccaccatccactcagcccctcctggggtgcttgtggcctcctatacccacttctgctcctcggacctgtgcaatagtgccagcagcagcagcgttctgctgaactccctccctcctcaaggtatgggatccagggccgtggagaaatgaggcccagacacacagagactctggcccaaggtggccagctgctctgagcacaaagtcatgtacccccaccttccctctgctccccagctgcccctgtcccaggagaccggcagtgtcctacctgtgtgcagccccttggaacctgttcaagtggctccccccgaatgacctgccccaggggcgccactcattgttatgatgggtacattcatctctcaggaggtgagtgctgcaagcagggccccaaggatgaaggcactggtggcctggactcctgggtctgagggaggaggggctgggggcctggactcctggtccgagggaggaggcgctgggggcctggactcctggtccgagggaggaggggctgggggcctggactcctggtctgagggaggaggcgctgggggcctgggctcctggtcccagggaggaggggctgggtgcctggactcctggtctgagggaggaggggctgggggccggggctcctgggtctgaggagctgaggctctggactcctgggtctgaggtaggagggactgggggcctggactcctgggtctgagggaggaggggctgggggcctggacccctgggtctgaggagctggagctgggggtctgggctcctcggtctgagggaggagggtctggggcctggactcctgggtttacaacttggctgggctgtactctgtgtcctttctgacttggtcttctccctctaggtgggctgtccaccaaaatgagcattcagggctgcgtggcccaaccttccagcttcttgttgaaccacaccagacaaatcgggatcttctctgcgcgtgagaagcgtgatgtgcagcctcctgcctctcagcatgagggaggtggggctgagggcctggagtctctcacttggggggtggggctggcactggccccagcgctgtggtggggagtggtttgcccttcctgctaactctattacccccacgattcttcaccgctgctgaccacccacactcaacctccctctgacctcataacctaatggccttggacaccagattctttcccattctgtccatgaatcatcttccccacacacaatcattcatatctactcacctaacagcaacactggggagagcctggagcatccggacttgccctatgggagaggggacgctggaggagtggctgcatgtatctgataatacagaccctgtcctttc

SEQ ID NO: 38 - DNA, 6798 bp, Homo sapiens
ccccccgtaccaggtaacaaacttgtgggactccaaacaaaattctgaagctacagcctagccgagggaggaggaccaggaaagggaggcacgcccactccccagccccacccaacgccaaagccacccgcccattccatccctgtccctgtgggtccttgcaccggccaccttcaacacaggtgagatgagcccaggcttggggaaatagggggccctgagggaagagggaacctgcgggcaggaatgcatccggagtcctcccggggcggggagtggagggcttggaaggctggaggggaacggagagaggaaaggtcaaggcggatccgggaggaaaagggagtggggggagccagggcaattaagcagaaggtgcacaggctggggcaggggggctaggggacctggaggcttagggacagggcttcagagggagtgcagggagcagaatgggtcaagactgggagctggggaagtggagaagggggagccagaaataggggctgagggagagaatttgggagaggtggagccttgagaacctagaaactcaggtgctggggacttgcggaatggggcatgctacaggtggcctctgggtgaaggggatcgggcagagggtgactcgggagctgactgcagggactcaagggtcttggtggtgggggacggcagttaccagagcccacggccaggagtccagggaaggggacagcctgagatgaaggtcagggaggggcactgggggctggactagactgagtaaagctgggaggagaaggcaactcaggcaagggtcaggactgaaggggtggcgggccggaacatgggtggaatccctgtgctcagttatccccgcacctctccacccacacccgcagcccccacccgggccacccactctcccttggccacacctgccgggtgccacgatgaccgtcacctacacagcccgagtggcgaacgcccgcttcggtggcttctcccagctgctgctactgtggcgtgggagcatctacaaactcctgtggcgagagctgctctgcttccttgggttctacatggcgctgagtgctgcctaccggtgaggctgccctgaggtgctcatgttctagcggagggggggcagctattatatatatataatatataaaaattataaaaatatagagatatataagtatatatatctatgttttttaaactgagatggagtctcactctgtcacccaggctggagtgcagtggcataatcttctcttacttccacctctgcctcccgggttcaagcgattctcctgcctcagcctcccgagtagctgggattatgggtgccagccaccatgcctggctaatttttttgtatttttagtagagatggggtttcaccgtgttgaccaggctggtctcaaacttctgacctcaagtgatcctcctgcctcggcctcccaaagtgctgggattacaggtgtgacccatagcacccggctgggggcagctattataaaagaagccagggtgaggggcacagcaagagagatctgaagctggggatggagtcacccttgtgacctgtgacccctcatctctatcccgcagctttgtgctgaccgaagggcagaagcgctacttcgagaagcttgtgatttattgtgaccagtatgccagcctcatccctgtctccttcgtgcttggtgcggtccaaccccaagtcccccgttcccatgtccctgagaaacccatatccattcatgccttttgaggagcccccattcctgcccctctgagatcccccccctcaaatccaaccccgacagcactgcccacccatttttggatccatatcatgaagatgccagatgtggctctacactctgagacctggggtgtcacctggggtcacagtgccccctgaggtgcccccaggagagctccatctcacacacaggacttattcctggtcaccctggggattctcaccagtgtctgttgtgttattaggggggacaaacccctaaccctccagggaccccataggactccatcctctcaattccagcctgggggcatttctctgacaagtcttggacccctagtgaccacaagtgaccctagcctgcccaaggctccctgatgtagaccctgtccccaaccccttcagaagttcctggctcaggggccgggtgtggctactgtgacaagcctgaccagatgtctctgatgtacacccccacaaaccaggcccctctccccttgttttaggtccctatgccttcacagcaagcaacagtctgcccacgtgcccctaacatgggctctgtgcctctatccccatactgggatcccaatgtcacatctgaggtgactcccaagtagccagtgacccaaagggctgctctgcctttttttttttttttttttttttttttttttgagatggagtctcgctctgttgcccaagctggagtgcaatggtgcgatctcagctcactgcaacctccgcctcccgggttcaagtgattcttctgcctcagcctcctgaatagctgagactacaggtgcgccaccatgcccggctaatttttgtatttttagtagagacggagtttcaccatgctggtcaggctggtctcaaactcctgacctcatgatccaccctcctcagcctcccaaggagctgggattacaggcgtgagccaccgcgcccggcaactgtcctttctgacctcagggctggacccccaagttcccagcccaaacgtggtcaggttggccagcacgctcgggtttccctgatgcagaccttacgttgccccctctcccacaacctgggcccccaaacccctggccctggtgtccccactgagcccccattccccgctcccctgcaggcttttatgtgacgctggtggtgaaccgctggtggagccagtacctatgcatgccgctgcccgacgcgctcatgtgcgtggtggcgggcaccgtgcacggacgcgacgaccgcggccgcctctaccggcgcacactcatgcgctacgcagggctctcggccgtgctcatcctgcgctccgtcagcaccgcggtgttcaagcgcttccccaccatagaccacgtggtggaggctggtgagtactcggccagaggcagggcagagaccgggcaaggaccaggtggaggggggcaaggggcgagctatccctgacccctttcctccagggtttatgacccgcgaggagcgcaagaagtttgaaaacctgaactcatcctacaacaagtactgggtgccctgcgtctggttctccaacctggcggcacaggcccgacgcgagggccgcatccgcgacaacagcgcccttaagctgctgctcgaggtgggcccaaccaggaggtcattcatatagaataccagggaaattgtacccctggagctgtgtcaacggcggccctccaagcacccccacgaggccgatttcaaacaccctcaccaggtgcactcttacctccatggggctgattccaatgcccttgaggggcagctcctgggtgcatggtacctcatccaggtgcacactcaccaccaaataccctccctggaacccccaaagcacactcccaattcccaccaggtgaccacccacctccatcccacgtacctacacttaatatccctgtgtgagctcaccattcaggcctcctcatgacctgtatccacccccaggagctgaatgtttttcggggcaaatgtggaatgctctttcactatgactggattagcgtacccctcgtgtacacgcaggtaaccccatcatgcctctttttatattcggtgtcagtggccctgatgcctggtttccaaggggaaaccaagaactagctaagacccccatcataatgatgcctaatcctagccttggaccccaatgacccccctgagccctgccccgccctgcccaggtggtgaccatcgcactgtacagctacttcctggcttgcctcattggtcgccagttcctggacccggctcagggttacaaagaccacgacctagacctgtgtgtgcccatcttcaccctcttgcagttcttcttctacgccggctggctcaaggtaggtgggtgatccaggctggaatttcgtgggtggggcgggcatggggttcccaagtttccacctaactgctccctctcctctcaggtagctgagcagctcatcaaccccttcggagaggacgatgatgactttgagaccaactttctgatcgatagaaacttccaggtgagactcagtttccaggtgagacttccaggtggcgaccatcccggagtgcccaacagggttctggtcccacccctgccaagtcttgccaggtctcaccccaaccatccttccctctgtggtccccacccacccgaaggggtccaccctgtggtcccggcgggttgccctgcccccactttaccctgtgtgtttgcacccgtaggtgtccatgctggcagtggacgagatgtatgatgacctggctgtgctggagaaggacttgtactgggatgcagccgaggctcgcgccccatacacagcggctactgtcttccagctgcggcagccttccttccagggctccacctttgacatcacgtgagccagttgggtgggcagggccgcctggggcagggcttatggctctgcggggcacatctgattgaaaaggttaagtggaatcaattctggagatggggataagagctaaagtctcaggactgtgataacgccagaagctaagataggagtcaggggacaaggtcaaggtctgagactgggccactgactggggacagagctaagggctgaggtcagcgaggatcagaccggtcagtggtgattccaaaggagatgagggctgaggccaggagcactggctcacgcctgtaatcccagtactttgggaggctgaggcaggaggatcctttgagcaagcccaggagttcagaccagcctgggcaacatagtgagacccccgtctctactaaaaataaaaaattagccaagcgtggtggtgcacgcctgtagtcccagctattcaggggctgaggtgggaggattgcttgagtcgaggagttcgaggctgcagtgagccataatgacaccactgcactccagcctgggcaacagagcaagagcctgtctcaaaaaatgaaaataaaggccaggcgcagtggcttatgcctgtaatcccagcactttgggaggccaaggcaggtggatcacttgaggtcaggagttcgagaccagcctggccaacatagtgaaaccctgtctctactaaaaatacaaaattagccgggcttggtggctcacgcctgtaatcccagctaatcgggaggctgaggcaggagaatcacttgaacctgggaggcagaggttgcagtgagccgagattgcgccattgcactccagcctgggccacaagagtaaaactgcatttcaaaacataaaaataggccgggtgcggtggctcacgccaaggtgggcagatcacgaggtcaggggttagagactagcctggccaacatggtgaaaccccatctctactaaaaatacaaaaattagccggtgtggtggcacgcacctgtagtcgcaggtactcaggaggctgagacaggagaatcgcttgaacccgggaggcgaaggttgtggtgagccgagattgcgccactgtactccagcctgggcaacagagcgagactccgtctcaaaataaaataaaataaaataaaaataaaaaaggaaatggggctgagccacgactgaggttgaagatccaagttgaagtgcaaacacagggtgaggccaggctctgggtttaggagctaagatctttggggataagtgggacaaagcggtgggtggagtcagggaaatcagcgcgcctgggaccctgctctgtcaacaagaggcgaggccgcagcgctggcccactgtcggtcccgcaggctggccaaagaagacatgcagttccagcggctggacggcttggatggaccgatgggagaggcgcccggcgacttcctgcagcgcctcctgccggcgggcgcgggcatggtcgcgggaggcccgctgggccggcgcctgtcctttctactccgcaagaacagctgcgtgtcggaggcgtctactggggccagctgctcatgcgcggttgtccccgaaggcgcggccccggagtgcagctgcggggacccgctgctcgaccccggcctgccggagcccgaggccccgccccctgcgggtcccgaaccgcttaccctcatccctgggcctgtcgagcccttcagcatcgtgaccatgcccgggccccggggtccggcgccaccctggctgcccagccctattggcgaggaggaggagaatctggcctgagatcttagagcccagccccctaaggacagggaaccaggtccctgcacggcacccacgcaggtgtcccggtctgcataagcctcgtgtgcctttgtaaagtccacctacacttttgaccagctctcgctgcccgcatgtgtttggcgctgtgctaggggcgggagttcttccagactcttggaccagcccgccctgaccaccagctctacttcccaacccccactgcctgagaggtctctatcagtgtcctgcctgaattctttccttcaagtgaagatgtgactgactacctcctcgagttgtcatgaggatgaaagaatggcattaaagcatttggtatacagtaggtgctcaataaattgctagtgatttttactc

SEQ ID NO: 39 - DNA, 52746 bp, Homo sapiens
catttaggtgaataaaaagcagtgcagttgctggattaggtgataaaagtatgtttaattttgcaggaaattgctgaactgtcttctagaacaaccgtaccgtcttgcattcctgtcagcaatcagtgagaattcctgttgctccgcatcctcaccagcatttggtgttgtcagtgttctagattttagactaaatgcagtgttttcattttgtcctattctagatgctaacttttattgtgatttagtctcgtgagttgttttaaattgttacataagaatttcttagtgtatagagtttcctatgtttttgaattactttttaattttaattgcattatgattagagtatgtttattttgatggttatctgtggaaattttcattctgatctagttaagtggtgactttgtgagtttccgtgtgcttaaaaagactgcaaatctctcattgtggctgccctggaacttagtttatataataaataagtttcctcatgtctgaacctgcccaggcacctttcccaatgtatcagatgtttaacactaaggatctgttttgttctggaaagttatttttatctggcctcatgattacagtcctggccctgaacttcagagaatggaggggtaagcaaaaggacctcagactgtgccaggaaatgtcaagtcacctgctgtaggctactactaatggagcatggcctatttacttggacaccaaactatccagtgctaacatgaggtttttcaggactagatcccatggccatacagccctgcctgccagattggacgtgaaaagtatttccgcatctgacattcctgtttcacccacacagggcatcgttttgcccaggacaaagttcacctccaatcttatccacactatttctatctttgcttccttgataagatatagacatttatgcagtggttcaaagtctagagtccctacacttctggtacatgacagctgtgtctcgatggagtagactctcagaacagcgcagtttgccctccgctcacgcagagcctctccgtggcttccgcaccttgagcattaggccagttctcctcttctctctaatccatccgtcacctctcctgtcatccgtttccatgccgtgaggtccattcacagaacacatccatggctctcatgctcagtttggttctgagtctcctcaagctgggatcaggtaagactcatctttgtttcctccttactaactaacagtttgagttctttagctacaatggttgcagcataatggaatgaaggcatctttgtcgtttccattcctttggcttctcctagcctcagcctggggaaggatcaggcgctgtggaaacaattatagtagcccccaaataatggaaacacgggtgttgaagacgcaccgtgatcgttgacggggacacacctaacgtgttaaggtgaataaattcagtgtttctcccagatgggctgagtggtgtaggcagggttattggagcaccaaggttgctgacatggatgtccatctgggaagagacacagttaggatttttggggaaaagacaatgtatccagctaaagacatgctgagttagaaatgtctgtggtatgagacacgagggtggaggaaggtgtacaggtcttgaggtgagaaattagctgaaacctggcatattctgggaagaaatccactcttctttctccttccagttactgttaacacagaacctagtatataggatgttgagtgactgaatacaattcacagaggaagcttgaggttggggtagaatgctggtggctagatggtcagtacccagccacagaagattcgattgactgtgttcactttctgtctgtgaaggttcatcctgccacctgtccacctatatcttttttgctaaatgaagctaagaaaacagaaataagggcaatcaaaacatagagcatgtttccttaaaacaaaaacccatatgtgttactaacaggagacgctctcgtttcagtttgttttcatttattttctgacgagcttctttgtttcccttctgtttccgggtgaggcagcaggacatcctggaaatgatcttggagacagaaacattttatttttaaaaactcttatttcattttcttgtgagctttattgttcacagcttccttaggtgttggtttgcttatgatgacatggagatacgatcacattcctgctggggctgtggtgaggactgcatgagcttgtgcatgtagagtgcacacagctgcacgggtgcatggcatgttgcagcaacagtcttgttcctttcttattttcaagggaaggaagtggaaggagtgaaaggagatgttataggcaagagaggtgacagcagcaagggctggccggagaaatggaggtaccctgaaaaatgtttccttgcctcaagagccccacacagccctgaaggcagcatccatagcagcccagctggcatacgctgggtccccaaacctgacctaagacaagggccttcctgccagtgattcgttgagcaggtgattctgggaaacaaagtgagggagtggagagagtgaagccagtagggggaaagccatagagggtgcgctaatgagcgttgctgcggtggcaactgggacccagtcccactgggacctttggaggaactttatagatggtggctcagagtcattccaacatctactgtctcctttccccactgggtgagatgtgccgcccaggactgctaaaatcgcaaaccttctgagctgccttgtgccagggctaagtaggttccaagggtggcaggaagccctcagcagagaggcagaggccaggctccagggacggagctgtcagcaggcagggaaatgcccatcccactgcagggggactcagggttgggtggtgaggagcagggcctcaacatctgctacaccaggtcagaagctggtcagacaccaggctgcaaagtcatgcctcatttaataatactcttaaagatgcatgagtgaaatacatttcagcaagatttataaaatgtaattaaactaaaaaattagtgctaaaatgaaaaagtatccactgatctagaaattcacacatgtaattcaccttccctctgatgcacatgcagacagcacacacaggtatatccatataccataaatggatacatgtgaatgaatcaagagacactgccagtcaaagggggtgggtacttagaaggtgaagggagtgggcctccatagtctgtggtctctaagaagcagtgtaatccttacagggtagtaagagtgatttacaccaggaaaattactcaaatgattgttaaacagatgagcaagtaagaaaggaaatggggctcaccgttcacatgcataactgtggagcctgttctgtgtgactggctctgtgctgatcaagtgggtactatgctgagcaagaaaatcaggccctgtccccagagagccaagagctgtgcaggggaggctcacagaaaacatgtaattgtcacacttgaagcaagacaatgaagaaagtttcaaaagcgaggtgaggacatacatgtaccaagaattttttttaaaaaaaatgaaggcaagacatgttgacaaagcactaggcgaaccacctttcagtgctaaaataaagtggaaaaaattactacacaagcgtaaaaggcacatgctatggaaaatataagtcacacgtgaacgtgctaaagaacaaatttacagaaaacagactgcaaaatcttgtttcagtgtcacagcatgtctttcagaacttggcagaacaagcagattttcaaaaaaaactaaggaagtacaaataattgtgtgcgccatgggcagaaatgtaacattcctctatagtagccataaaatattgatataatattgtgcttgaaggaaaccttaacgaattgccgcaaactggagactttatggcccatactcttctctgggccattagaaagacgtcaactttggttttcagcaaggacgatggaaatggggatgtttgggttttttttttaattgaagcaaatgggcagatgggagagaatgtggcaatagaacctcctggaatcaaagggtctacattcagaaagagactttttcctctggataacatggttttctcatcttaaaaataaaaacattaataatacacatttctgcaggtgctcctcaagatcgaatgaagtaactgatgtggacatggtttgtcaaatgtaaggagatacacaaatgcaagtcactggctttagaaataggattgtgatgaatgtttccccctgatgcacatctccagcccagcccaatggagccctgagtaggtcacactataaagggtttttttttttgtttttgcttttatactttaagttttagggtacatgtgcacattgtgcaggttagttacatatgtatacatgtgccatgctggtgcgctgcacccactaactcgtcatctagcattaggtatatctcccgatgctatccctcccccctccccctaccccacaacgtccccagagtgtgatattccccttcctgtgtccatgtgatctcattgttcaattcccacctatgagtgagaatatgcggtgtttggttttttgttcttgcgatagtttactgagaatgatgatttctaatttcatccatgtccctacaaaggacatgaactcatcattttttatggctgcatagtattccatggtgtatatgtgtcacattttcttaatctagtctatcattgttggacatttgggttggttccaagtctttgctattgtgaatagtgccgcaataaacatacgtgtgcatgtgtctttatagcagcatgatttatagtcctttgggtatatacccagtaatgggatggctgggtcaaatggtatttccagttctagttccctgaggaatcgccacactgacttccacaatggttgaactagtttacagtcccaccaacagtgtaaaagtgttcctatttctccaatcctctccagcacctgttgtttcctgactttttgatgattgccattctaactggtgtgagatggtatctcattgtggttttgatttgcatttctctgatggccagtgatgatgaacattttttcatgtgttttttggctgcataaatgtcttcttttgagaagtgtctgttcatgtcctttgcccactttttgatggggttgtttgtttttttcttgtaaatttgtttgagttcattgtagattctggatattagccctttgtcagatgagtaggttgcgaaaattttctcccattttgtaggttgcctgttcactctgatggtagtttcttttgctgtgcagaagctctttagtttaattagatcccatttgtcaattttgtcttctgttgccattgcttttggtgttttagacatgaagtccttgcccatgcctatgtcctgaatggtaatgcctaggttttcttctagggtttttatggttttaggtctaacgtttaagtctttaatccatcttgaattgatttttgtataaggtgtaaggaagggatccagtttcagctttctacatatggctagccagttttcccagcaccatttattaaatagggaatcctttccccattgcttgtttttgtcaggtttgtcaaagatcagatagttgtagatatgcagcgttatttctgagggctctgttctgttccattgatctatatctctgttttggtaccagtaccatgctgttttggttactgtagccttgtagtatagtttgaagtcaggtagtgtgatgcctccagctttgttcttttggcttaggattgacttggtgatgcaggctcttttttggttccatatgaactttaaagtagttttttccaattctgtgaagaaagtcattggtagcttgatggggatggcattgaatctgtaaattaccttgggcggtatggccattttcacgatattgattcttcctacccatgagcatggaatgttcttccatttgtttgtatcctcttttatttccttgagcagtggtttgtagttctccttgaagaggtccttcacatcccttgtaagttgtattcctaggtattttattctctttgaagcaattgtgaatgggagttcactcatgatttggctctctgtttgtctgttgttggtgtataagaacgcttgtgatttttgtacattgattttgtatcctgagactttgctgaagttgcttatcagcttaaggagattttgggctgagacagtggggttttctagatatacaatcatgtcgtctgcaaacagggacaatttgacttcctcttttcctaattgaataccctttatttccttctcctgcctaattgccctggccagaacttccagcactatgttgaataggagtggtgagagagggcatccctgtcttgtgccagttttcaaagggaatgcttccagtttttgcccattcagtatgatattggctgtgggtttgtcatagatagctcttattattttgaaatacgtcccatcaatacctaatttattgagagtttttagcatgaagggttgttgaattttgtcaaaggctttttctgcatctattgagataatcatgtggtttttgtctttggctccgtttatatgctggattacatttattgatttgcgtatattgaaccagccttgcatcccagggatgaagcccacttgaccatggtggataagctttttgatgtgctgctggattcagtttgccagtattttattgaggatttttgcatcaatgttcatcaaggatattggtctaaaattctctttttttgttgtgtctctgcctggctttggtatcagaatgatgctagcctcataaaatgagttagggaggattccctctttttctattgaatggaatggtttcagaaggaatggtaccagttcctccttgtacctctggtagaattcggctgtgaatccatctggtcctggactctttttggttggtaagctattgattattgccacaatttcagctcctgttattggtcgattcagagattcaacttcttcctggtttagtcttgggagagtgtatgtgtcgaggaatttatccatttcttctagattttctagtttatttgcatagaggtgtttgtagtattccctgatggtagtttgtatttctgtgggatcggtggtgatatcccctttatcattttttattgcatctatttgattcttctctctttttttctttattagtcttgctagcggtctatcaattttgttgatcctttcaaaaaaccagctcctggattcattaattttttgaagggttttttgtgtctctatttccttcagttctgctctgattttagttatttcttgccttctgctagcttttgaatgtgtttgctcttgcttttctagttcttttaattgtgatgttagggtgtcaattttggatctttcctgctttctcttgtgggcatttagtgctataaatttccctctacacactgctttgaatgtgtcccagagattctggtatgttgtgtctttgttctcgttggtttcaaagaacatctttatttctgccttcatttcgttatgtacccagtagtcattcaggagcaggttgttcagtttccatgtagttgagcggctttgagattcttaatcctgagttctagtttgattgcactgtggtctgagagatagtttgttataatttctgttcttttacatttgctgaggagagctttacttccagtatgtggtcaattttgtaacaggtgtggtgtggtgctgaaaaaaatgtatattctgttgatttgcggtggagagttctgtagatgtctattaggtccgcttggtgcagagctgagttcaattcctgggtatcctttttgactttctgtctcgttgatctatctaatgttgacagtggggtgttaaagtctcccattattaatgtgtgggagtctaagtctctttgtaggtcactcaggacttgctttacgaatcttggtgctcctgtattgggtgcatatatatttaggagagttagctcttcttgttgaattgatccctttaccattatgtaatggccttctttgtctcttttgatctttgttggtttaaagtctgttttatcagagactaggattgcaacccctgcctttttttgttttccattggcttggtagatcttcctccatccttttattttgagcctatgtgtgcctctgcacgtgagatgggtttcctgaatacagcacactgatgggtcttgactctttatccaatttgccagtctgtgtcttttaattggagcatttagtccatttacatttaacgttaatattgttatgtgtgaatttgatcctgtcattatgatgttagctggttattttgctcgttagttgatgcagtttcttcctactctcgatggtctttacattttggcatgattttgcagtggctggtaccggttgttcctttccatgtttagtgcttccttcaggagctcttgtaaggcaggcctggtggtgacaaaatctctcagcatttgcttgtctgtaaagtattttatttctccttcacttatgaagcttagtttggctggatatgaagttctgggttgaaaattcttttctttaagaatgttgaatattggcccccactctcttctggcttgtagggtttctgccgagagatccgctgttagtctgatgggcttccctttgagggtaacccgacctttctctctggctgcccttaacattttttccttcatttcaactttggtgaatctgacaattatgtgtcttggagttgctcttctcgaggagtatctttgtggcgttctctgtatttcctgaatctgaacgttgtcctgccttgctagattggggaagttctcctggataatatactgcagagtgttttccaacttggttccattctccccatcactttcaggtacaccaatcagacgtagatttggtcttttcacatagtcccatatttcttggaggctttgctcatttctttttattcttttttttctagacttcccttcttgcttcatttcattcatttcatcttccatcgctgataccctttcttccagttgatcgcatcggctcctgaggcttctgcattcttcacgtagttcttgagccttggttttcagctccatcagctcctttaagcacttctctgtattggttattctagttatacattcttctaattttttttcaaagttttcaacttctttgcctttggtttgaatgtcctcccgtagctcagagtaatttgatcatctgaagccttcttctctcagctcgtcaaagtcattctccatccagctttgttccgttgctggtgaggaactgcgttcctttggaggaggagaggcgctctgctttttagagtttccagtttttctgttctgttttttccccatctttgtggttttgtctacttttggtctttgatgatggtgatgtacagatgggtttttggtgtggatgtcctttctgtttgttttccttctaacagagaggaccctcagctgcaggtctgttggagtaccctgccgtgtgaggtgtcagtgtgcccctgctggggggtgcctcccagttaggctgctcgggggtcaggggtcagggactcacttgaggaggcagtctgccagttctcagatctccagctgcgtgctgggagaaccactgctctcttcaaagctgtcagacagggacatttaagtctgcagaggttactgctgtctttttgtgtgtctgtgccctgcccccagaggtggagcctacagaggcaggcaggcctccttgagctgtggtgggctccacccagttggagctgctttgtttacctaatcaagcctgggcaatggcgggcgcccctcccccagcctcgctgctgccttgcagtttgatctcagactgctgtgctagcaatcagcgagactctgtggtcataggaccctctgagccaggtgtgggatataatctcgtggtgcgccgtttcttaagcccatcggaaaagcgcaatattcgggtgggagtgacccgattttccaggtgcgtccgtcacccctttctttgactcggaaagggaactccctgaccccttgcgcttcccgagtgaggcaatgcctcgccctgcttcggctcgtgcacggtgcgcgcacccactgacctgcgcccactgtctggcactccctagtgagatgaacccggtacctcagatggaaatgcagaaatcacccatgttctgcgtcgctcactctgggagctgtagaccggagctgttcctattcggccatcttggctcctccccctcactacaaagggttttgatgatttatcttttgtatgtcttcccacagggcagtggcaggtgtttgggccagacaagcctgtccaggccttggtgggggaggacgcagcattctcctgtttcctgtctcctaagaccaatgcagaggccatggaagtgcggttcttcaggggccagttctctagcgtggtccacctctacagggacgggaaggaccagccatttatgcagatgccacagtatcaaggcaggacaaaactggtgaaggattctattgcggaggggcgcatctctctgaggctggaaaacattactgtgttggatgctggcctctatgggtgcaggattagttcccagtcttactaccagaaggccatctgggagctacaggtgtcaggtcagtttcatatttcataacttagttgtcccaaagaaccatcctggactttataagtgtttttttcaataaggaaattttaaaattttaggtcatttagttagaaggcagcattctatactctacgttccttctgtcttgtgtgtatagttctatgtgttttgtcacatgtttaaattcaggtaaccaccatcacatcaaggtatagaactaccccatcatcacgaagatctccctctgtcaccccttcatggtcacacccaccccttctcagcccctgcctggggttttccatctccctgatgctgtaatttcaagaatgttacatacacagcttcacaccgcaggtgaccttttgagattgactttttaaattcagcataatgctcttgcgatctatccaaattattgcttgtatcgatactttatttcttttttttccccactgtcaaaatagttttccttatgaacatttatttttaaattaacaaataaagattcctgctcacttgtcctacaaattttttgtttatctgatacagcagggagcaaacgtcagctccaggaagctgtgacttcccctgacaatcagttgctcaatgctctgtgttaacttgaccatacttccatagtcacacccttcacagtgaaatgtatttgacggggctgggtgcagtggctcaagcccgtaatcccaacaccttgagaggctgagacaggaggattgcttgagtccaggagctcgagaccagcctgggcatatggtaagacctcatctctattaaaaaaaaaaaaaaaagaagatgaaagaaggaaaaaacagaaatttattgtttacagttgttgccgtgtgcagtcagtgagttgtgaataatctgtgtcctgattaaaaacctgtgagtggggctgctctgacggtagtggattatccgaacttagtagtgtcactacaattggcatacgactccccactgctaaatttgactaacttaaatttttttaaaaaccactatgagtgatatttcaggcctgatgataggcaattttcaaaagcgtttcctggaaggcctcctcctcatagcagacttggagtacaaccaatgctttgcagtctctgaggagagtttcaggtgagccctcaggcccggctaagctgtcctggtctttacatatttgcatttctagcccaggcattttaattctcagaatctcaggccttgggcaggactttcaagtgccttataacaaggaggagaatgtggagtcctaattagggaaaaggagtcaggctggcaggaccaggtgaaagcaaaaagaaaaaaaaaaagaggaaataaactataaacatgcctttcttcatgtctagaaaatttaaacaaaagagacagcagataagctacaggtctgcctttcttcgtcatcctggacatacagtccaggatatatggcccagaacatttggccttcctgcccagataacatacataactcacagacttcctgcttatcatcaaacacctcaatttatcaaatatcccagctgacaaaagaatataagttaggctccctgctaccttggcattatcgatcagcccaagctccattctataaaatccctgagacttttttttcttgcagttagcttccctcatgctaacttgcctattgccttccttgcaaagtactttcctactttctctaataaatctgcctttctctacctacaaccatcttggtaaattcttttacccccacaccactggctgccattcccccatgacagaaaaggcaaactccaagacacttttctctactctgtcttagtatccagtatcttaccctctaattcctcctccctacacctcctcctgagctcaggattcataaagctgtgaagccttttgttcagcactccatcactagtgagtcagccccacacgtgtgatgatccatctgcccctcaactggaattccatttcatgggggaggatgagacagggaggggttggcatcttccttggtttagctcttacttttgtagcaactgattagaggcttcactattactttaattcgggtcatcgttcctttggtctgttactcctacgcctggcggctcagcactctctctactttagctgagctcctgacaagtttctcatagaagcagttttgtcttacttcatcatgactggtgcttaggaatagccacgcatacacagtagttgctaaaaaatggcaacgaacagaggccatgggaaggcttttgccaaaggtcgtggttttagtgtttgtgtgtgtaagagagagaatgggtggggggtggactgaatgcacctgactcagaattgctgtggctttgggatgtgatctttgctttcaaccgttccctgttttctccccagcactgggctcagttcctctcatttccatcacgggatatgttgatagagacatccagctactctgtcagtcctcgggctggttcccccggcccacagcgaagtggaaaggtccacaaggacaggatttgtccacagactccaggacaaacagagacatgcatggcctgtttgatgtggagatctctctgaccgtccaagagaacgccgggagcatatcctgttccatgcggcatgctcatctgagccgagaggtggaatccagggtacagataggaggtgagtagggaggggaggagaagagaaggaggggtggatgcttcggtaactcagagggaggacaggagcctccatcttggcattgctgttttatctttctcagttctaatgatttattttaaaagtttaaaatcaatgagatgtaaaagtaaagttataaacatttggttaggtggaaatagaattgtttacaattccaggggagtagaattaagtatttccttcagctgtgacgtaaccctgtgatggttaattttttgggtccacttgactgggtcacgatttgctcagatttggtcaagtattattcaggatgcttctgtgagggtgtttacacataagattcacatttgaattggtaaactgagtaaagaagattgccctccataatgcgggtgggcttatccaatcagctgaagacctgaatagaacaaagggtcgaccctcccctgagtgagagaatgatcttgcatagtagccttttaactgggacactggctcttcctggcctcagagcaggctgctggccttcagactcaaactgaaccactggctctttctatgtcttgagcctgcggacttttggacaggagtgacaccattggctcttctggttctcaggtcttctggtttcaacgtaaatgaaccattggctctcctggggctccagattgctgactcacccatgagttgggacctaaaagagcttccatgatgtatgcaagccaattctttatactaaatctgtctctcctcttcctttctctctttatctccatctttctctctcaaatatatagaaacaacaggatgtatatatatatatatatgtatgtgtgtatacatcctagtggttctgttactctggagaactctcactaatacagatttggtaccaagagtatttctagagaaaaagaattttagggataacttttcagtcatccctaaaattctaaaattctctgagctgggattactgtgtacacctgtagtcccagctactcaggaggctgaggtgggaggatcacttgagcctaggagtttgaggccagcctacacaacatagcaagaccccgtcttcaaacaaacaaaacaaaaagcactgaaagttcatgttgtgatctagcaatacagatatgcaaaatttcaccatttgcgacccataattaagcatgggttgactggtatatgatattttcaaacatgtgtgtcgacctagtgaataagatgagattggctggttgctcctattcttgctagaaaaagtgaggaaagtgatgaaaggaaatatgagcggaggaatttgaattctgagtttcttggtgttgcataaataacctgaaagcttccatgagtgccctgaaagagacccttattttctgtagccacagggctaagattgctgaaaaccaaattgagaactcattctgtgactggctgaacgacaatggaaatccaaacctgttcctcagggtatctgtcaatgtgagggggcattgactgggaagaaatgagattcagaaagttgaaatggggatgtatgggaagactgatgaagctggggacattgagcctcaaatgctgatgagtctttgccagtgaaagcagtctcagtctctctatgtcaattagaagtagcctctccaccttcatctcaggggattaaccctgcattgcccaaagaaactgtaatggcctctttcctgaggcagtcaccatgcaagacaatgctgatgctacgcaggacccacccctaccattcctctttgcttctagatctgtacctaggctcaagtttcagcaggaccctaaagttggaaacaatgcatgactcattagaaagtgtactacactccaaaagagctagttggtttttctaatctatacagaccagaaatccagagaatccatgtcaaatgatattaagggtgtaaggtggtggtacaaggacgtaaggttggctcaaaccacatgtaatggcctcactaatcagagatcctgcatttaatgttgcagctcagagtgttagaaaggcctctatcgtttggttggctgaagcatggatcaaaatgtggcccacagagagtgacaggtgggcatgctgttaggagcctttgccaggcccctgtaagtgaatcatggcacaggccctcaggattgagaagcagagccctgccattctctacgaataactactcttcttttgaaaaatacatcttgggctagaccttaggaaagactgaacacttaatcatgggccgccaagttgcaatgtgacttgaatcagtaagaatatagaatacttgaactaaaaattaacaaacccaatttaatagatattcttagaaggctgcacccaccacaaagcattggaagcacacacagaccataaattaactctcatcaggctcaagcacataaaatgctttacaaaaactttgaagaaaatggtattgcgatatggttttagtgttgtgtcttctccaaaattcatgttgaaacgaaatccccaatgcagcactattaagaggtgggctttttaggaggtgattaagtcctgaggactatgcccatatgaatgggttagtgccttataaaaggatttaagggggtgaacttaccctttccaccccttctgccatgtgagggacacagtgttcatcgccttcaggggacacagcaacaaggtgccatcttgaaacagaggacagtcctcatcagatgccaaatctattgatacttgaccttggacttcccagcctccagaactatgagaaatacatttctattgtttacaaatgagccagtctgtagtattttgttatagcagcacaaatggacaaagactggtatgattcaaacgatgatttctaatcacaatataattaaattcaatgagaaaaagaaaaacaatttaatattcatatatgtttgaaactttcaaaacatacttcaaaaataactaagtggtcattgaaaaagtcataatgataattaaaagtgtcttaggactgaatgataatgaaactatacatacaaactatcacacaactataccttttaagaagtgacatgattaggatggtgaaatggagttttcagttctcaaactcccacagaaacactaattttaacaactaccatgaacaaaagtatttttgtaggagtctaggaagccacttgagaggttccaactggttggtcaggcaaaaaagccaagaacagatgcatggaggaaggtaagaactgtttccttctacccgcctcactgctcttccgaggtaactcagtgccaagagagactccctcagcccacaatttttgccatggggaaagtgagagcaaagtgaatgtccagattccccaggcttgtgggatgctgcccaggaaacccatttctgtctcacttaatgcagaacactgaggggaccatgtggctgaatcatctgggggcagctaggagtagggaaagaggagggggcttatggcagccagtgcatggacctgaacaacaagcagcagaacctactggccagcccctgcactctactagaggcccacctcacaacctgctgactacccaaccagctgatatgtgcccccagccctccacacaccacccctgtggctagaacctcttggtccatcacagtggggcacgtgcttccctgcagacagggtgcctgagcctcagcagatgtgcatacaaacttctgcagtcagaacacagatagcaatcagcttgactctgctggattgagagaaggtgcacaatcttgagtattttagggaattgccctagggataaataaatgcaaggctctcagcagccagcctgctttgcaggactgagaaaagaaaatcccaagacttcctctcaccaagaaggaacgagaaaagtaaagcaggtacatccataaaaaagatctgagagacttccagagtatctagccaggctgactggtcaaggtctttgtctaccaaagtctgccagtacagactagaggaggaggagtgacagaaagacaaaatatactgtcaaacagattcacagcacattaaaagattcatttaccatgattaagtgagctttatccttggaacataaggatggttcaacatatgcaaatcaataaatattacactaacagaatgaaagacaaaaacaatatgatcatctcaatagatgcagaaaaagcatttgacaacattcaacaccctttcatgacaaaaccaactttcaataaattaggtatagaagcaatgtagctcaacacaataaaggccatacgtaacatgcccacagagcatatacccagtggttgtcttagtccactttatgctgctgtaccagaatacctgagattgggtaattgataatgaacagaggtttatttggctcatggtcgtggaggctgggaagtctaagatcaaggggtcacatcctgtgagggccttctagttgtgtaattccatggaggaaggtagaatggcaagagagtaagaaagaggaaggaagctgcttctgcaaaaatggcattaatccactcacgagggcaggatcctcatggccttgtcacctcttaagggtcccacctgtcaacattattgcattggggattaagttttcaacacataaactctggggatacattgaaaccacagtgatgatgaaaaatttttaaacaatagcgaaatctatggaatgtagcaaaaccagttctaaaagtttatagctataaatatctacattaagaaaaaagaaagatctcaaatgaacaacctaagtttatacctcaagaaattagaaaaagaaaaaactaagccaaaatttagcagaaggaaggaaaaaataataattagagcagaaataaatgaaatagaaaaacaataaaaagatcaataaaactaaatgttgtttatttgaaaagataagtaaaattgacaagcctttacctagattaaccaagaaaaaaagagctgactcaaataaatagaattataaataaaagatgatacattacaactggtaccacagaaataaatataaaatgtcatgagactatcgtagttctcccttatccacaggggttacattccaagatccccagtgaatgccacaaaccacgtacagtaccaaaccctatatatgctatttttcatgtctcaaatggaacagagcaggatgatagagatttcatcatgctactcagaatggtgtgcaatttaaaacttacaaattgtttatttatgaaatttttcattcaatatttttgggccacaattgatcacgagtaactgaaatcatgaaaagtgaaaccaaagacaaggttagactacggcactatgaaaaatcataggccaacaaaccagataacctagcagaaaccaaagacaaggttagactacggcactatgaaaaatcataggtcaacaaactggataacctagcggaaaccaaagacaaggttagactatggcactatgaaaagtcataggccaacaaactggataacctagcagaaaccaaagacaaggttagactacggcactatgaaaaatcataggccaacaaactggataacctagcagaaaccaaagacaaggttagactacggcactatgaaaaatcataggccaacaaactggataacctagcagaaaccaaagacaaggttagactatggcactatgaaaaatcataggccaacaaactggataacctagcagaaaccaaagacaaggttagactacggcactatgaaaaatcataggccaacaaactggataacctagcagaaaccaaagacaaggttagactacggcactatgaaaaatcataggccaacaaactggataacctagcagaaaccaaagacaaggttagactacggcactatgaaaaattacaggccaacaaattggataacctagcagaaatggatacattcctagaaacatacaacctataaaaactgaatcagaataatttaaaaaaaataccagaccagtaattagttagaaatacaattgataatcaaaatcctcccaacaaagaaaattccatgaccagatggctctgctggtgaattctgcaaaatatttaaagaaaaattaacacaaaaaattagctgggcgtggtggcgggtgcctgtaatcccagcactctgggaggccgaggtgggtggatcacgaggtcaggagatcgagaccatcctggctaacacggtgaaaccctgtctctactaaaaatacaaaagaattagccgggcatggtggcgggtgtgtgtagtcccagctacttgggaggctgaggcaggagaatggcgtgaacccgggaggtggagcttgcagtgagctgagatggcgccactgcactccagcctgggtgacagagtgagattctgtctcaaaaaaaaaaaaaaagaaataaacaaagaaagaaaaattaatgccaatacttttcaaactcttgcaaaaaattaaagatggggaataattccaaactcattttatgaggccacagttaccctgatacaaaaaccatataagaacaccataaaaaagaagaaaattacatgccaatatccctgataaacatagatgcaaacatttccaacaaatattagccaaccaaattcatgataaaaagaataattacaaagtacattaaaagaaacattaaacgtatccccatgatcaagtgggatttatctctgggatgcaagaatgtttcaacacacgcaaataaataaatataatatatgacattaacagaatgaagaacaaataatgtataattatgttaacaaacgcagagaaagcatttgacaatattcagcatcttttcataataaaagtcaacagactaggtaacaaaagaatgtacctcaacataataaagatcacatatgtgtcaacaaaaagagtcaaactctataaaacatttaaagaggtttattctgggccaaatgtgagtgaccaaagcccaaggcatagtctcaacaagtcctgagaacatgtgcccaaggtggttgagttacagcttgattttatgttttaaggggacagaaattacagacagacatcaatcaatatatgtaaggtgtacactggtttggtctagaaaggcaggacaacttgaaatgggggcttccaagtaataggtagattagaagattttctggttggcaaatggttgtgagttatctaaaagacctggaatccatagaaaagagtgtctagattaggatagggggttgtggagaccaaggttcttacatgtagatgaagtctcataagtggcgacccttagaggcaataggtggcaaatgtttcatattcagatctttaaaaattgctagactctcagctaatcagtctcttcgggatcagacaaagacctggaaagggaaatttacattctgtagagaatttacatttcccccaccagaggcagctttgccaggctatttcaaaatatgtcaaagaaatatgctttggggtaaaatattttaaattctttcagggcctgctatctgtcatgtgatgctatatgatagtccagttgggatttggtatcttattgctacaaagagtctgttttgtcagtcttaagacctctgttgtaatgttaatgctgctcagttgttcctgaactccaaagggaagaggacataatgaggcatgtccaacctcaccttcccatcatggcctggactagtccttcaggtttacttgggaattccctttcttgagaagagggggtccattcagttgactgggaagcttagaattttatttttggtttacatattataagctcatagctaacattatcctcaacactgaagtagtgaaagctttcctttaagattaggaacaagataaaggtgtccactcttgccacatagtattggatgttatagccagagcaattgggcaaaaaagaaaattaataaaaagcaaccaaatcagaaaggaagaaacataaatgtctctgtttggagatgacatgacacgtagtgagccctagagaatccactaaaacctgttagaacttaataaatgaatttagcaaagttgtaggatacaaaatcaacatataaaattagtagtgtttctatacactaacaataaattgtctgaaaagaaatcaaggaaacaacttcatttaaaatagcatcaaaaaattagaagtaaatttagccaatgaggtcaaagatctgtacactgaaaactataagacactggtgaaagaaatggactataacacaaataaatagaaatgtatcatgtgttcatagaattaatattgcttaatgttcatactacccaaatcaatttatagatttaatgcaatcactattaaaattcaaaggcatttctcacagaattagaaaacaatctaaattcacatgggatcacaaaagaccctgaatagccaaataagacttgagcaaaaagaacaaagtacaagcatcatactacctgatttcaaattatgttatattaggttggtgcaaaagtaattgtggtttttgccattgaaagtaatagcaaagactgcaaagacttttgcaccaacctaatagtaattaaaaccatatggtactggcataaaaacagacatatagattaatggaacagaattaagagccaagaaataaacccatgctatatggtcaactaatcttcagtaagattaccaagaatacaaaatggataaatgatagtttctttaacaaatggtgtttggaaaactggatatttacatgcaacagagtgatattggactcatattttccatcacacacaaaaatcaattcaaaatgaattaaagatataaacaaaaggccttaaactataaactcttagaagaaagcatacagaaaaatctccttgacattgatcttggcagtgatttttcaccctgacaccaaaagcacaggcaatgaaagcaaaaatgaacaagtaagattacatcaaactaaaaagcttttgcacagcaaaggagataatcaacaaaataaaaagcaacatgtggaatgggagaatattttcaaagtatatacctgataaagagttaatgtccaaaatatgtaagacactcatacaactcaataaccaaaaatattccaatttttacaatgggcaaagtacatgaataaacattttccccaaaagacatataaatattaatagccaagagatttatgaaaagtgactcactatcactaaccatcagggaaattcaatcaaaagtataaggagagatcacctcatacttgttagactggttattactaacttaagaaatattacaggtgttactacattgttgctgggaatataaattgatacagccactatggaaaacagtatgcagattccttaaaaaaatacaaatagaactatgctacatagtcttatatgtagataaaccctaaagattccacaaaaaactgttagagctaatacatttagtaaagttgcagtgtacaaaattatataaaataagtaacctcattgataatttataatccagcaatcctgcttccgtgcatttatccaaaagaattgaagtcaggatttcaaaaagatacttgcacttccatgtttattgtggcatagttcacagtagccaagatatgaaaacaatctatttgctgacagatgaatggatttaaaaagtgacatatgtaatgaaatattactcaacaataaaaaagaggtaatcccgacacatggatgaacatggaggacattatgttaagtaaaataagccagacataaaaatgatctcacttatatgtgtaatctaaaatcatcagtcatagaatcatagagcataactgtgattgccagggaatgaggggagggaaaaatgggaaggtgatattcaaaaggtataaaaaagtttcatttgtgcaagatgaagaagttctggagatctactatacagcacagtgcctgtagctaacaataaactattgtattcttaaattctgtgaagagggtagatcttatattctgctcatactacacacacacacacacacacacacacacacacacagacacacacacaataattgtaataattataataaaaggggtaggaggaaactacgggagatgatggatatgtctatagtcttgatggtggtgatgatttgaatgggtatatacttatcaccaaactctttgagttgtataaattaaatatgtacagctttttacatgtgaatcatacctatcatacttgataaatggttttatgaaacaaaaaacaaaacagaaaaataaattaacacctttaaataaatgtatccatttcttctagaatttctagtttgtgtgaatagaggtgttcataatagtctctgatagttatttgtatttttttggctcagtgtaatatcccctttgtcatttctgattgtgtttatttggatatttttttctcttttctttattagcctagctagtggtctatatattttattaatttttttcaaaatccaactctggattcattgatcttttgaatggtatttcatatctcaatctccttcagttcagctctgattttgttatgtcttatcttctgctaactttgggattgattttctcttggttctctagttcttttagttgtgataataggttcttaaattgagatctttctaactttttgatgtagttgtttagtgctataaagttccctcttaacagtgccttggttgtgtcccagaggtgctggtatgttgtgtcttttttctcattagtttcaaagaaattcttaatttctgccttaatttcattatttacccaaaagtcattcaggagtaggttattcaatttccatgtaattgtattgttttgagtgattttgttagccttgatctgtaatcgtattgagctgtggtctgagagagcggttgttatgatttcagttcttttgcatttgctaagaagtgttttgtgtctgattatgtggtcagttttaaagtatgtgctatgtagtgataagaagaatgtatatcctgttatttttgggtggagagttatgtagatgtctatgagatccatttgatccagtgtgagttcaggtcctgaatatcttgttaattttctgcctcaataatctatctaatacagtcagtggggtgttgaagtctcccactattattgtgtggaagtctaaatctctttgaaggtctccaagaacttgctttatgaatctgggtgcttttgtgttgggtgcatatatattcaggatagttatgtttgttgaactgaaccctttaccatcatatattgcctttctttgtctttttgattattgttggtttaaagtctgttttgtctcaaattataattgcaactcctgctttttcctgctttccatttgcttagtagattttcctacatccctttattttgagcctatggatgttgttgcgtgtgagattagtctcttgaagacagcataccatttggtcttgtttctttatccagcttgccactctgtgccttttaattggaggatttagccaataaggcagtttaaaaaatattaataagaaattttcagaaacataaatgtaaaattccaattagaaattttataaactccaagcaaatgttttttaaaaaacctaatatattatgactgaattgagcttacccaggaataaaaggttaggtcaacattgggatatgtatatttatgtaagtattaccttaataagttaaaggagaaaatctataagattctctatagatgttaataaaacatatataagtttcaacatctaactatgatttaaaacacttgtgaatccagaaataaaagaaaaccttttatgaattagcaacagaagagcagttctttcatctgatagaaagctatttaaaaatacccatagctaccatgatacatcatggtaggaggtttaaacccaggaacttaatgaagataactgcattaaacattgctgttcaacaatatgctggaatagtaatcattgcaaaaaaagaaagaaagtgaaaaaagaattacaatttccaggaaggaaaaaatagaatgcctatttccaacaggttatatgataatacacattggaaatctggattaatctacagacaaattctttcaatttatacttcattatgttcataaaaataagatcagtaaacaaaatacattgcattttatacaccagcaaagacagaaaaacaaacaaatatgccatgtataataacacaaaatgtcacatagaaatatatttaataaaatatttttatactcttattaaggattagataagtttactaaaataactaaaataagaggagagacacatctggccctactgagccccactggtcaagtagcaacacaattcctgatgctgtctttaagccttactcagcgtgggaggcaagtgcacactggcagttgaccatacagggagcatctggccctggccaacctcagcagctgagcagcgactcagccagccttgggttctctttgcatattccctagataggaagacaatagcagctctgtgattatctacagagggagcatctgatcttgcccagacccagtagctatgcagcaactcaacccaccattggtgttctgcttaaggctactctagactaggagccaagcccaagtccacacacatctgtggagcatagcctctggccctgcccaccctgagtgatcaagcagcaaccccagaaatctcacccagcctcagagctcagcacacgtccctgaccaactacagattccaaacaacagtaccatctagcaagaaagacaacctctaaccctggacaatcaggcaactgcagagcccaatcagcagcaccacctgtcacaggagcacagccagcagttccatttaatgtcagagcacaggtagtggcccagcccaactagagaacccaacacccacatctgcctgtctgaggttgctaccagttggcctattcagaatcccaggctatattaaatagtgaagacctcttactgagaaagaacacttgcaaaggccagaaaaggtggccatttcttcaaatgtgcaggcaccaacacaaagacagaaggattattttaaaaatcaagaaaatatgacaccaaaagaaactaataatgctccggtaatagaccctgaaatatgcaagtctatgagaccactaagaatttaagataatccccttaaagaagttcaggaaactacaagaaaatgcagatagaaaataaataacatttgaaaaatggttaatgaacaaaaagaaaagcttgacaaaggaataaaaacaataaaatagttaaaatcctagaaatgatgaatacaataactgaaccaaaatattaactagaaagcttcaacagcagacttgatcaaggcaaagaatcactgggcttgaagactggatattttaaattatccagtcagagaataaaaaagaaaaaagaataaaaaatgaaaaagacctataggaattattggacaccattaagtgtactgacttttgcataataggagtttcagaaggagatgagagagaacaagatcccgaaggcatatttaagaaaataatggctgaaaatttcccaaatgtggtgaaacacaaaaatatccaggttcaggaagcttggatgtcatcaatcaaattcaacccaaagaggattttaccaagatatatcatattccaattatcaaaaaatcagagacaaagaaagaatactgaaagcagcaagagaatgaaccatatcgcattcaagagagccccaatatggttttcagcctttctcttagcagcaatcctgcatgccaggaaagaatggcattatgtattcaaagtgttgaaggaaaagattgccaatcaagattacattactagcaaatctgtccttcagaaatgagggagaaataaaatctttcccagacaaacaaaagctatggtaattaatcattattagatctattttataaatattactaaagggagccctttaactaaaacaaaaggattataataacaaaaacatatggaagtaaaaaactcactggtaaaaataatatatagtcatattcagaattctctaatacagtaagggtggtatttaaagctaatttatccctactgtcacagttaaaagacaaaattattaaaagcacctataactaaaataaattgtaaagaaatacaaattacaaaacatgtaaattttgacatcaaaatcataagaagtggaaaggagtgaaagtgtagagtttttgtatgtgattaaagttatcagaataaaatagcctgttaaaaggatattttgtgtatgcctcatggtaaccacaacacaaaaaaaccacagcaggcggtggctggcaagatggccaaataggaacagctgcggtctgcagcccccagcaagatcaatgcagaagggaggtgatttctgcatttccaactgaggtacctggctcatctcattgggactggttagacagtgggtgcagcccacggaaagggagctgaagtagggtggggcatcacctcacctgggaagtgcaaggggttggggaactccctctcatagccaagggaagatgtgagggactgtgccatgaggaatggtgcactacaacccagatattatgcttttcccatggtctttgcaactcatagaccagaagattcccttgggtgcctacaccacccgggccctgggttttaagcacaaaactgggtggccgtttgggcagacaccaagctagctgcaggagattttcataccccagtggcacctggaatggcagcgagacagaaccattcactcccctggaaagggggctgaagccagaaagccaagtggtctagctcagtggatcccacccccatggagcccagcaagctatgatccaagggcttgaaattctcactggcagcagagcagtctggggtcaacccaggacactcgagcttggtgggcagagggacatcaccattactgaggcttgagtaggcagtttttccctcacagtgtaaacaaagccaccaggaagttcaaactctatggagcctactgcagcttggcaaagcctctgtagccagactgcctctctagattcctcctttctgggcagggcatctctgaaagaaaggcagcagccccagtcaagggcttagagataaaactcccatctccctgggacagagcacctgggggaaggagaagctgtaggcacaacttcagcagacttaaacgttcctgcctgcctgctctgaagagaacagcagctctcccagcacagtgcttgagctctgctaagggacagactgcctcttcaagtgggtccctgacccctgtgccttttgactgaaagacacctcccagcaggggtcgacagacgcctcatacaggagagctccggctggcatatggtggatgcccccctgggacgaaccttacagaggaaggagcaggcagcaatctctgctgttctgcaccctccgctgatgatacccaagcaaacagggcctggagtggacctccagtaaacttcagcagacctgcagcagagggtcctgactggtagaaggcaaactagcaaacagaaaggaatagcatcaacatcaacacaacaaaaaggatgtccacacagaaaccccattcgaaggtcaccaacatcaaaaaccaaaggtagataaatccatgaagatgaggaaaaaccagtgcaaaaaggctgaaaattcctaaaaccagaatgcctcttctgttccaaaggattacaactcctcaccagcaagggaacaaaaccggatggagaatgagtttgatgaattgacagaagtaggcttcagaaggtgggtaatagcaaactcctttgagctaaaggagcatgttctaacccaatgcaaggaagctaagaaccttgaaaaaaggttagaggagctgctaactagaataaccagtttagagaagaagataaatgacctgatggagctgaaaaacacagcatgagaactttgtgaagcatacacaagtatcaacagccaaatcgatcaagtggaagacaatgatatcagaaactgaagatcagcttaatgaaattaaacatgaagacaagattagagaaaaaaagaatgaaaaggaacaaacaatgcctccaagaaatatgggactatgtgaaaagaccaaacctacgtttgattgctatacatgaaagtgacggggagaatggaaccaagttggaaaagattctccaggatactacccaggagaacttccccaacctagtaagacaggccaacattcaaattcaggaaatacagagaacaccacaaagatactccttgagaagagcaaccccaagacacataatcgtcagattcaccaaggttgaaatgaaagaaaaaatgttaagggcagccagagagaaaggttgggttacccacaaagggaagcccatcagactaacagtggatctctctgctgaaaccctacaagccagaagagagtgagggctaatagtcaacattcttaaagaaatggattttcaacccagaatttcatatccagccaaactaagcttcataagtgaaggagaaataaaatcctttacagaaaagcaaatgctgagggattttgtcaccaccagacctgccttacaagagctcctggagaaagcactaaatatggaaaggaaaaaccagtaccagccattgcaaaaacacaccaagttgtagaaactgcatcaactaatgggcaaaataaccagctagcataataatgacaggatcaaattcacacataacaatattaaccttaaatgtaaataggctaaatgccccagttaaaagacatagactggcaaatttgataacgggtcatgacccattaatgtgctatattcgggagacccatctcacgtgcaaagacacacataggctcaaaataaagagatggaggaaatttaccaaccaaatggaaagcagaaaaaagcaggcgttgcaatcctagtctctgataaaacagactttaaacaaacaaagatcaaaagagacaaagaagggcattacataatgataaagtgatcaatgcaacaagaagagctaactatcctaaatatatatgcacccaatatagaagcacccagattcataaagcaagttcttagagacctacaaagagacttagactcccacacaataatagtggaagattttaacacccaactgtcagtattagacagatcaacgagacagaaaattaacaaggatattcaggacttgaactcagctctggaacaagtggaccctataggcagctacagaactctccaccccaaatcaacataatatatattcttctcaggaccacatcacacttattctacagttgatcacataattcgaaacagaacactcctcagcaaatgcaaaagaatgtaaatcataacaaacagcctctcggaccacagtgcaatcaaattagaactcaggattaaaaaactcactcaaaccacaaaactacatggaaactgaacaacctattcctgaatgactactgggtaaacaatgaaattaaagcagaaataaataagctctttgaaaccaatgagaacaaagacacaatgtaccagaacctctgggacacagctaaagcactgtttagagagaaatttatagcactacatgcccacaggagaaagcaggaaagatctaaaatcgacaccctaacatcacaaataaaagaactacagaagcaagagcaaacacattcaaaagctatcagaagacaagaaataactaagataagagcagaactgaaggaaatagagacacaaaaaacccttcaaaacatcaatgaatccaggaggtggttttttgaaaagattaacaaaatagatagaccgttagtgagactaataaagaagaaaagagagaggaatcaaatagacacaataaaaaatgataaaggggatatcaccactgatcccacagaaatacaaactacaatcagagaatactataaatccctctacacaaataaactagaaaatctagaagaaatggataaattcctggacacatacaccctcccaacactaaaccaggaagaagtcaaatccctgaatagaccaataacaagttctgaaattcaggcagtaactaatagcctaccaatcaaaaaaggcccaggacaagatggattcacagctgaattctaccagaggtacaaagaggagctggtactattccttcagaaactattccaaacaatagaaagagagaaactccttccctaactcattttatgaggccaccatcatcctgataccaaaacctggcagaaacacaacaaaaaaggaaaatttcaggccaatattcctgataaacatcaatgtgaaaatcctcaataaaatactggcaaagcaaatccagcagcacatcaaaaaccgtatccaccacgatcaagttggcttcatccttgggatgcaaggctggttcaacatacgcaaattaataaacgtaatccatcacataaacagaaccaatgacaaaaacattatctcaatagatgcagaaaaggccttcgataaaattaaacaccccttcatgctaaaaactctcaataaattagatgtcaatggaatgtatctcaaaataataagagctacttatgacaaacccacagccaatataatactgaatgggcaaaaactggaagcattccctttgaaaactggcacaagacaaggatgtcctctttcaccactcctattcaacatagtattggaagttctggcctgggcagtcaggcaagagaaagaaataaagggtattcaaataggaagagaggaagtcaaattgtctctgtttgcagatgataggattgcatgtttagaaaaccccggtgtctcagccccaaatctccttaagctgataagcaactttagcaaagtctcgggatacaaaatcaatgtgcaaaaatcacaagcatttctatacactaataatagacaaacagaaagccaaatcatgaatggactcccattcacaattgctacaaagagaataaaatacctaggaatctaacttacaaaggacgtgaaggacctcttcaaggagaactacaaaccactgctcaaaggaaataagagaggacacaaacaaatggaagaatattccatgctcatcgatagaaagactcaatatcatgaaaatggccatactgcccaaggtaatttatagattcaatgctatccccatcaagctaccactgactttcttcacagaattggaaaaaactactttaaagttcatatggaaccacaaaagagcccgtatagccaagacaatcctaagcaaaaagaacaaagctggaggcatcatgctacctgacttcaaactatactagaaggctacagtaaccaaaacagcatagtactgatacaaaaacagatatatagagcaatggaacagaacagaggccttaaataatgccacacatctacaaccatctgatttttgacaaacttgacaaaaataagcaatgggggaaggattccctatttaataaatggtgttgggaaaactggctagccatacgtggaaaactgaaactggactccttccttacaccttatacaaaattaactcaagatggattatagacttaaacataaaacctaaaactgtaaaaaccctagaagaaaacctagggaataacattcaggatataggcatgggcaaagacttcatgactaaaacactaaaagcaagggcaacaaaagccaaaattgacaagtgggatctagttaaactaaagagcttctgcacagcaaaagaaactatcatcagagtgaacaggcaacctacagaatgggagaaaatttttgcaatccatccatctgacaaagggctaatatccagaatctacaagaacttaaacaaatttccaagaaaaaaaacaaacaatgccatcgaaaagtgggggaaggatatgaacagacacttctcaaatgaagacatttatgtggccaacaaacgtgaaaaaaagctcatcatcactggtcattagagaaatgcaaatcaaaagcacaatgagataccatcttgtgccagttagaatggtgatcattaaaaagtcaggaaacaacccatgctggagagaatgtggagaaataggaaagtttttacactattggtggaagtgtaaattagttcaaccattgtggaagacagtgtggcgattcctcaaggatctagaaccagaaataccatttgacccagcaatcccattactaagtatatactcaaaggattataaatcattctactataaagacacatgcacacatatgtttattgcagcactgttcacaatagcaaagacttggaaccaacccaaatgcccatcaatgataggctggttaaataaaatgtgacacatatacaccattgaatactatgcagccataaacaagcataagtggaagttgaacaatgaaaacacatggacacagggaggggaatattacacactgggtcatgtcagggtgtggggggctaaggagggatagcattaggagaaatacgtaatgtagatgatgagttgatgggtgcggcaaaccagcatggcacatgtatacctatgtaacaaacctgcacattctgcaaatgtatcccataactttaagtataattatttttttcagatggagtcttgctctgtcgcccaggctggagtgcagtggcacaatcttggctcactgcaagctccccctcccgggttgacgccattctcctgcctcagtctcccaagtagctgggactacaggtgcccgccaccatgcctggctaatttttttttgtatttttagtagagacagggtttcaccatgttagctaggatggtctcgatctcctgacctcgtgatccgcccgcctcggcctcccaaagtgctgggattacaggcgtgagccactgcgcctggccaattttaagtataatttttaaaaagccacagcaattgcacaaacaataaaaaacaaaggattcaaagcatgcaactgtgagaaaacatcaaatttcaaaggaagacagccagagaagaattaaaaataaaagatctacaaaaccaacataaaacaaattataaaatggaagtctgtacctataaataaccttgaatgtaaatgggttaaattctccaattaaaatacatagactggctgaatgtatttttaaaatcaaccatatactactgtctataagtgactcacattactagtaaagacacacaaagtctgaaagtgaggggatgaaaaaggatattccatgcaaataaaaaccaaaaaaaaaaaaagcagtggtagctatacttatatgagacaaaatagactttaagtatgtaactataaaaagagaaaaaggtcattatgtaataatagagggttcaatttaccaagaacatataacaatataaatatatatgcacaaaacatcaaagcagttagtaaatattttaaggagagataaactgcaacacaatagaagtagggaacctcaaatcccactttcagcaatgaacagataatctagacacacaatcaataagaaaactttggacttaaactacatgttagagcaaatggacttaatagccatatacagaatattctatccaacaccagtagagcacacattcttctcaagtgcacattctccagaacatatcatatcttaggccacataaaaagttttaaatttaagaggattaaactcataataagtatattttcagaccacaatggtacaacctagaaatcaatagaaatcttggaaaacaggcaaatatgtggaaattaaacaacatgctttcaaacaaccatcgggtcgcaggaaaaaacaagaatgaaataaaaaatattttgagacaagcaagaatggaaacacaacacacaaaacttatggggtgcattaaaggcaaaaatgagagggaaatttatagcaatagacatctgtatcaaagaagaaggatctctaataaacagcctaatgttacacatcaaggaactagaaaaagaaaaaagaattacatccaaagaacagaacaataataagtaaggagactgacttagtaataaaaattctcccatcaaagaaaagcccaggacccagtgacatcactgatgaattctaccaaacatttaaagaaaaactgccagcatttctcaaactcttccaaaaaatgacagaggacatacttccaaacttattttacaaggtcaacattaccctgataccaatatcagacaaggacactgaaaaaaaaagaaaactacaggccaatattcctgatgaaaatagatgcaaaaattccaccccccaccaaatactagtaaaccaaataaaatagcacattaaaagaattgcccactgtgaccaagtatgatttaaccctaggatgcaaggatggttcaatatatacaaatataaatgtcatataacatataagcaaagtgaaggataaaaatcatatgataatctcaattgatacagagaaaatatttgataaattcagcaccctttcatgattaaaaatctctgaacatattaggtatacagggaatgtacttcaatacaataaaagccatatatgacaacccatagctaacattgccatggcatcctttgggtgttgcttttcctctggaaacctttgcccaagtttttcttaggcccattgggcttgttctgcccccttggccttgcaggctgtgcttggcttgtgataccagtccagatcccacacctgccaagggcgagccaggcacagagcagtgaggagtgcatgagtgagcgagcacaaaatctggccactgtgcacagccaggcatgctggctgctgtggtggagcaggcagctctaggcaccagcacaggtgccagctccatgtaaacctctgtgtggctagatcagatgcactgcaagtagcttccactgtaggcacctgtgtctggacgaggggaatgtggtggtgcctggaagcttggaaatgccagaaaccatacaggcccaaagagggtgtcacagtcctggcatgggaagcccctaggtctgggctcctggaagggctgcagctcttctctccttctcattgtctgcaacattgcaaacagggcggtgtgtatcagccctgtttgtgttacagctttttcagtcccacctttcagtggttcccaagttcttgtcccatatccaggaagaatgtggtacacagacaactggagggtaaggcagtgaggagctttattgagcaacagaacaattctcaggagacctgaagtgggtagctcctttctgcaggcaggtcatcccaacaagtgggtagctccttcctgcttctcacttcatagtcctgatgtctgtctgagtctaggggtttttatgggcccagaaggaagggagtgcatgctgattggttcatggatggccatgggtggctgggaaaaagcaccataaattctgactccaggcagtggactccacccggaactggcagcccagcccccaggcttcaggtcatccctggcttgaaggtagttagggacctgcccctttccacccaggaacctgtttcccttccaccatcaacatgccatccatggtacctgggctgttcatgctgagttggacctgcagacctgtgcagagctgccctcagccatcgtcctccctcctgtgctcactggtgctcaaagtccagaaggagctgaggaggcagaagctgtcatgtcagcactgcctccagcacatgcatacctggctgggcacaacagtgcccggactcggctacaactttgctttgcactggagtggacaccaggagcagggagagggtaggaagcagaagcaggcacttctgagcctgcaggggcagagagggtttccagggccccgagagcacagtgatgcctgggtctggagctgcggctgggtgactgcagttgtgccccagagcacaggactcctgccccgtggacttggtagagagtggggctccccccattcccagccccctcccagccccacctggctccatggagcacatggccccagccacacctcccctgctgcagccagcatcttcacagcaactgctccagacaggctgccactgttatcaacatcatacttaaacatgaaaagtggaacacttttcctgctagatcagggacaatacaagaatgcccattcttataactttttttttttttggtgtcttgctctgtcgccaggctggagtgcagtggcatgatctcagctcactgcaacctccgtcttctgggttcaagtgattctcctgcctcagcctcccgagtagctgggactacaggcacacaccaccatacccagctaattttgttgtatttttaggagagacaggttttcaccatgttggccaggatggtctcgatctcttgaccttgtgatctgcttgccttgtcctccgaaagtgctggggttacaggcgtgagccaccgccccggcacttctttctaacatagtactggatgtcctaaccagcacagttaggcaaaagaaagaaagaaaaggtatccacattggaaagaaaaaagtaaaattgtctctatttagtaataacatcatcttatatatagaaaatcctaaagacttagccaaaaaagtattggaaaaggtaaacaagtctagtaatgttgaaagatacaacatcaacatacaaagatcagtttcatttctatacactaatgaaaaactatctgaaaaagattaagaaaacaattccaatagcaacaaaaaagtacttagatataaatttaaccagagatgaaagacctggttaaaattatggaaaattataaaacactgattaaagaaattgaagaaaacacaagcaaatggaaaactatcctgtgttcataattggaagaattaatattgttttgatgtccttgactagcagagctgccgcttgccgtagtgtgctctgcaggaattgtggacgaacacagctgaagcttgccactggccactccatcccctcaaccagtgaccctgaccacttgattggtggagctgctgcctgccacatgtgactccagtgatctaaggacttgtggagtcacatgtgaccagaccaccagtgagccgaaactttcaactgtcagaggtgctgtacaccacacatgttccccaggaattgggaattagcctgcccagcatctgctcccaccagaaataccaccccctggaacagtggaggcaccacacactgcctgcatcccccagggttccaaggactggcgcactcagcacctgctgccatgacttcatatccttgattggcagagtgactacatgctgcacgcagccccccaggagtctcaggaacagcccatttggtgtccaccactgatggtggccatatctcatttacttgcagagctgctgcatgctacgtgcatcgtctaggactccaggtactggcccactcagcacctggcacctctagtaaccttgcctcctcgactggtacacccctgggaccaagtgaccagtggagctgtcatgtttggtgtgcactgcccttgcctaaaaaccagcctagctggtggccccagctccctgcaaagctgtgccattgcctccaaaactacacacagcctacaacattgacacacttgaaggtacttccaatgttgattacagctgaagcagttacatggaaattattaatataatacagcacccacgtatccaaccaacaccataggactcatctacaggaaaacatctttgcctataaaagtttccacctcagggaactagaaaaataaaaaaaagaagccccaagttgaaaatgtttgaaataacaaaaattagagcagaaatagagagtagaaaaacagaagaaaacatcaacaaaactaacaggtggtttatatataatgttattccataaaattggaagaggttattgttccaccaaatttgcagatatcaatgtaggaacccaagaaacatgaaaatccaaggaaatatgacacctccaaaggaacacagtaattcttcagtaacagactccaaggaaaataaaatctatgaatgcctgaaaaggagttcaaaataatgatcttaagaacacttagtgagacacaagagactagaaatggagaatttaacaaaatcaggaaaacaatttttcatctaaatgaaatactttttaaaagcccctttccccatttaaaaaaaaaaagaaatattcaacagagagacagatactacaaaacagagctaaacaggaatcttggagctaaggaattcaatgaatgaaataaaaacattgccatttgatggattactatagtgataaaatttgattcctttcaaatttatacaggagataaatcagaagaaagaatttctgaacttgaagacaggtattttgaaataacccagtctgatgaaaaaaagaaagagaaaaaagaatgaagaaagtatacaggacttatgaaataccattaagtgaaaaaattttcatattatgtgagtttcagaagaagagatgagagatggtgtaaataacctatttaataaaataatagctgaaaactttgcaagtcctggaagagatgtggacatccagttccaggaagcttaaaagtttccaaaatattcaacacaaaaaggtcctctacatggcacattttagtcaaattgtcaaaaggacaaacagagaattctaaaatgagcaagataaaagtgtcatgctacgtacaagagaattcccatcagactaacaacagatttctttccttcttccttccttccttccttcctttctttcttttttttttttttgatggagtcttgctctgtcgccaggctggaatccactggcacgatttcggctcactgcagcctctgactccctagttcaagtgattatcctgccttagcctctcgagtagctgggattacaggcacgcaccaccacacccagctaatttttgtatttttagtagagacggggtttcgccatgttggtcaggatggtaacagcagatttcttaacagaaatcttacaggccaagagagaaagggatactatgttcaaagtgctggaagggaaaaaaagccaactaagacatgatggccagcaaagatattcttcggaaataaagaagaaaaagatattttttagataagcaaaactgagggaatttatcaccactagatcagtcttacaagaaatgctcaagggagtcctatgtctggaagggaaaggatgataactaccatatgaaaacacctgaaggtagaaaactcactggaagaatagatatgaaaatgagaaagagaaaggaatcaaattttatcactatagtaatccatcaaacggcaaagggaaatgataagagaggaagaatcaaacttggatatacaaaataatgaacaaaaagttaacaaaatgacaggaataagtcctcactcatcaacaatacccttgaatgtaaatagtttaaattccctaattaaaatatatagattggctgaatgaatgaatgaatgaataaatgaaaaaagatcccattatatggtgcccagaagaaactcacttcacttgtaaagacacacaaagactgaaattgagggatgatgaatggtattccacacaaaaggaaaaaaaaacaagcaagaatagctatacttatattagataagatagattttaagtcaaaaactgtaaaaagggacaaagaagattattatttaatgataaaggggtcaattcaacaagaggatatagcaattgtaaatatatatgaacccaatacaaaagcaccaaaattcataaagcaaatattactagatctaaagggaaaggtagatcccaatacattaattaatgtaatgtctagctgaactgtctagctgttgaagctgggggcttcaacaccccacactcaccattggacagatcatctagacagaaaatcaacaaagtaacattggatttattgtaccctatacaccaaatgaacctagcagatatttacataacattttatccacaagctgcagaatacacattcttctcatcagcacatggaatattctgcaggatacattttatgttaggccacaaaacaacctcaacaattttttttaaaataaaaactatatcaaatatattttcagggcacaatagaataaaacaagaaatcaataacaagaacactggaaattgtacaaatacatggaaattaaacgacattcttctgaacaaccattggcttaatgcagaaattaaaaacaaagttaaagaactccttaaaacaaatgaaaatataaatacaacataccagctgggcacagtggctcatgcctgtaatcccagcactttgggaggctgaggtgggcagatcacgaggtcaaggggtcaagaccagcctgaccaacatggtgaagcaccatctctactaaaaatacaaaaaattggctgagcatggtggcactaatcccagctactcgggaggctgaggcaggagaatctcttgaaccagggaggcagaggttgcagtgagctgagatcatgctgctgcacttcagcctgggcgacagagcaagacttcatctcagaggaaaaaaaaaaaaaaagaaacacaagataccaaaacatatgggatatagtaaaagcagtactaggaggtaagtttatagcaataaatgcctacatcataaaaagtataaatatttcaagtagaaaaaactccaaacaattagcctcaagaaactagaagggcaagaagaaacaaagcccaaattttgtagaaggaaataaataataaatatcagaggagaaataaatgaaataaagaccaaaattataagacaaaagaccaacaaaataagagtttgtgttttgaaaagataaaattgacaaacccttagctggaataactatgaaaaaaagagagaagatccaaataaagaaaatcagaaaccaaaaggaggcattacaactgataccagagaaatagagaaatacaaaggatcattggagactattaagaactatatgccacggggcacaattgttcatgcctgtaatctcagcactttgggaggccaaggcaggcaaatcacttgaggtcaggagctcgaaaccagcctggccaacatggtggtgaaaccctgtctctacaaaaaaacaacaataacaacaaaaaaaacccataaaaattagctgggcttggtggcatgcacctgtagccccaactactcaggaggctgaggctgagaatcattgaacctgggaggcagaggctgcagtgagccgagattgagatgcagcctgggaaacacagcaagaagaaagaggtggaagggagggagggaggaaggaagggaggaaggaaggaaggaaggaaggaaggaaggaaggaaggaaggagagaaagaaagaactagtatatgccaacaagttggaaaatgtaaaagaagtagataaactcataaacacatggaacatactaaaatagagtcaggaaaaactagaaaacctaatcagactaataatgagtaacaagagtgaatcagcagtaggaagtatcccaacaaacaaaagcccaaaacaagatgacttcactgctggattctattaaacttttaaagaactaacaccttctcttcttaaagtattacaaaaagttgaaggggtgggaattcttccaaactcattccatgaggacagtattatcctgatgccaaaatcagaaaagaatacaacaaaaaggagaatgctacaggccaatattcattatgaacatagatgcaaaaattctcaacaaaatactagcaatccaaatccaatagcatatcaaaaagaatatacaccatgattaagtgggattgattctagggatgcaaggatggttcaacatatggaaatcaataaatttgatatatcacatcaacagaatgaagaccaaaaagtatatgatcatctcaatagacattaaaaaatatttgatgaaattcaacatcctgcatgatataaactctcaacagtttagatgtagaagaaatgtacctcaacacaatcaaggtcacatatgacaaactcacagctaacatcatacagaatggggaaaagttgaaagcttttcaataagaactggaacaagacaaggatgcccacttttactactcttattcaacaaagtactggaagtcctagccggagcaatcaggcaagagcaaaaaataaatggcatctaaattggaaaggagaaagtctaattgtccctgtttgcagacaacatgatctttatataaaaaaactaaagattccatcaaaaaaacctcttagaactgataaacaaattcagtaatgttgcaggatacaaaatcaacatataaattcagtagtgtttctacacaccaataacaaactagttgaaaaagaatcaagaaagcagtatcatttacaatagctacaacaaaataaaataccaaggaataagtttaaccaaggaggtgaagatctatacaataaaaactacaaaacattgatgaaaagaactgaagggaacacaaacaaatgaaaagataccccatgttcctgatgtaagagaattaagattggtaaaatgaccacactacccaaagtgatctacagagtcaatgcaatccttatcaaaataccaatgacattctttaaagaaataaaaaccaaaatcctaaaattcatatggagccacaaaagactccaaacagccaaaacattactgaataaaagaacaaagctggaagtatcacactatggagcttcaaaatacactacaaaagcatgctagccaagacagcgtggtactagcataaaagcagacacacagaagaatgagacagaatacaaaacccagatataaatccacatatttacagtcagctcacttttgagaaaggtgccaagaatatatattagagaaaagagtctcttcaaaaaatagtgctgcatttgctagtatcaatatgcagaagaatgaactaacccctatctctcaccatatataaaaataaactcttgatgaattaaaggctaaaatgtaaaacctgaaactataaagctactagaagaaaacataggaaaaatgcttcaggacattggactgggcaataatttttttttatgtgatttcaaaaccacagacaataaaagcagaaacagacaagtgtgattatatcaaactgaaaagcttttgcacaacaaaggaaataattaacagagtgaagaggtaacttacagaatgggagaaaatatttgcaaactatacatctgactaggtattcatatccaggatataaggaactcaaacaactcaagagtgaaaaaacccaaataatccaatcacaaaagggaagatagacttttttttttttttttttttttgaggcagagtctcgctctgtcgcccagactgcagtgcaatggcgcaatcttggctcactacaacctcagcttcctgggttcaagtgattctcctgcctcagcctcccgagtagctgggattacagacaccatccaccacacccagctaatttttatatttttagtagagacggggtttcaccaggttggccaggctggtctctaactcctgacctcaggtgatccatccagcctcccaaagtgctgggattacaggcatgagccaccgtgcctggccaggatgatagaccttatatacatttcttaaaagaaaacatacaaatgaacaacagatatataaaaatctgttcagtatcactagtcatcagggaaatgcaaatcaaaactacaatgagataaaacattactcaagttaaaattgctattatcaaaaagacaaaagataacaattgttgatgtggagaagaggaacacttacacaccattggtgggattttcaattagtgtgttcattatggaaaacactatggagatttctcaaaacattaaaaacaaaactaccatagatccagcaatcaaagtactgagtatacccaaaagaaagaaaatcaacatgttgaagaaatctgcactcctatgtttatttcagcactattcacaatagctaagatatggaatcaacctaagtgtttattaacaaattaatgaaaagcaaatatgatgtatatacaaaatagaatattattcagtaataaaaagagtgaaatcctattatttgcaacaacatggatgaacttagaagacactacgttaagttacattaaaccatacatgatctcacccataagtggaatccaataaatggatctcatagaggtacagaatctagaagacattaagtaaattaagccagacacagaaatacaaatatcacatgatctcacccacatatggaatccaaaaagtttatctcatagaagtagagaagtaggggttaccagagactggtggagctggggatagggtagagggaggaatggagaaagactggccaatgcatacaaagttacaattagataggaagaaaatgttctggtgtcctgttgcatagcaaagtgactatagttaacaagaatgtatagtatatttcagaatagctagaagagaggattttgaatgttctcaccacaaagacacgacaagtgtttgaggtgatggaaatgatcattacacaatgtatacatgtatcacgacatcacattgtaccacataaatatgtacagttattatgaggcaattaaaattcttttaaaaagctgatctcatagaagtagaaagtggaatagtggttactagaggctggtaagggtagagggattgcaggggatgaggagaggttgatcaggtacaaaattatatttaaatagcagcaataagttccagtcttctattgcacagtagggtaactataattaccaataacatattacatatctcaaaatagctagaaaagaggattttgaatgttctcaccttaaatgatcaatgttttaggtgataccttaatttgatcattacatattgtacacatatatcaaagcaccattttgtaccctgtaaatatgaacaattattacatcaatacaaagtaaaataaaacttaaaaaactgaacacaaataaaggaaatatattccatgttcagggattggaaggattagcattgttaaaatgtttatactacccaaagctatttacagattcaatacagtctctctcaagattctaacgtcacttttcacagataaagaaaaaaggaatccttaaattcatatggaatcacaaaagatctcaaatagccaaagcaatcttgagcaaaaataacaaagttagagtcacaatactctgatttcaaaatataaagtgattataattaaaacgtcctggggctggcacaaaagcggacacatcactcaatggaacaggatggaaagtttggaagtacgcccatgtgtttatgaacaattgatttttgaaaaaggtgccaagaacacaggatgaagaaaggacagtctcttcaataaatgatattgaaacaagtggatatccacatgcacatgtgtgaaattgaacccttatctcacaccatgtacaaaaacgaactcagattaaaaagttaaacataagacctgcaactataaaactgctagaagaaaatatatgggcaaagctccatgacattgatcttggcaataatttttttgaatatgacataaaaagcacagacaaaaaagcaaaaatagacaaatgggattacatcaaactaaaaagcttctgtacagcaaagaaaacagttaacaaggtgaaggactacccacagagtgagagaaaatatttgcaaaccaaacagctgatagagggttaataaccaaaatatataagaaattcaaacagctcaatagaaagaaaacaaataacctgatcttaaaaaaggggaaaggacctgaacaaacatttctcaaaattacatttaagtggacaacagggagagtgtaggcttgcgctaactctcttctttcacctagttgcactcctgagagcaagatgggtcaccagcagctgtactggagccactcatgaaaattcggtcagggttcttgctcttgtcgagtctgatccggaaatatggcctcaatatgtgctggcagtgtttccatcagcacgcaaaggacatatgtttcattaagttgaactaagtgctcttccttgaatggattatccaaggcatctacgcaatgaaaaaccatgatagctctttgtacataaaataaacattaataaataaataaataaataaataaataaatggacaacaggtacatgaagaaatgctcagcatctctaatcattgtggaaacgcaaattaaaccacaatgagatatcaccttacacctctttgaatggctattatcaaaaagattaaagataagtgttggcaaggatgctgagaaaaggaactcatacattattggtgggaatgtaaattagtatggcaattatggaaaactgtatggagttttcttaaaaaactaagaatagaactactctatgattcagcagtcctacttgtgggaatatatgaaaatggattgtaatcaatatgttgatggaatagctgtattactcacaattgctaaattcagtctaagtgtccatcattcagatgaatggataaagaaaatgtgatctataaatacaatggaatacaatatttagcctttaaaaaaaggatggacattttgtcgtttgcaactccgaggataaacctgaaggacattatgctaagtgaaataagccaagcacagaaagatgaatctcttgtgatctgatatatgtcaaagctaaaaaagttgaactcataacaatagagagtagaatgttaccagaggctggggcagagggcaagagagaatggggagttgttggtcaaagggtgcaaagattgagatagacaagaggaatatgttttgaagtctactgaagaacagggtgactgtagttaacaataatatattgtatatttcagaataacagaaagaataaaatttaaatgtctcatcataaaaatgataagtaagggagatgatggatgtcttaattagcttgatttaatcattccacattgtaggcatgtatcaaagagtcacaccgtacccattaatatgtatgtgatttgtcaatttaaataatagtaataaaaggagggaagagatagtttttcagacaagatgcaaatattttaagacatcagttctctctgaattgatctatagattcaatacaattccattcaaaatctcagcagaattttcttagaacttgacaagtcaatacaaaaatttatgtcgcagagcaaagttgccaaggcacaactgaataagaagtgaggaaacttagtctagtttataccaagacatatcccggaactgtggtgattaagccactcaaaattattggcacaaaagtggacaagtagacaaatgacacagagcagagagcccagaaacaaatccaaacctaaacagaaagcttattgggtcagaggtgatgctgcacgtatcagtgtgtaaaggaatgtccattcaataaatgttggcacagtcgttatctgttgagaagaaaattaaatagaaccactacctcattttataacaaaagtacaatcaaagtattaagcctataggagaatttatagaaacctatttcttccattgtggggaacaaggtgactccttaaagaagaattgaattgtgtcttttgttcaccaataactaaaatgtctgtgggattgtttttcagatacctttttcgagcctatatcgtggcacctggctaccaaagtactgggaatactctgctgtggcctattttttggcattgttggactgaagattttcttctccaaattccagtgtaagcgagagagagaagcatgggccggtgccttattcatggttccagcagggacaggatcagagatgctcccacatccagctgcttctcttcttctagtcctagcctccaggggcccaggcccaaaaaagtaatcatccttctctagggtattctaacatctcttcctctggaaatatcaactacgacagccccttgctacttcatttaggtcaaataataaggggatgaatgattttcagtacctatagagagagcttggataattttccatgaacaccaccaagactcctattaaaaagttttaatgtggtgaacaaattcataaaggaggaagcaaaagtgactgacaataagataaaattatattcagtctcaataagacttttcacccccaaaaccaatttcctcctccttgggagtgacacttccccttgggggtgaggccacccccgcctcccctcccagctgccttctcccatctccatccccacctccacagcatcccagctgttgtccctctccttagcatgcaccttcctgatctcttgctccaccccagagagccacactccgtgcaggagctggggagacgagcacatataagtgtcctaggagaggccctgcccttcacacctgcagctcgtcccacctgtgcaaggagccagcgtcgtgtttgtgccttgtacactcctgtgtccaccactgaatatactgtttctgtttcagggaaaatccaggcggaactgggtaagtatgtgtcatgtcctgagcctcccacacatggttctcccgggtccctccctgatccacagtttgagcctctggacgaccctggctgcaggctggacaggaagcaccggcaggtggaggagagcagctgctcgctctctccatccactgctcatgagttacccctcggacatctggagggcttaggataggccccggggcctggaagtccccacaaattgtctgtgcctgttgcccgttggtttgctgtgtgtgtggtgggggaaggtgttgatcatgagctctgagggtgtctgggccacagtgaggaacctgagaaaaatttgtgggtgatcctcgacctcccctggcctgatgctttgagactttatccagttctgtatcaaccactaaatagtctgctttttgttttgtgggaactccaggataaactgggtgagagtgttaccactcgcagggattccctcccacgccctccctgggcccccgctctgtgacgtcagcctcttacatgttttttgtttttgtttttgtttttcagactggagaagaaagcacggacaggcaggtaaaagaaaatattcctcttcacacatttatgactcctttccaagtctctcgtttatggatttttatatcctgaggcccgtgggtccctgcagagccaagcttgtgatgggaactctgaaattgcagattctgggggaggtgcattttgtagagaagccccatagccttcttcggatctctggagggtccacaacactcaaaaagggtcccaatccttggtctttcccttctccctgcgccctgtttcccacgtgagcactgaactgcctgctctgtctgcttgctttcagaattgagagacgcccggaaacacgcaggtaccaacgcctgagagggtgacagtgggacagaatctcaggtggacatgagagggggaactgaacagggacagatacgggaacacagagtgatgctgagacccatcctgcctgcagatggagaaactggatgcttgatcgcccccaagggttcagtgcccccagacacacttctttcccttggtctagaaggggagaagacaggggctgggtaaacgggagacgggggggtctttggcacagtttcagggaattgagggcactagtgactggtcaggggtctgagctgaggggaaggaagtaaagtcaggcagaaaattctgagtgggaggaagttagatagtggggtccctccagctcttatgaatcaaatagttttatgtatgaagggacagtggcagggttgggtgatatgccgagattgggacgtcatattgagacatatctagacattgatgagtcctccaggctgcactggtgatgagaggacctgaaaggcagtgtctgcgggaggctcaggtccggggcctcacctatgccacccagagccagtctgcagtgggagggtcgacctcttgctccagcccagatttcgtcttcagtaactcatgcttcctctctcccccaccgcaccccagtggaggtgactctggatccagagacggctcacccgaagctctgcgtttctgatctgaaaactgtaacccatagaaaagctccccaggaggtgcctcactctgagaagagatttacaaggaagagtgtggtggcttctcagagtttccaagcagggaaacattactgggaggtggacggaggacacaataaaaggtggcgcgtgggagtgtgccgggatgatgtggacaggaggaaggagtacgtgactttgtctcccgatcatgggtactgggtcctcagactgaatggagaacatttgtatttcacattaaatccccgttttatcagcgtcttccccaggaccccacctacaaaaataggggtcttcctggactatgagtgtgggaccatctccttcttcaacataaatgaccagtcccttatttataccctgacatgtcggtttgaaggcttattgaggccctacattgagtatccgtcctataatgagcaaaatggaactcccatagtcatctgcccagtcacccaggaatcagagaaagaggcctcttggcaaagggcctctgcaatcccagagacaagcaacagtgagtcctcctcacaggcaaccacgcccttcctccccaggggtgaaatgtaggatgaatcacatcccacattcttctttagggatattaaggtctctctcccagatccaaagtcccgcagcagccggccaaggtggcttccagatgaagggggactggcctgtccacatgggagtcaggtgtcatggctgccctgagctgggagggaagaaggctgacattacatttagtttgctctcactccatctggctaagtgatcttgaaataccacctctcaggtgaagaaccgtcaggaattcccatctcacaggctgtggtgtagattaagtagacaaggaatgtgaataatgcttagatcttattgatgacagagtgtatcctaatggtttgttcattatattacactttcagt

SEQ ID NO: 40 - DNA, 10673 bp, Homo sapiens
ttgtatttttagtagagatggggtttcaccatgttggccgggctggtcacaaactcctgacttcaggtgatccgcctgccttggcctcccaaagtgctgggattacaggcttaagcaaccgcgcccagctctcctctgcttttgaccatttgttgtaaatagtttgaaatcttttctttgaatccgtgtattggttttgaaacctacatgtccgatcagataaataatatggggagggaagaagaaaacataatgctctctgacaatgaatcataacatcatagaaaattagaaccttaggccaggcgcaatggctcacgcctgtaatcccagcactttgggaggccaaggtgggcagatcacgaggtcaggagatcgagaccatcctggctaatacggtgaaacctcgtctctactaaaaataccaaaaaattagccgggcatggtggcgggtgcctgtagttccagctactcgggaggctgaggcagcagaatggtgtgaacccaggagattgcattgagcggagatcgttgccactgcactccagcctgggtgacagagtgagactctgtctcaaaaaaaaaaaaaaaagaaaattagaaacctagacttttttttttttttgcaaagcaaatctctctttttacaggcaaggaagctgggctaagtgagggaggctgggagagctgtcaagcggctgcattgcggtttgtgtgggggcagagctggggctgcttcccctctcgggctctgggagcgctgaggagggggaggctgggctggagggaggccaggaggatgctccgggctgggtggggtggagctggctgaggagtcttctgcctgtttgtgctgggtactgggagatgcaggcggggagacacaaggtagaaggggcaaagtcctcacctaggaccttgagggagttaatgtgtaatattctaggatataagcttgaccacgagttgagaccctgagcacaggcctccaggagccgctgggagctgccgccaggagctgtcaccatgacggtgaggacactagccccctgctgcctgccccactctgttcatctttgtctttgcctgggtgggggcttttagggaaaaccattgctgtccctctctgggcctcagtttccccatctgtgcagcaaagaagttggacagaggtctttttttaaaaaacagcatcttgggccaggcgtggtggctcctgcttgtaatcccagcactttgggaggccgaggctggtggatcatctgaggttgggagtttgagaccagcctgaccaacatggagaaaccccgtctctactaaaaaaatacaaaattggctaggcctggtggcacatgcctgtaatcccagctaatggggaggctgaggcaggagaatcacttggacctgggaggcagaggttatggtgagccgagattgtgccattgcactccagcctgggcaacaagagtgagactccatctcaaaacaacaacaacaatacagcatcttgctctgtcaccaggtggagtgcagtggtggcaatcataactcactacggacttgacctccttggcttaaatgatcctcccacctcagcctcttgagtagctgggaccccaggcactcactaccacactggctaattttgtttgtttcttttctttctctttttttttttttttttgagatggagtctcgctctgttgcccaggctggagtgcagtggcccgatctcagctcactgcaacctctgctgcctgggttcaagcaattctctggtctcagcctcccaagtagctgggattacaggtatgtgtcaccacacctggctaatttttttttttttgttgagatggagtttctgttgcccaggctggagtgcaatggcacgatctcggctcaccacaacttccacctcccaggttcaagcgattctcctgcctcagcctcctgagtagcagggattacaggcatgggccaccacacccgattaattttgtatttttagtagagatggggtttctccatgttggtcaggctggtcttgaactcctgatctcaggtgatccacctgccttggcctcccaaagtgctgggattacaggtgtgagccactgctcctggcctaatttttgtatttttaaagtagagacagggtttcaccatgttggtcaggctgatctcgaactcctgacctcaggtgatccgcccaccttggcctcccaaagtgctgggattacaggtgtgagccaccccacccagcttatttcttatttttcgtagagatgaggtctcactatgttgctcaggctgatatcaaactcctgggttcaagggatcctcctgccttggcctctcgaagtgctgagattacaggtgtgagccactgtgcctggcctccattgatctttatagagataaaaaaaaatctcagcttgggcaatatagtgagaccttttctgctacaggtgcatgccactacgctttgccttaaaaaattagtgggggtagcggcacactcctcagccttgggaggctgaggatcacttgagcccaggaggtcgaggctacagtgagccgtaattgcactactgtactccagcctgggcaacagagtgagaccttgtctcatatacccacacacaaaacccaagtcttggagagcaaattgcccaaggccacaagctgcaaatcacaaggggttgagtggattcccactgaggtctctgattcgttgattctacaccagactctgccacagctttactgtgtggccttggccaagtcactgaccgtctctgagccccagtcttccttacatctgtggaaggggatcacaggctgcctcttctgaggattagatggtgtattcattgcctagggctgcaataacaaattaccaccaaattgtgggtggcttcacacgatagacgtttgttctgtcttggttttggtgactagaaacctgaaaccaaggtgctacagggctacgctcctgctgaaggcgcaaggggagggttctttcttgcctcttccagcttctggtggctcctcgcattccttggcttgcatcactccaatctctgcctccaacttcacgtggactcctctgtgtgtctccgtctctgtgtctatatttctctcctcttatgagaacactggtcgtattggatttaggaccaaccctaaaccagtatgacctcttaactcgattacatatgcaaaggaactatttttaaataggtcacattgaggctgggcggggtggctcacccctgtaatcccagcactttgggaggccgaggcaggcggatcacttgagatcaggagttcaagaccagcctggccaacatggtgaaaccctgtctgtactgaaaatacaaaaacaaaaaagaagaagaagaagaaaaaaaaattagacagatgttgtggtgggcacccgtaatcccagctacttgggaggctgaggcaggagaatcggttgaacccgggaggcagaggttgcagtgagccgagatcgagccactgtactccagcctaggtgacagagtgagacttcatctcaaaaaaaaaaaaaaaggtcacattgacaggttccaggtggacatgaattttcgggggacgctattcaagtgcaggggggatgcaggatgtgaatgtgccaggggtcctgcgtggaagggtctatgccctcatcaccctctgcctctcggggaggactgctgtggcccacggactctccccaccttctctttcctggtcatctcacctctgccttttctttcctctctctccagctccagaggccatatcatccaaatcccttatacgacagataagggaaccaaggcccagaaaggggctaagctggccccaggcccctctgccaattaggggcagagtcggcactagagtctgggcccccaactccccacccccccagctctagggacgaccacacccccacccagttctgcctgtctctctctgcgcctttgactctgttgggtggggacaaggctcccgggcctgcaccctcccgcagctctcagcatccctatttgtccaagtgcacccctgaccctggacttccgagtgcttctgccctgcagcagcccccacctctatccttggggtttgagctttgctgtttcagtcaggcagcccccaggagctgcaaggggagtgtgggtgcttctcttagtccaggcccagctcccctatcctggcctgactgttgcagggctcggggtgtgggcacaggctgctggcaggaggcagggagccatctcctgatgcttggtgttagacgtgtgtgtgcgcagggcacacgtctgtgagtgtctgtgtggcgggcacacctgtcttctgtttcttgtttgagccccttttggactgtcctcactggataacctcatctcccagagataatggtctttgtcagtgagagactgatttttttttttttttttttttttttgagacggagtctcgctctgtcgcccaggctggagtgcagtggcgccatcttggctcactgcaagcaccgcctcccgggttcacgccattctcctgcctcagcctcccgagtagctgggactacaggcgcctgccaccacgcccggctaattttttgtatttttagtagagacagggtttcaccgtgttagccaggatgatctcactctcctgacctcgtgatccgcccccctcggcctcccaaagtgctgggattacaggtgtgagccaccgcccctggccagcaagagactgattttaatcccgtctgtctggctccaaaatctggacccaaccccgttgtgttaagcaaagacatggggagttaggtgtccagcctccaaaccccactttctctaaagcagggaggttttgctcccaggagacaacggaccctgtctggagacattcttggttgtcaccgctcaggggagggtgtcactgacatccagtgggtagaggccaggaatactgctcaacatcctacaacacaagagacagaccccaacaaagaaatgcctgccccaaacgtccagacggccaaggctgagaagctctggtctgagcagcctcctgtctgacatgccgccgtcatggcccgctgtcctgggttaagcattgctgcctcctccaggcgtctcttataaaatgtactgccaggccgggcacagtggcttacacctgtaatcccaacactttgggaggccgaggtgggaggatcctttgagctcaggaggtcgaggctggcctggacaacatagtgagaccccatctgaaaaaaaaaaaaatcagctgggccaggtgggatgcctgtggtccaggctacctggggggctgaggtgggaggattgcttgagcccaagaggtcaaggctgtagtgagctctgatcatatcactgcactctagcctgggtgacagagcaagacctttaaaaaaaaatgtattaccggctgaggcaggaggaccacttgagggtcaggagttccagagcagcctgggtaacatagcaaaaccctatctctacaaaaattttaaaaattagctgggcatggtggcacacgtctatagtcgtagctacttaggaggctgaggcaggagaatcgtttgagctcaggaggctatgaggctgcatgcagtgagttataatcgtgctactgcactccatcttgggtgacagagcaagaccctgtctcaaaaaaaaaaaaaaaagaaagaaaagaaaaaaaatgctgggtgtggtatctcacccctataatcccagaactttgggaggcccagaggggaggatcacttgaggtcaggagttcgagaccaacctggccaaagtggtgaaaccccgtctctactaaaaatacaaagaaaattagctagatatggtggtgggagcctgtaatctcagtgactcgggaggctgaggcaggataattgcttgaatctgggaagtggaggttgcagtgagccaagattgcaccactgcactccagcatgggtgacagagtgagactccatctcaacatctcaaaaaaaaaaaaaaaagaacttactgcctgtggaagagttgagcaatacctaacaacctacccctacatgtgaccaaccagcgggtcacttcctcctctgcagagaggaggcggctgccagcgagagggcactgagggtcctcccatggccactgcccccttgacttctggcaaagtgccccagtccaatgagctcattcagggcatctcagatcatgctttttctggaaataaaaagtcagtgagcagaactcccacaatgtaaaagtgtcctcccataagttgttctaaatctttggtgcctgttgcgtcctggtcagaccaaccctcaccctctggtcatagatgcgaaaactggtcttgggtaatgagtttttttttttttttttttttagacagagtcttgctctgtcgcctggcacaatctcggctcactgcaacctccacctcctgggttcaagcgattctcttgcctcagcctcccaagtagctgggacgacaggcatgtgccaccacacccggctaatttttgtatttttaatagagacagggtttctccatgttggccaggccagtctcaaactcctgacctcaggtgatccacccgactcagcctcccaaagtgctgggattacaggcgtgagccaccgctcccagccctgggtaatgagctttgaaaacccagcttagaaatcttccctagtaaccatcgtgaggctagaggaggctcctactgtacagaaattcaggtgctgctttcctatggaaaataaggagcagatgaatcttaacaacaagtaatcaaaatgatggtcatttgggcagaccactgtccagaaaaaaagaaaaaatttaaaaaagaaaattaaggctgggcttggttcacgcctgtaatcccagcactttggggagctgaggtgggcagatcaattgaggccaggagtttgagaccagccacaccaacatggtgaaaccttgtctctactaaaaatgcaaaaattaggcatggtggtacatgcctgtagtcccagctactcgggaggctgaggcaggagaatcgcttgaacctgagaggtggaggttgcagtgagtcgagatcgcaccgttgcactccagcctgggcgacaaagcaagactctgctcaaaaaaacaaaaaaaaaaacaaaaaaagaaaaggaaagtaaaacaataaatgatggtggtcctgtgatttgctgttggtctacgtgaggccctgtgcatgggatttcacaaacatgttcttgaatcctctcaaaaccagcttgaaggttggtggtgtctccctggtgtgacagggtctgtcatacagctggcattcagcaacaacaacaacaaaaatagaaatgggagtctcgctatgttgcccaggctggtctccaactcctgggctcaagtgaccctcctgtctcagcatcctgagtagctggaatacaggtacacacttccacacccaggctatcaactgttttttaaatgaataaatcaaattagtcaattttacagaaggggaaagtgaggcttggagagagactttgatggacataggacttgcggagttttatagattcttagtttttgttcgtttgtttgtttttgtttttgagacagagtcttgctctgttgcctaggctggagtgcagtggcgtgatcttgtcttactgcaacctctgcctcccaggcttaagccgttctcctgcctcagcctcccaagtagctgggactatagatgcgtgccaccacacctggctaatttttgcatttttagtagagacagggttaaatgttaggcagactggtcttaaactcctgacctcaggtgatctggctgcctcggccttccaaagtgctgggattacaggtgtgagccactgtgcccggccttttttttttgtttttctttgagatgaaaagtcactcttgtcgcccaggctggagtgcaatggtacgatctcagctcatggcaacctccgcttccagaattcaagcaattctcccgcctcagcctcccaagtagctgggattacaggcgcccgccaccatgcgcagataatttattttattttattttatttattattattattattattattattattatttttgagatggagtttcgctctgtcgcccaggctggagggcagtgacgcgatctcacctcactgcaagctccgcctcccgggttcacaccattctcctgcctcagcctcccgagtagctgggactacaggcacctgccaccacacccggctaactttttgtatttttagtagagatggggtttcaccatgttagccaggatggtctcgatctcctgacctcgtgatccgcccgcctcggcctcccaaaagtgttgggattacaggtgtgagccaccgcgtccggccaatttttttatttttagtagagacgaggtttcaccatgttgcccaggctggttgctaactcctgacctcaggtgatcagcccgcctcggcctcccaaaatgctgggattacaggcgtgagcccctgcacctggccagatttagttttgggtgggccaagatcttgtgcctctgatacagtcattttccatatcatatttttgtttctggggttctgctgagggcagcgtgatttcatcacttgaacactttgcggaactgggcaggaagcactctgcccatttcatagatgggcaaactgagcctccgtcctgtgcctcttcgggttggggtggataagagcaaaacagggcagggagtggggaagctctgggaggccttgatcagagcgctctggctctgccactttccagcttggtggtctcctgcgtcctcacgtgggcagggggattgagacctgcagctgggttggcatgaggtggatgaagctgctgggcaagtgtgggattgattttctgtggggactcgagtggaatgtttctctgttggcccagggggaacttgaggttaagaacatggacatgaagccggggtcaaccctgaagatcacaggcagcatcgccgatggcactgatgggtgagcaaggtttcagggttgggggagtctgcaggcccggaataggcagggcgggtggggcaggcagggcagccctgtgaagtgctcaggcaagagggacgtcaggccaatgggccctttttcacacccttctccccacacccctgctggcccccacttcatgtctgaggctaggtttggggacctgcagaatttcagagttgatgccatatgctctattcttttgccccaacagccattgaaggggcaggtggagaagcccctggaactctgtctggccccctgcggggcaggtgcctctagggaacgcccaaatccccagagacaccaccctctttacccagcagaatggccacaggctggcatttcatgagcattaaaccagggcagccaccaggggaggctgagtggtctcgctggcatcctcttggttagaaccagcggcctcaccacctccgtgagtcacagtccagcgaaaggctctctcgcctgcagaacatgtcagcgcatcttggaactgtgctttatctacttttggttagagagggggcgggcaggtgcatgccataggagctaagggaaaagtgacttatttctcctacttgggtccctcaagtttgtcaaaatgtgtgatacccttggtctgagactcccaaatgaagacaccccatgacccagaatgccccactttcaggaaccctgcaggtctagcccaggctcctgtagtgatcttgccaagaagtcatacaaccccggttgcacacccatagtgacagggagctcaccaccttaggttggctgctggtggctaaatttaataggtcttcagatatctaagagatagcatttctctctcccaggagagccacccccaattcccgaagctgtcactatcagttacccttctctcaacagcgtgatccctgctccaaatggaatgtgctaccacagtgctaagtctgagcaggttgttacctcccttgttttaaggcacagatctcaactaacacaagctttgattcttccagcttgtggtcaaccaaggtcctccaacccaagctgctttatccaggcctgagccctgaacctcacctgctaccccttctcctgcagctttgtaattaatctgggccaggggacagacaagctgaacctgcatttcaaccctcgcttcagcgaatccaccattgtctgcaactcattggacggcagcaactgggggcaagaacaacgggaagatcacctgtgcttcagcccagggtcagaggtcaaggtgaggtcaaagggggaaagggcactggggtgatgtcaaggggagggcccagatggaagagagcctggcctggacacaggtgctggccttgtttgagccatcaggcactgccctggcccatttccagggcctcctgcctccttgacaccctccctccccacagttcacagtgacctttgagagtgacaaattcaaggtgaagctgccagatgggcacgagctgacttttcccaacaggctgggtcacagccacctgagctacctgagcgtaaggggcgggttcaacatgtcctctttcaagttaaaagaataaaaga

SEQ ID NO: 41 - DNA, 26371 bp, Homo sapiens
cttgaactcccaggctcaagcaatccatccaccttggcctctcaaagagctggaattacagatgtgaagcactgcccctcccccaaccccatctgttatgaaaggagggtcctttgaccacaagtgccctgagaagtcaggaggacttcccagtctcagacatttttatctgagctggagatggggacagcctcccacacacaggacttggaaggctatgaaggaagtagggggctctcttgggaggtcatttcccttggtagggacggttgtgtgaatgaacttggcctttagggagaggagcccgactctcacctgaagccacccaacctgtgcagatggctgaggaagccctggacaccacaggaccgctaacccaggatctttgttgactttgctcccaggccactgccccacacgcaggctctgaactcctgggagaggtagggagccagcccgaggcgtgagtcaagagtgtaaagtacaccgagttccttggcaagcaggctcttcaaggggaaggtgtcactcggggaacaatgagaaatgtgtctttccctcagcccctgatagaaaagataacaccccttgagcacagccttttctcatctgttcttgctcttggatggggggctgctactccggagcggcgaactggcgggcgggggtgcgcctgtgagtgtgagcgcgcgtgtgcgtgtgtgcgcgcgctctcgtggccttccggcagctggcagctgtcccggcccccaccccaccctaccccaccccacccagccgcgccacgccacgccgcccccgcccctcgctgtcctgggtgcgcctcgggccgctgcgctcctggccagctccccccagcgcctgggaggcgacccccagtgcgcccgggttcaaaggcccggcgaggcagttccagcccctctggggggcggggaggcgacgggggtggtgcagaagccagaaaagcccgagccacagccggccagctccgcgcagggatgggcagcgcgctctgaaagtttatgaccgccgcagccaactcctggccggagctggagacgcagcgagcgatcggccggcctcgaacccccacagctggagggcgaggccagctgtacccggccccagtgccctttcgcggccacaagcggccgtcctcctggtccggtgctccggcgcctgatctaggttcatggagccggggctgtggctccttttcgggctcacagtgacctccgccgcaggtaagcgcacggggcggcgcgcctctcctggcgcgagcgcacacaaaaggacccagggcgggggacccgaggcgcggagaagatgtgcgtcgcggggagcaaactcttgcctgggctctgcactcgtgaagacgcctgggggagggctggggagcagaagcggcgcgcaacgactacccgcacgggctccgggagttgcagcccgcgcactggctggagacctgctgcctgggccgacttggtcaatttttcatgaaactggggacttttcagaaagtttgcgaactattcagaggctgtgccaaaccctggcaaagtttgcagaaagtatgcaaaatgcatgcaagttttcaacgggtgcagatagcttgcaagcttttcacagagtgtgcagatagcttggaaacttttcagaaactgcgcagagctttggaaactttgcagacattttgcttgctccacccccctcctcaggtgtttgggggtggcgggtgttgaggggtctgcacactcagcttaggagcccctcaatctgccttctgcaggattcgtgccttgctcccagtctggggatgctggcaggcgcggcgtgtcccaggcccccactgcagccagatctgagggggactgtgaagagactgtggctggccctggcgaggagactgtggctggccctggcgaggggactgtggccccgacagcactgcagggtccaagccctggaagccctgggcaggagcaggcggccgagggggcccctgagcaccaccgatccaggcgctgcacgtgcttcacctacaaggacaaggagtgtgtctactattgccacctggacatcatttggatcaacactcccgagtaagtcagccttttgtggtgaggaacgtggctcccggaccaggcccacatctgctcattcccaggaggacctcactccaccccagccccgctcagttagcccagagcctgccctggcacagcctttagctcttgctggggcctcttgccagcccaggtctcttctgcaggtcaggggtgtgacccacatcccccctgagggcctggcccaagagaaactcaatcctgagtttgatcctgtggaaggaggagccctccctctgaatgaagtgaactgaccagggggattagatacctgagatgtctctctgagcctcttttctgagatagagaaagccccgaaagtttatctcattccccaggggccaagggggctcatactcactgttgaccccaccaggatccaaggggtttaaaattccttgaaagcatcctggtctccagggagtctaagggtgggtttagctgagcctgacagaacctgcacagtccactcggggtagaattcccctgggatgggctcccttccttcctgtgggcccccctggatgccaaggcagggtgaattcacatcagctcgtccttgggccttccacaggctggctccagtcacccactgccatggtcacagagggccttcccttctctcctgcagtccttagaaactctcttaccctagggcctagacagcaccatcctgaatttgtcttggggttcgtccagtggggaagtcagccttctcctggggccatgtggagagagtgtggctctgacagggggaggctttgatgactcccagtgttcagggaacccctcctgcaggcacatcatcttgcaggccatacagagggcttgaccttgcctgggtcaccaactctctggcattggcttccccatctctaagatctgggacttggatcagacacctctaagttctgttccctgggtgttcatgggatctcttgggactcttgcttgtaccctattagggattcttagctgagaactcagagatggttgtgaatgcaagcccctggaagcctggaaaggcacctttgccaccgtgtcccggagccgtcttgattcaggttcctcacggtcacctttatccccaagccccataacctctgagcccttggtagcagctttcatggggctcacttacctaccttgtgtcatcggcacctcaaaaatgaagtgcagacgagggtagtaaacctgaggggtggaatgtctttcagaccaggggacaagacctctaatcacatccatgatagatctggaacatcaccccaccatgcttgaagggcaggcaggggcttcacattgagccagcaggacacgtgcacaaagtcctgcactcagaaagactctggctcggcttaaagtcctgctgtcactgtcttgaaatccttaatactttctgaacaaagagctgcacatttgcattttctcctgggtcccataaattctgtagctggtcgtgataccctgatttgctggctgggctgtgtccacctagaggatgggaggtgcctccctgtttctttccctttgtggggaagatagaagctgtgagtgttgggccatcatcaattgcctcttatcctcagatagcgaggggagtcacctttccttgtagcccctgcaccttggcactgccctttctgattcttatcctgcatcattgtgctctgatcaaattcacttcatagaatggagggcactgggcagtcaccaggaaccgagttcttgtcttggccagaatccccagctgtgaatctagaaggagaaagaagaaagctaatggaattacagacaggaacctggggtggtgggcaggtgggagaggatttggaaaccatctctttcattcgttgcctgtttaccaaaccccggagcactggctggggaggaagtgatgacttgagacatgtctgagagtctcaaccaacaccctgtgatctgtttaaaattctgtctcatgcatcctgcgatctgtttgaagtcctgtctcatgatttcgagtttgtcctgaaatgaagctgtggctctctgactttttccaggacagccaacttgataactttccccctgaagtgtgatttacctcttcccttccttcccgacactggttcaatttaaacatgatgaaagaaggattaaatctggtgtttgggcatcccctgagctacttgggaaacaaaaacgacaatagccagacttgagcattttgaaattagacaggtaaaataatttttatgaggcagaacttcccaaatggcctccttccctcccttcctgcctccctcctttctttcttaccctccaaacttcctcctgccctccctccctctccccctcccttctttccctctttcctttcccttcttttccctccctccttcccttccttcctgaaactctgtagatgtgtagataggtctgttgtcatctttaaaatatctcaggcaagactgcaatttgagaaaatgggctgtggtgacagggaacaggagtgatggggaggaatctaaaaaatcactgaattgagcaaaagaggcactggaagtgagggacacagtcttttctagtggttctgtctccccattagatcacaaccccacctgtcacatgttcccctctcctgctgtcacgccctcttcattcatggactggtctccctctccaaacttctccaccaggtgtgatttctccctgtcccagcggcagctgttctgggcacgagaaggagccttgattcttgtgcctcagtcaggggtcttgaactttgggtgcttttcacctttcagagcctttcctcccatggcgcatccagctgcgtgaagacagaatcaacactcctagttgatctttgatggaaattgctctgagtacggtcatttttgctcccttcgaggatctgagatgctgcaggagtcatattgggagttactaccgagacccgctttgcatctcctcaagggaagttaactgtctagttcaggctcaagagactagttggtctcttaagtctcttttggaaagaaggtctgagattcctcggctgtccctttagccctcctgcttttttcccctccttagtccttccagacccgagcttggtcggccctttctgttagcacccagcatggcatggatgctcaggaaatgctggttgacttttggctaagtcctgccacctgggtactctggctcatctttgctgttgctgagcccctaaatctccagtgccttctcccacacaggaggcctctttctccaggtgcctggctgctcttcaggggcctgcacatccctgtagacaggggtgggcaagagagtttttcttggggatgttgcccataacttctgtgatatcttcccaaaagtccatcgccccaaagaggaaccaaatttatacttaccctgtcaaggctgctgggatcacagttcatcaatgggatagcatgatttccattagcctttccttggctgtcccccacagtccccaagccatcccaccactgccaacaaaatcaaagtcccaaatcagagaaaaacatatcccatcctattgtcatggataagttgccaagaataagatagtaaggggacaggtggtgaacaaggggtccgtgtgctgatgtccttgtacactgcggctgtcctctatgagcagactgaagaaacagataccaggtagctggggcctgtaggagtcagggttctctagagagacagaaccaacagggtgtgtgcatgtctgcagattatgcatatatcagaagtgcggttgccaaaggaaatatttggttgctcttgggggccatggacttttatggaggataaacagaagttatgggcaatgtccctccagagatatatatatggagagagacaaagagcaattttcagaatttggcttacatgattgtgggggctggcaggccagaaatctgcatgccaccaggctgaaaattcccgagggagttgatgtcaaggaggtctggaagcagaattcttttctgttcgggaacctgtcttttctgtgaaggccctcaacagattggatgaggcccactacattttggagggtcagctgctttgctcaaagtctactgatttaaatgttaatcacatatcaaaaataccttcagggcaacatctaggctgctgtttgactaaacaactgggcacagtatcctagccaagttgacacctaaagtgacccataacggggatgtcagctcgaaccacatttcatggcggaccagcccctcagagcctggctgaagactgaaaacctgtttatccaatggctgactgagctgtgaagcacccagcaaagagccccactgtgctcctccccgccccatgagctgagggatcctgccatctgttcatccctctaaggacatctgagggaggcattgtgatgctggatggtgactgtgttttccaaaccaaaatctgacacacatgggctggcagataggaatgtagttatgaaaagaacagggcaggatgttgggaatcatgatcatggtggaaaatttgggatttgcagtcccgacttgtggagaagactccagaacccagaagtgctgcccttgagtcctggccatgactatctgtgtggccttgagccaggaggtgctgttgcctctctgtgaccctctggaaggtgcagacatcagccgctccaggacagtgagctgccaagtctctcctaatcccaacagtctgatcagctcctatcaagatgcccaggccggcttcccaggctgccctggatcaagccacactaaacttaatccagcaggaatgccatttcttttgagtttttttctcccctaaatgcataaagagtaaaaaaaaaaaaaaaaaaaaaaaagcattaacaaaacatttaaacttgtattttaatgtattctaccacaaaagggcagcatcacagattctggctttgccttctgtgttcttcaagaaaggcatcttggcatggtctcaagaagagatattccaaattttagaacatcccaatagaacggttggatctggaaccccaacttcctgcacatgaggagccagctgagcaccagaatgtgattttgggatcccgataaaagtcaccctgggccaggcgcggtggctcacacctataaacccaacactttgggaggctgaggtgggcagatcacttgaagtcaggagtttgagatgagcctggccaacatggtgaaaccccgtctgtactaaaaatacaaaaaatagccaggcatggtggcatgtgcctgtagtcccagctactggagaggctgaagcaggagaatcacttgaacccaggaggtggaggttgcagtgagcagagatcacgccactgcactccagcctgggtgacagaccaagattccatctcaaaaaaacaaaagtcaccctgacctgtgagccacacctggcagtatcattgttggacatgtggccatatgaggcagagggccagtctttctgccatcatggttttggaaaggggtcatgaatagtctgctactaatcatggatggtgaggatggctgaccatgactgtgacctcatgtcatctcatgggatcagcttgacagccccattagttggatgctattgtccctgtagtttacaggaagaagctgagcccaggaggcggagtcagttggccaaggttgcagagcttgtgagtagggactgggctgccagcccagaagtttggccctgaagcctgccctgtaagcctcctcctgtgtgcatgttcccaacatgggcttcttaggtgactaatatgccatcttagatgactcctgctttcgttcatttaatatgttttcccagagtgcctcacctgggtcagtattgaatggggctctgggacccaagaatgaataaaagacatggttccccatccgtgactgattaagggtggttttgttctttttgagacagtgtctcattctgtcgcccaggctgaagtgcagtgatgcaatcataggtcactgcaactttgaactcctgggctcaatcgaatctcccacctcagcctcccgagtagctggaaccacaggtgcgtgtcaccatgcctagctaatttagtaatttttttttttttttgtagagatcgggtcttgttacattgttagggctggggttttgttctttttgatagtgatgattcatatatataattctatgtaatcatatatttacccttttgcaagattatttttattaacatatgttaacacatgggcaaaacccaaatccttggtccatcacaagtcctaaattttattctggaaatgtagccttggcttgcatagaagcatgtgattttcctttagcctaccagagcccttggtggtttctctgtgggtaagaggggctggttgagtgtgcactccaagcaaaccagaaggtttgtcctgatgtcagagatgctgggacagagggggctgagtctaggcgagagggcgagggacccccaggccatgagtctcattcctggtgcaggatttttcttttcttggctgctgctctgtgccttgttctgtcttcttgcttcttggtgtggttacgggagcagggcagacataggaggtgggactgctcaaatccatctcttcttgcagatccagcttcacactttggtttagagactcctggggtttagagaggaatggggcctggggcccactcatccaaattgtcacgtggaggaggaacagatccctttgtaggggttaagagctcaaactgtgggctcgaatgcctgggctgaaatctggatctgccacttaggagatgtcacctctgagaccttcagtgtccccatctagagagtgggggaatagatagcactctatgaggaaagatgttttcaggatgacacaagaaagtacacagggcgtggttagcacagcgcctacaatctagtaaacactcaacgtcttgaagatggtggccacaatgataacaacacaacctccagccctgcagaagcccttcctgggccaaaaccagtcctcctgccatatccaatcctgtgattggaggatgctggctggtgagtagaaagtccttgctcaagttctgctggggtccacctctttggaccttctgactctgatcttagctcctggagtgccccggagcaaacctgtccaccctgtcccctgcaggacggtctgttagcctcaattagcagaaagcttacagactctgggaaaaggtgtgcctggctgtctgctgttgctgataagcagcctgataaagactctgtggtcaaaggttgctgggctgggctgagattcagtcccgcccttccagcccctcctttctgctttctattgcttccctctccccttggtaaatcactgaaagttttcagtaatggggcatggcgctctttgcgggcacccgtctggggctgtgtctgtgaaataggaggtaggggtggtgattggggtgattagggtctcagttcaggagaacaggaatgatctgtttacctctttgttaaacacctatgctgagagctctgtgaggcatctgtggctctcatgtccttggtacgtccagcagagtagatataatgccttgtaatttgcagctgaggaccccatggggcaccagtagcctcacttctgacttcacccagcattgcccaggacctgaagtgggtgtcaccaactgggagtcaccaggaagcaatcgaggaaatcccacagacatctatttagaaaacatcatttcatgatgtgcttttgagacgggcatgtgaaagaagagggtgttggccagattaaaagggaccctgagcttgaggttctgactgatcatggtttcaggaggtttttcccctcacataaccatttctatctcttccttagaaattagcacacttttgggtaccagttttgagttggagtggcatatttcttagaacactggacggcaagatacttctttaaaattggggagacttagggctaagtttcgcagtttgttggaaaggtcagtcctacgaggacttttctgttggggatgcacaggtagaaagcccgttttctgccccagagtcagcaggaagtgtgagtggtccaggaacaaaaacagacttggtggaatgcaactaatctccacttgggagacagagggacttgaggctggaaggcagtttgatttgtagcaagaaaacttggtacaaagaggttgtgaccctgtgtgaccccgagggagaatttggatttgtgctagatgaaagggccattacagtgaggaacttggccttcaatctgaaggcacatgaaaggctctgatgtgtctggtcatgtttgttcctgcaagaatttaaaacaaaggaagctgggaggcaaacaatgcttctgctttataattccagttccaaacctcagagggggagctgtaaagggtgaccctgtctacggcaccaccccgcgttccagtgtattggaagtggatggtctctgttttgcatgagaaagtgacctggtctccttccttgtcatgtttcagttgaaacagagttcctcaaaattggaaatgcacacacacatacacacagacttttgcccactttggaatagaaattaattgcactcggaaaataaattgcagagcatggctgagtacagacagccacatgtgaatgaattgtttgtccgcatagttttgggggcttcggaatcctggctcacccaccaaacctcccaagaatagacagacaggatgaggcatcagctctctttctcatctgccccacctcagagtcttaggagggccaagagctttgggagaccttggggacattcacaggcttggaagcactggcctcttcttcttttgtggcctcctcagggcagacttggtgggagctcttaataaacagtaactcaggaacagaacagtcagggaggcctggtccctggcccagtaattgaaaaaccagaaacagcttcatttcatatgcattgatgacaaaagtaccgacagacgcaaccaaaaacatgactggcccgctggtggacagtttcgccccacaacttggggagcgcaaattgctttgccgagagtcagaagcaactacatgagacagcagaggtccatgtaacttttctggatttttaggaatctgatttccatgggtctcttgcagggctgagaatagactggggtgagtgaggcactccctcatgtacaaactttcaggaggcaccagaaagtaggaaaaaacaagtaaaatgtaatgcactattttcagaaagccaaaatgagtgcaaaaaaaaattcataatcgaccaaatattgtttttagtaaaggcaggatccagccctgagcttgctccacttacctcacctgcctcaccctaatcccagccctggcatcttgcttgaggataaagcctgtgtctctaatagagactcagtagtttgaggtaagtgataaatctattggagctattactggaaaggggtcccgatccagaccccaagagagggttcttgcacctcgagcaagaaagaattcaaggcaagtccatagagtaaagcgaaagcaaatgtattagagaagtaaagaaacaaaagaatggctgctccatagagcagtggtatgggctgcttgattgagtatacttacagttatttttcgatcctatgctaaacaaggggtgggttattcatgaattcctggaactgaggttcccccttcctagaccatatagggtgacttcctgatgttgccatggcatttgtaaactgtcatggcgctggtgggagtgtcttttagtggctaatgcattataattagcatataatgagcagtgaggacaacagaaggtcacttgggttgccatcttggttttggtggattttggccatgttttttttttttttccacgtcctgttttattagtgggagtctttgtgagcaatgtcttgtgtggacctcccgtctcatccaatgagtaagaatgcctcaccttctggcaatgcagcctcattctacccagcccctattcaagatagagttgctctggttcgaacacctctgacagagctaccaaaagggcattacacaaggacacagacaattaggttaggtggaagatgagcgtatctttacggtcattgtgatggtaagcataagtcttgctcatgaagatcttttccatccttaacctggtatctcctgaaaattagcaagagtgtcttctcttgctttctttaaattattcaaagcatgtatcatggtgtcggcattttttttaatccctttgcacataaccccatccttatgaaaatacttgctccctgttttccctcttctctttccactgctgggaactattttgagccctgtctgtctgcagctttgcataaagttataatgaggctgggccaggcagccatggatttctcatgcctacattcggcctggaattcagaagggtcactgggggctggggagagaaactctagcctaactcgtttgatgcattttggttgtaccagatggagggaaactgctaatctgtaggattccatagacggcttaattccccaagttttggaggagtttgtttctctaattttttttttagccataagtcttgaaaatcctgcaccacataacaaaaaccagaggtatttttctgttgttctcctttcctttgaccccctggtgcttcctccaagtatccttaagtgtgcaggtgcctgtgttaggggaggaataggtctatggtccaatgagctgatgagatgataaatgctgcgactttgagattctttttaatctcagccttatggtaataggccatggaagagtgtaaacagtttgggctaaggctttctaaatacagttgatgagatcctgggaaccacttatcttgggtggagtggagcacctcactttgagtttggtgttagcgctggggcaaaggtctaaggccttctccagtgattgtgctatttaaggatgttcaagggatggtgagggcctttggaaacatctgagtggagtttggagccagagggaccctggagagacccagccagcccttttgtttctcagggccagaaggaaggtgcccacctttcctgtgaatgagtcatccttgggactagaagcctgggtcttccagcttagtaaagcctctgttttgctctggtaccttacccatctacgcagcctagtttgtccaccaaggtgctgatgtggcctgcaggagttattgccaagacataattcttccacttcaagtaatctagaggccacaagtaatctagaaggttttctaggaaaacccctcaaagaccagctgatgaaggacaaaataagtagagatccattgagtcagccaagaatgtcatatgtttgggacactgggtagggctgtgcagtgatggctcatttggaccctattcattcattcgtttaacaggtatttattattgagatattgggacttgattttgagccagacatggtgtcagctgccctggatggagaggtgaatggggcagacacaaccagtggctccggctggacaaggtcctgctgttgctgagccagggggttgtgcctgggccagacaccatctcttaaatgaaacgaaggaactggccctcattcttagatctgattggtaggggataatgctcagtattctttttgaaaatgtatgtgatactgttaaaattctcaaacagccaagtcctgggtaaatccaaaggttttttgagggggaaaggagggggatagagtaattttttaaaaaggcaacaattaacccacagcacattgctcactgcttttggtatttccaaatattctagaatcatgggctctttctgagggctgcgggagatggacttcccaccttgtggggtggtgggatgaacggtctgccttgggtcctcccaactttaagccgtgagaattttctgcagcagaaggaaagctatgaattgccggttcactgttctgatgtttaggaagcataagctttgtataatattctttagaaccagaaagcgcctgtgtgtgttctctgcttatataatgaggtcactgaggagctatgtttcctggcctattttctttcctggaagttggaagggcaccccatgggctgtctggcataaggcctggcccacagcagactttcataagcatttgatgagcgggcaaggaataagttcagtagaggacgaaacttctgaggtggtcaaatgagcgtccgggggtgggctctgagcctcctgggaaggaagggatggcatgcctgcctccacctgctgaaggacagacagtgggcagcgggcacacctgggggaaaggaggggcatagcctgcttccacctgtggaggacagacatttcacagtgcacacacttgggggaaaggactccagccagcttactgtgctgggtttgtcctgattctgaacatgcttttctgtgtgttgtcgcagtgaagaaaatttttccttgtcctcaacagctggggagactacaagccttcctcttatacccaagagtctgtggttgccatctcatgaaagtgaggtccaggatcagccagagttcactggtcacaagcaacagaaacctagtctagctggcaaagcacaggaggagtttattggaaggacacgggaaagctcacagactggaggcaagaagaagccctaggctctgaaaggagaggtgttaggacaggattgggggtctaggggtgcaccaaatggacaaggaggggcggggctgcttggcaaattgtagctccagagtgttttctgatctcgagttgcccctcttaggagtcttgggagagagtgggtcctattggcccagtttaggtctcctgaccagtcctcaggcagtggtaggtgaggcccatcaattgactgccccccagagacctcacacaatggaaggcggataattctccaaagagaaggtggcagactggatcctaggagacaaaaataaccaatgctggcctcgggctccagagaattccctgcttctcagtccttggagtgcaggtgctcctgttcctggtcctatccctcccctttgtctccatgtgttgtgcgtagcagtgtctgctggatgtttgctgaagcaaagggtcactttcatgggcctttgaatagtcagccacttccacaccagagattgcatatgtaggtgtgctggagggcattttgttttttctaagggtatttggattaatctttctatttcaccctgtcttagtcattagagccacgttctgactggttcagattacagatggtaaataaaggtgattgacattttcctccctgcccaggcagacatttctaagcttgggagagttgatgagtggtgccttctagggaatgtaataaagtctgaaattgagctgtagttagaaagcatgcgagggtctagaagttgtttctccagggaatggcaggaggtagtatccaatgactgctggtgcctggcagctgggggctgcctcctgactgtctgccagtgggaaacagttgtttctcctcctcttggccacaggacaagtcacagagccatgctttctgtacaatatgtcccctgggccaaaaggcaatattgcctctgctttcccagttcagaaggaaaaatgtgaaccgaggaagcagatcatcaacttgacatgtatcctaagtgtgacatgaacatgttctatttgttggggagacactcaagtcaccagctgggctttttaaatgaaaacaacacctctatttaaatgaaacaacgcctctatctgtaaagaggaaaatagtatcaggtactcattttgttcatgtgtcatctgacctatctgccttcgctttatggaataaaccactagactaggagttgtaaactcagatgctcctgagggccagacacataaaaaagatgagcgaagggggccaggtataaaactactgaaaatggtggggactggggcagaatggagggtttacgcccagtctctgagatcattacccggctgccatgctggaatatgaggttggtattagcacaacttccaattcttcaagaaaagctggaaatcgggatgtttatgtgaaatttccggatttaacaaaaaacactatggttcacgcctgtaatcccagcactttgggagggtgagggggtggatcacgaggtcaaacgactgagaccattctggccaacatggtgaaaccctgtctctactaaaaatacaaaaaaattagctgggtgtggtggtgtgtgcctgtagtcccagctgcttgggagggtgaggcacgagaatcgctcaaacccaggaggcggaggttgcagtgagccaagattgcgccactgcactccagcctggcgacagagtgagactctgtctcaaaacgaaaacaaaaacaaaacactgttgactgaaaaaagctgacaaaaatgccaatttgctgacctcagtactggattaaaagtgtatgtgtgcagggcagggccccgccccttgtctgtctttacataagttttacccggagtctagtccagcgcctgcatgttgaaaagcagttggcaaatatttgttgaatgctattcagttgtggggggtggaataaaaactgggttttcaatagggaatgacagtttgataagctttcctaagaatttagaatctggtcagtgggaatatctgtgtctcttctttaaacttcagatatacaggccagtctcctgatcagaaagatggagagtgttaattcattcatgaaaaggcaacacggaacttaaaaacagaatctttaaaacaaaagtcagctttccttatttaaaaacttcttgtagagagaaataaagcgttttcagtgtggtgttgcagatgaagaatgaatatgagagattggggaatttaatatttaataacacttatacatgatgtttgggaaaacgtgacaaataagaaacatttgataaaaaagactctgttgtcaccacaccaatcaaataatgaatgttctgaatacataagttgagtgataatttattggatgaacacacacaacaccagagattgcgtatgtaagtgtgctggagggcattttgttttttctaaggatatttggattaatcttctcacctgcttttcttttgcatggagctttgttttataactgagacatgaacagatggaagagctgcctacttgtataaaggattgtattctgaaaaccccgttgtattatagagcggtaggccccagccactgggcagggcatgctggtcaaaggttctccgccaatttcacttcacgttcatggtccaccgttaggtctttcctgttcactactcagtaaacagccagcgatgaagcaggccacaaatgaaatatgaatgctcatgagatatgagtacgttatcactactgaaatagaagtgctcatgagctggtaatctggcgtcagagctcggtgagaaggtggtgtcgaatgaggtgacctgtggccttgggctccttattacccttctttattgctaagtcaaacatctcaaatgccaagcttagtaggtgggacttttctgatacaactcacttgacctcccagaccagataaataacaatagtagctactgtttgcttatggcactttgctaagtattttccatgcagtatctcctttgctttgtccagccacacttttgtcgaccaggaagttgttgagagggtgaagtgatcatcatgtaacataagagcagtattaccaggtcatgtgtctctgtgtgtaccttgcacatacctgtacctactggccttttttcctttacctgttttcgtagtccaacagcatataactcctgaaggcatggacacatagggatgtgcctttctgtgtccctgtgacacttacattgataccacgtatatagtggatgctgaagaatgttggagattctttcagtgatttttgtggttattgaactctttagggtgaaaagaatcctgtctcgccagactagaatgatctcaccatgaattaccagttgctcaatcaataatctgttcgcctggccttgtgtgaggcccatggtgggtaaaaaagaagtaaaagacctgccctctcttttgaggatccagtaatctgcctttagacttgggtaagaaacactgcaactctgggccctgtgggttagaggactgcctctgacgccactctggccatgcctcccaccccactgtaagagtctgggactcaaagccatatgctccctcttcaagaccatgttccaggtattcaggggctggaattccctactcacgcatccccaagaccacttccagggcctgacacttggggatgagcagggctccaggtacatatctccaggcctgcagggtgacagctgcttacaggatgtagggtggaaggagcttggaggaagcagcctggggcatgcacggggagtgcttgaagccagcgctggtgtgggatggcgcaggatagcagagaaggtactgggcctccaccacatgtcgatacggagtggccaggagcccaggattctaaattaaaagctggacctgcaaggcagcatttggaagccacatttgtccagatacaggagataacactttttcgtttcagggcttatcagatcgattgaaacctttaaatgattagccctgtgggaggtgggcctccatcgcgaactctcattccagactctacaatgtcagcggcaggctctgctgggccgtcagcttccctcacctccgcacgggtcggtcagcagactgcacacccggaaggcccaggccttggtggaggggtttctgtgcctcaaggctgtagggcaggggagggggccgtgcctctctaaactgccagagcctgtttgcacaccagcactttaccgcgcttggcggccggggaagtgctaagcctgtcttcattaacaaataccatgttgccttgtttccttacttaaaacactttggagtgttttggctcaagttgaggggctctacatgtgcaaatgcataatcagctgacagcagtttcaaaattgcaggtctcactattgatggagaaatgggagcgttgttattccttgtgtgtaattttctccaagaaatggggggattgatttaatgtcaacactcagagatttaatgtggccctgttactggaaaaatacacctttgccaaactctgcctcaaaacaatgtctacattgtcttgctgcactccctacccccatttcccattcctgagaaaaaacgggcttgaaggagggttcagctcaatacagggctggatcctgccctctgtctccgtttcctgagcacagatggctcatcagcggggcctgtctctgcctggagggatcccaccacctctgtttctgaggaacttgggtgggagggagttagtggggagaacaagagtcaacgaacagggtggggtcagttttaggctcttgtgttcaacccagcagggaggcgggggcgggggactccctccaagccttaggtcactatggggcttcctggcccaatttgccctcactgtcgcaaaaaggctttatggtgtgtgtttcaaatgaaaagaaattcaatttgattttattttgaaaatgcagcgaggggctgggcatggtggctcacacctgtaatccagcactttgggaggccgaggcaggcggatcacaaggtcaagagatggagaccatcctggctaacacagtgaaaccctgtctctactaaaaatacaaataataacaataataataattagccgggcgtggtggcacatgcctgtagtcccagctacttgggaggctaaggcaggagaattgcttgaatcggggaggcagaggttgcagtgagccgagatcgtgccattgcactccagcctgggcgacaagagcgagactctgtctcaaaaaaaaaaaaaaaagaaaaaaaagaaaaaaagaaaagaaaagaaaaaagaaaatgcagaggggatgtcaggactccctttgaagtggataattggtactactcagtggggttcatggaaaccaaggtggttcatctctggggactagcaagaaaaccaatgtttattggaaaagtggctttggccacatgtttcttctagctattagtaatttgttcctcaaatcaagctagtaagttaaggatctgctttcaacttcttcccgctgaactgcctggcaggcaccccctttttctctggcaagtgatgatttggatgtgcacactcactagaaccagcttccacgggttttgctctgaaccacaccatcacactcctcctgccaacgccaaccataaacgaaattggtcaatggtttcaagccttcttcatcacgcggctcttctgaggctggttccactttcagctgcatggccaggccctcacccgcctctcagaggtcacggagtgttccttctgatgtttgtctctttgaggaagcaactttcaaaggccgggatgcatctctaatgactgtaattgcatttcccatcttctcattagcacaaactgctgtgcacatggaagaaattcagtcagaaacctcaggtctggcctcaggctgcggggtaggcaggtgatctgatcagggcgaagacccagaccagcacgtaggttgccccacatgcccttggcacaggaagaaaagcctctggaacaggtgctatggttgtctttaattctttctcggctttccatggaatgaggaggaggcccagatggtacttccagagccgaggagcagaacccggcccggaggagctaggccggccgtggtttggtcttgaagagaatgaaagcccacccatgttcacagatcgcagagccccagggcgttcaggccacacctgcagctggtgccttgggtgaggctaaggggctcacaagtgcaggcacacatgcccagacgcctgctgggctccaagagtgctggctgctgcccagctacccagaccctccatgtccttccatgccctcagccccaactctcttcctgggggttgtggagggcagggggtgcacagttcactccagaaccttcctaagacccagagctgtagtggggagggttgtgaacaccagtttctgagaccttttcagccaggcggtggttctcgctccacacccttgggggcccctgagcagggaggcctgggtgtgctcacctaacattaccctgtgctttgcagacagacggtgccctatggactgtccaactacagaggaagcttccggggcaagaggtctgcggggccacttccagggaatctgcagctctcacatcggccacacttgcgctgcgcttgtgtggggagatatgacaaggcctgcctgcacttttgcacccaaactctggacgtcagcaggtatgacacctcctccagtttcactcatttgcagatatgcatcaaccctcggcaaggccaggccaggggcttctcaaaggagggtgtaggatagttcagtcacatcctgacctactgtcgtcctgtgggccagagaaaggaggtgctgagcccagaaaagacccaggtcctcagcatcaggagggcaggagatgcagcgtccccacccccttgctgccttttggaacagaagcttcacagtggccgtggctacatctggtttccagacatatgtttttctggcctgcacagcactttgtgaaaatctgaataagttgccaacacttaaaagattgaagaattaacccctgccaaatgcgtatttttagccttctcgaaaatagcccatgataagagtgcaaaaggcttattgggaggggggggaacccagcacgtaggaccatctggtctcagagccccccttctctttggccaccctcagctggaactgagtgggggcatctcacgtttgagtaggatgtgcaatatccatttacctgttaccaatttatcttactttgtagcccctggaggcccccaagtttgagaccctgtggtctgtcctggctgccttagggaagcttgcaaatcacgttgaatggaaccaacaggcagactccatgtttgacccaggggctttgagctggtattcacataacaggtattcctgttaatgctccttactccatctttttcttaacttcgggccaagattcatgaacccagtgaggcagattggccctttcaaaacccttcctggagcaggcgtaggtgagctgccctgatgcacacaaaagacacataggcaggggtgagctcccaacaccccaacaaggcagacggtagcgctcaggaccccaggatctgccgtctgtgaaacccagtgtgaactgcatggtttttccccccttctgggcttttaaacatccgatgaataagtgagtggtgagtatattctgtactttggtagaaatccacccaccgagtgctcagccttcagaaactgtgcctgagacgcagtccttggggaacgcactaatgtgctcattggtggggaagaggaagtcataatttgacaccgaaaaaccagccacagggaaaggcaggttgattgattaaaaccagctctctccccacagtaattcaaggacggcagaaaaaacagacaaagaagaggaagggaaggtgagaggtgccaacagaggcctgtgtcaaaggaggtgaagatgtgacgtgtcattccttcgggggtgggtggagggtgttttgaggggatggcatctggtctggtccagtgggaaccccagatctcatgggatgctgcacccacaagcaatggtgcctttggtggaccgtttctgggggcagagcgggctgaagctgtggacagctgctgtcacttgtcggtccctggccaccctgctctgtgtcctgggagccagcccttgcatcccttgtagctctgggcagtgatgtcctgcctggatttcacctggcctggacaaagctagtcaaccaccgctctcagaggccctgtaggctgctctgcccagacccacacttcgcctctgcttccttagcaacatgtggtctttctcgtcaaaaaaatcatttattcttttcagcagctgattctgggcagaggtgaattacagcagcttgacagcagggtcccttggttctccagttcattgtattattttttttaacccacttgtcttttttgtatgagagatcctgagggtttcctgcagtcaaactgggtttatttgtcattctatcaatcagaagtcattattaatgactccgcagctcatctgcaatgggatggtaatttatgttcataataatagcctggaggtggcttgggtttctacagagactgatcgagggaagatgaaaccatgctcagtatacaggagctttccaaattggtggcagatcgcttctagtctagtccagagagggatctgtcagcaaccataataaaaatggagcgggaggaggagggccgaggcggaagagacagagcccgggagagcatgagtcagacccagatggtcccactttgcctcttcattctttttcctctttttctcttcctcaccccaaaccaaagctcctctcagcgagggcgggatgtaattaaacccatccatccattgcatcatttattcattcgcttatgcattcgttcagcaaagacttgttgggcacctgctacgggctgggcaccattctcgatgctggggacatagcaggaacaaggcataggatctcttttatagagcttaactagtggggatgcagacagcaaacatgtacaatttaaagtgagattgcaaagaataacagaaagacacggcaagggtaggaagcgtggggtggttgcagtttgagatggggttgacgtggcctcatctttctcaccaggtgacctgaaggaaggctgggaggagccatagggatgagtgagggaaagggatttcaggtaggggaaccggtgagtgcaaacgccctagagtgtgctcagggaacggccagaagggagccctatataggagaagcacaccggtccttttgctgttgtggtgattattactgttctatgtcacatgttcaaaagatgcaattggtggtgcagatgtcccagcagggcctggaaaagtggttcttccaggtctctatgagtcatgtaaagctctagtaagaagctttacttgggaagaaaaagtctcttattaagccaatgttcttgctttcttgcaagattcaagttagtaattcccagattcacattctcagagtggaagctgtcaccatccttagcttgtggtaatcaaagatggggccaggctgcgggagggcccctagcagccttgtctgctggtgttattcttttcacacttttccagtctggtggtaggctcggaaattgctgagaagcactgggaagagggtacatacagttccaatcagggaacaggctggagaggcagtgggaagacgttccctttttcagcttcacagaactacagagctacactttcataacatacctttctttttttttcttttgccccctttccccaagacaggttgaagtcaaggaccaacaaagcaagcaggctttagacctccaccatccaaagctcatgcccggcagtggactcgccctcgctccatctacctgcccccgctgcctctttcaggaaggagccccttaggaggacaggcctgcagcatcctggtctcgggaggcttctgtcattgctcacacacagttcagatttccacctctttatagacaagaagtgaatttgcctggggcagaacacccacccaaagagtccccacttaacaataccccccccccacggcaagaatgcccaaatccgaatgaccccagttttcctaatgagtaaaatgatcccagatgtgccccagagcatgacgcctgcagctccggtttcatgcaggaaattggttttggagagttttggcaagttggaaagccacttactggcttttgacatgacttctcttggagaataagtggactccaagctaactctttgcaaatgtaaacacatgtccatcttgtaataaatgcaaaatgcccgtgcagcagaagcatgcgactttcatatccttgcctagaataggctgcatggtgtatgtcagtgagggccacgaggcgtcggctttagacacagatcatagctctacaggagtttatgaatttgaagcttatgggattttggcagagaaattttcagctgtgcttgatacccaccaaaagaatgtatctcgaaagaatgaaggaagaagaaaaaaggatccttgatgtttgtgacaagaaaatgagaaagttagtatctgcaatacagagcttgttcctgttcagtgactgaccctctgtattctgtatagacaccaggccgatacacagtggagttcccaggccttgtttgcaggaagccgactgtaaagacagccccagctcaaggctattaggttgaatatttgctttcatgagtaaatgtggatctttggggaatggcttcaaaataagtcacgaacacaaattctttgtaaattatgtaaattcctgtttatataaattggcaacaacttataccgtctgacagttcaaaatctctttcagctgcgctcttcccaccgagccgagcttactgtgagtgtggagatgttatcccaccatgtaaagtcgcctgcgcaggggagggctgcccatctccccaacccagtcacagagagataggaaacggcatttgagtgggtgtccagggccccgtagagagacatttaagatggtgtatgacagagcattggccttgaccaaatgttaaatcctctgtgtgtatttcataagttattacaggtataaaagtgatgacctatcatgaggaaatgaaagtggctgatttgctggtaggattttgtacagtttagagaagcgattatttattgtgaaactgttctccactccaactcctttatgtggatctgttcaaagtagtcactgtatatacgtatagagaggtagataggtaggtagattttaaattgcattctgaatacaaactcatactccttagagcttgaattacatttttaaaatgcatatgtgctgtttggcaccgtggcaagatggtatcagagagaaacccatcaattgctcaaatactcagaaagtactgtcaaaagcctaataaaaaacctaaagtttgctctg

SEQ ID NO: 42 - DNA, 8879 bp, Homo sapiens
ggggagggcaggcaattgactaagaacaggcagataaaactttctggagtgaaggaaatggtggtcttcttttcgttggtacttacatggacatatataactgtcaaggttcattgacaatgaacacttaagtgtacactgaacgcttaagatctgggccttgtaatgcccagattacatctacttaaaaaaactacatctctatttttttaagtagagaaaagtgtcttggggagtttatggcagtgatgtttgggcagactggggcataggtttcagaagcattcatagcatcttcagttcaacaatttgctaagaatggttttgcagccaaaaatgtaagatgagtgcaaatatctatgattagagtcattgggcatacaactacaaatccccacacttgtattacaggccatatgattaattcgttatcactagatacctttccttcaatgaggttcttccattaggaacccagagctctccagggaaaaattgcaattgaggttttggatatattgggtggaaaagaaagtcacctcacataaaacttagtgattggagctgtcaccattgaaaatttctaaactttgcaagacagcagtgacgtttcaaatgacactctcagagagttgataatgggctaaaatagatctccctccaggtggatttactgtacaaggacaacatttacattgcacttggagacttctcccagtttggtttaagttcacagattgcagatcccagacagctggtatcaactgaccagtgttctgttaaggctaaagccaagactctttatcacactgtggccttaagattggatttctcttcctgttcctgggaagaattagagatataacctaaaggtcactattattctgagaaaagggattctggaggaggagggagcaatgagtatgtggcaggagttcaaggtaataagggctgagacacaagccacagagcataaagctccagtccttcctccagggatgaggcagtaaggacttggactcctctgtccagcttttaacaatctaagttacggttagagctttctccttttctttcaactactcctggcagttgtggggtcatggaatttttgtaaaaaatggggtggaggaaaataaggcatctgctgagtgtataaccattttacctcttgtttttagccctcttctgggtcacgctagaatcagatctgctctccagcatcttctgtttcctggcaagtgtttcctgctactttggattggccacgatgggctggagctgccttgtgacaggagcaggagggcttctgggtcagaggatcgtccgcctgttggtggaagagaaggaactgaaggagatcagggccttggacaaggccttcagaccagaattgagagaggaattttctagtaagtaaacttgagtcatgggtctgtggctccatcttaaactctgcatgggtgtggggaggttgaccttgtctagcaagttaaggaaagttgtagccaaatgaaagccagtcacacatctaaagtcatcagaaaggaaatagaataaaatggtatagtgtgaaagatactggatggggtgtccagagactggattctggccctgacgcagaacttgagaggcagccatgtcagcctcaaggccccttttcttctcttctagagagtcacacatgagttctccttcttgtctacaactcttatgttctgaagctttttgtcttggcgattgctgtgcgacattcacaaaggacatcatttacctggagacctcaccagtgggtcctgcctgtctagactgccccaggcttcatttcattttatagcttccttagtatctttagtgagggcaaaataaaaggaagtgaaggtacggatgtgtgtgtaattgtgtgtgtgtgtcagacagagaaagaaaatgagggggaaagaaggtcagagacagagaatgagaaagacagagaatgaatgagaaagatagtgtgagggagagcatcagcaagagagagagagtgaaagtgagagagatcatcagtgagagagagagaaagagagaaagagagcatgcacaagtgcacggcacagagcagagacagagtaaaaggcagtatgaggccaacatgcctcatttatatttctcatatatagcctttttaaaaaaaaaccatttgtatctgttgttcaatactccaaataaattgactgcagaatttgctgtagtaactctttgtgcaaataaccctgtgaggaaggtagaaaaggggtcacctccaactggacaatgaacccatcaagttccagaaacataaagttacttgccaagaacagctgattaatgtgtagcagagctcagaccagagcttcattccagaagcttcatcacttgacccccgggctaatccttggtgggtcttcagtctctccctttgcctctctgtgtgccccaaaccaattccatgttttcctcccaacccaggggactgggggaactatgtatcttcttcatgcaggttctggctgcctagaaggtcctgccctgttcacacagaagctccccttgacactctcctcttctttcactcttctctgacctctttaaatgtccaatttcctccactctctgttctaatagtgaacagatattaacacatgactgatattaaatgtttgtaatccttatgtctcagcaatatttacaatctaacatctgataccaggaaaaagcaatgctcagtctagaggaagagttctgctatggtgaaaatgcagggagcataatggatgggcagggcctgtatgaagataaaaacagagaatcctttcagtgttctttctgtgccaggcactgtgctaaaggttttgcatgtgctgactcatttacttcccataacaaccctatgagatgggtaatactattatcctccttttttatagatgaggagacagacacagagaggttaatcaacttgtcgaaggtcccaagttagattacggcaaagctggatttgaatccaggcagtctagtgcagcttctgtgctcttaagtagtagtttgtctagcagcttctctgagcctccctccagcccaacacacaacacaaaagcaactgaatttagtctacatgaaacacttgccaagtccacagtgccttggagaaggagggagctaagactccatcaaaaattgcgcttttctggtctctctagatccatggaaactcaccggggaagagtcattttctatcggctttggacttctgctatgaaatggcaattcctttgagccagtctgtctaaagtcggcagcaaaggagaagcagatgaagggagtagaaaaggtagaggtggaaatacaaccagagaaaattccactctcgggctgacacccacctcctccccagcagcctcttccctgcctccaccattccagggccttcttggagttgcctgacagtgggaaggggctgggagtagacaaaacaaggcagaggcatcagaagagcaaatggtcccacctgtatcccaggaaggaatttctccagccttgaatttttcattctgaatttcgctctcactgttctttggcctttgtgggcattttcagttaaactggcttattcttactctttctcagaaaagttgattctaaacagctattcctgcacctggggtacagggtacaaaaatggcaggtggaatgggcaggtttgagccttcactagaaaattgactttagatctgtcccttaacctctctgagcctcagtttcctcaccaataaagtgggactcagaatacctacctcacgagatagctgtaaaaggaaataagcaagctgtgagccgtatgcagattataaagcacaaatgagtgtagagtatttatctgagctccatgtagcatggtgttcattttgtgggctaattccaggtgacaactttaccggcagcgtcactacctgtggatttcagaggagcctgaagatatggatgttacatccgctgcccttggctagacattagacagctgagatgttagttcattggtggctaactcattttcagcattgctatctgctttttatgatatctgataaaagtttctcaatgaaattaatcatttaagcccatctgcaattcctgagtaatggctccactctcctcccagttgcccaagcaggaaactgtaagggtgattttgtctccttttcctctcatcccagctccagtaggtaccaggaccttcaaggtgaggtctgaaattcaaacctggagtgcatctctcccctcctctgcttccactgctggaccctggttccagtcctcatctaaactttggcacagacattctgattaatctcttgatcacctggctttctcatttcccctataccagtctgttttatatcctcaagccaaggtaaacttcctacgccacaactctgcgtctgtttatcttttattattattactattattattattattattattattattattattattttgagacagggtctttctctgccactgaggctagcatgcagtggcatgatctcaattcactgcaacctccacctcccagactccatccttcctcctgcttcaggtttgtgattagctgggactataggcacataccatcacgcccagctaatttttgtaattttagtaaagacagggttttgccatgttttccagccagacctccacctccagaaatcaagtgattcaccacctcagagtcccaaagagctggaattacaggaatgagccactgcacccggcctgtttctctacttattccaacataaataagggtttttctttgacatggtgctggagacccaaaatcataattctatacatgattcctcatcgcctacagaattaaattcaaactttccctcttatacccaactctccacaatcactctattctccataaaaaatttggtgagtctcccatgactctagcaatgcttatatttcacggatgtgtgacaattcactgctcacattacttttctggaataagatggggtagaaacagatgtttgctctttcccaataaactgctacacatgctgatttctgtgcttttgtttacttgttccttttatggaatgtagtacaccctccactctaatacccacactctaatctctttgagcacctatgtaacatcgcctttatcagaaaacttcccagccagatccagaaatctttccaatgacctgacctgtgttcacacagagctccagaacaggaccaagctgactgtacttgaaggagacattctggatgagccattcctgaaaagagcctgccaggacgtctcggtcgtcatccacaccgcctgtatcattgatgtctttggtgtcactcacagagagtccatcatgaatgtcaatgtgaaaggtacagtagcctggggaggagataaaacaagttggttaaatgaggatcagaaagaaggacaagaaagggaagagaagtcactccattgaacacctgctgagctcttggccaagtgcctttgctgatcactactgactggggagttcaaggctggtaacctcagttttttagatgagaaaactagggctgagagacagcaagtaacttgtccaaggccccaaaagtaagtaagtaagtaggagagttagactttaaactcactcctgtgtgactccaaaggctgtggaagctctttctactgtggccccaatcaaaagtcaactaaactccaacttcaaattcacgatatccagctactccttggctccccgggccagaatcagaccttccaggtgccaccatagtcatcattttgaaccttgtgtgtaggctgatgagaacattcagagtcttcctgcccacctcaaagaagtcctctcaagagaactagcaaagctggttcacagaggtctgtcaggacagaattatccagcacatgccttcccataatattttcttaacaaaaagagtttcccagtgtccagaatacaatctcttcagctcaccacagggtctactattacagagccatttcctgccaggtgcccaaagtgcaccctcatttgatccacattttttaaaggaatcttgccatgcagtctcaccctctgattcccagagcccagtctcttcaaaacacagctccccactgctggcctgaccctccacattcagactacccaaactccttttataaagcaactaattgcttttgagtctccagcactgtctaaaaaaacaaacaaaaaaaaaacctttccagtttctacatagccatacccctaagtaccgctatagttcaaggagtgtgctaagagtgaatagttttttgttttaattttgactttccacagctcccaaaaacaagggataagaaatgacaaggggagtgttagaggcgtctgtttcttaaaaccattatcactcccgggcttagaaaatacttcacaatgatggccatttcatgaggctgtctctccagaaactcaaattgcacagagactttaaaagtggctaagaatacaaaataagtaaataaaaatgatcctttgcctaggaaattccttccttcttcaagggaagacactccagatacctccatgagctttgcttccacacagctcaggtgatgctgacaggtcttcccagtgcaggtgttatcagcagagggcacactccctccccagtcctccaccaggctccacaggaaatgccagggcaggatttaaaggaaggtttatcacccccactttatataactgggtaacagagtcatagccagaattggaagcagcttttccagggaacacacaatcaggaaaggagtgtgggtttccagcatctccccacaacccactgtttgctcgatgactccagggatggtctttgtgacaaagttttattaatccattgcaaaatgagaaaaataccagcaattctatgtatatctaagagtgtatattgcctatattcaactgtgaatttgtgtgtgtaacacaaattcttccactgccctttcttgcctaaggactgattgggactgttcatattctcagagtatagcctcctgattttttagattttaaatgatctgtctttaattgtattgatgacaaatcatactttttcaatatccttacttggcaaaaaataaagtgattaccctaggtccttttccaaaattaaagtgtgtgtgtatatatatatatgtatatatatatgtatatatatatatgtatatatatgtatatatatatatgtatatatatatgtatatatatatgtatatatatatgtatatatatattttataatatatatatatatatacacacacgtatacatacacacacacacacacacaccacacacaaacataggtccatgaaacccaaaagtctagaaattcttgctttctagaacccaaatgtcagtttctttttatttttgtgtttttcctacggctgtatcatgacccaatctcagtcagagccacagaagaatgcaccctgagtctgttataaccactgcacttgggagtggggagtggggcacatggatctgtgcatgtggttgcagctcctttgggatatttcctgacactgtcatcatgctcttcgtgggcaggtacccagctactgttggaggcctgtgtccaagccagtgtgccagtcttcatctacaccagtagcatagaggtagccgggcccaactcctacaaggaaatcatccagaacggccacgaagaagagcctctggaaaacacatggcccactccatacccgtacagcaaaaagcttgctgagaaggctgtgctggcggctaatgggtggaatctaaaaaatggtgataccttgtacacttgtgcgttaagacccacatatatctatggggaaggaggcccattcctttctgccagtataaatgaggccctgaacaacaatgggatcctgtcaagtgttggaaagttctctacagtcaacccagtctatgttggcaacgtggcctgggcccacattctggccttgagggctctgcgggaccccaagaaggccccaagtgtccgaggtcaattctattacatctcagatgacacgcctcaccaaagctatgataaccttaattacatcctgagcaaagagtttggcctccgccttgattccagatggagccttcctttaaccctgatgtactggattggcttcctgctggaagtagtgagcttcctactcagcccaatttactcctatcaaccccccttcaaccgccacacagtcacattatcaaatagtgtgttcaccttctcttacaagaaggctcagcgagatctggcgtataagccactctacagctgggaggaagccaagcagaaaaccgtggagtgggttggttcccttgtggaccggcacaaggagaccctgaagtccaagactcagtgatttaaggatgacagagatgtgcatgtgggtattgttaggaaatgtcatcaaactccacccacctggcttcatacagaaggcaacaggggcacaagcccaggtcctgctgcctctctttcacacaatgcccaacttactgtcttcttcatgtcatcaaaatctgcacagtcactggcccaaccagaactttctgtcctaatcatacaccagaagacaaacaatatgatttgctgttaccaaatctcagtggctgattctgaacaattgtggtctctcttaacttgaggttctcttttgactaatagagctccatttcccctcttaaatgagaaagcatttcttttctctttaatctcctattccttcacacagttcaacataaagagcaataaatgttttaatgcttaa

SEQ ID NO: 43 - DNA, 38719 bp, Homo sapiens
tgaatgttgctgggagccataggactcttatttagggtaagagggtagcaagagaggagaaggaaattcagaacagaatcttaggaaatgccaaagaaagagttagaggagaaattggcaaaaaggatgaggtgaaaaacaagtgtgttaaaaatttttttttagcatttcaagaagagaagattttagcccggcatgatggctgaggcctctaatcccagctactcaggaggttaaagcaggaggatcacttcaggccaggagtttgagaccagcccgggcaacacagcaataccccatctctaaaattaactaattagttaaataatttttaaaataaaaagaggagttcatgaaagtgtagtcagcaatgccaaatgcttttaagtaagatgagagttgaaagtattcattgtgtttagcaacatagggtttattgctcttaggaagagctgtggtgggggcagaaattggaatgcagatatggcctgtggctgggagttgggtgagtgttcctaatgagggcctttatcataccaggagttaacctatacaccacacttctgcagcccatgacagattccatggagtcatccagccaaaaaacaccaccactaaactctcatctaaacaggttggtgaaatgtcaaggagataacccttgagaagattctttttttttttaagtacacgtgagcatctgctgtgcaatctctgcaaaccaatgaaattacgtacacacaagtgcattaaaccacccactggtggtttaatctcacaaggaacttgaggaagcaatcttcatcatcacttctgctgatcaaagtctcaaaggtcaagaccacattgcagtcttttcattgttgtaaaagttaatgagagttaattattaaagctgacagaaaggtaatttgtccactgtcttacatagcctatatatagacatccctatgcatatggatgcacacagagcctgtagacctgagtggatggacactgcctcttagaactagaacttagaactttatcttgaaaatgtaccactgttgcagaagctcctcacagagtatgtgtcaggtaggaaccaaatttatgattgttatattcaaactggttttctgttccttgaaaatggtattttttctgatcaaagcctatttaggagttattatgttcttgagtttattccatgtgtgtgaatattttgaatgaatccactaataagatatgcatgtatgtctggagcgctagcaatgtagaataaatatttaagtagactttaacaagtaaatggttgtaggcatcattaagtcttaaatagccttttcaaagatattagtgttcttgttttaattattcagataattcctttaattctccactcaaatctgactttatagatagattgtctgctctgagggttggcaaaaaaaaaaaaaaaaaaagcaagctttaaggaaagagtttctccaggagagagaatcacctactagaaaggattcagaaaggccatctggtcccagccaggcatagggatatgtatctatagtcctagctactcaagaggctaaagcaggaggatagcttagcccaagagtttgaggtcagcctaggcaacatggcaagaccttgtctcttaaaaaaaaagggagggggtaggggacatatggtctagaagtgagagatttatctgctagacatcctagaaagtccaagactaagggaaacacggagagaagaaaaggcaatgagagtaagaaggatagagactggaaagagaagagagatggggagaaaatggtcactggaaagtagcagaatgccctatgccacaagtagtataatataatataatacattagtaatgtatgggtacttatcccatacattactaactctatcaagataaaatctattttattctttaaaatgtcaggaaaagattatacaactttctttatatatgcaagtgaggaacaatttatcaaattattggactaaataattctcttttctgaagtaagttagtcatttggaaaaactgtgtcatgaaatttgactgcataaagatcattcctttttttttttttttttctgagacggattctcactctgtcgcccaggctggagtgcagtggcacaatctctgctcactgcaacctctgcctcccaggttcaagtgattatcctgcctcagccccccaagtagctgatactacaggcacgctccactgtgcctggcatttttttttttttttttttgtattttcagtagagacggggtttcgccatgttggccaggctggtctcgaactcctgacctcaggtgatcctcccacctcagtctcccaaagtgctaggattacaggcatgtgccaccccatccggccaaggattattcctaatgaaaatttaggaagcaactaatttgatttcagaaacaagaaaaatggggtaacacaatacatactttgccttctccctctggataagggaataagtaagtatataaagaaatgaacaaatgtttaatacctcctaaacagctcatattcgactaagaaacaaaatcgttcagaaaatgagaatgaatatttttcaattacaagaataaatatgtaataacacagtctggtgcttctctacaataaaggtctttgattctccaaagagaagagaagaggctcctctagcctctgtgtcactttgttgagaagcaaggggaagaataaagcaagtcacctcaaggagatttgtccccaggccaccaggctcatgttttgtgttgtggatattgagtgtaggagtgtgaggctttcatgctcaaaagcaaggaccctgatggtgcctcaccttgttcttttaccttgtctctcttgggggtaggggctgagacccctgacattgaatatgtagcagagaagaagacgtagtggagagagtcagttattcactagatgtggcttctcatcctggctctgggaagttgagaaagtcatttatcttctctcatctccatttcttcatctgtaaattagcgacaatacagcctatcttgtctgcctccatccacagtaatactcaaggaagaaaagtgaaagtgctcagaaaatctcaaagccttacagaaatggccagggattctcttttgcctgctgtgagcctactgggtgtgaaatcccttgctatggtgcatcccaacatttctctaatggtttagcctatgggccaacaaagccttctgtttcagtgtttggaactctcaataacctttcacatgatttgcttattgcccactgctttgtcatcacccctgccaaacctatctgttctttaaagtctaacacaagactcacagttccttcacaaaaccttcctaactccaacccacatttacatcccttcttccaatttattatctgcaccaattattttgggcacttctcctgtgtatgtaaactttggagtttaggtctacgtcatttatatatcttttgctcatagttcagtttatttcaacaaactttcttgtatacttactatgtcataggacctaacaaaagagggaaaaatggttaagatttgggccttgcccttgggaaactcagtcttaaagggaacagaaacataaacaaataatgtatgacatggaatagacatatatacaaggtacttacaagaaggaaatgatcaactctatctagggattccatgaaggctttacatcattttcttatcttctacaactgtgttaggaactgagttcctgacaaataataggctgatacatgtttgttgaaggaatgaagaaatgaatcaatggtcagctgagttgtgttttgtttgtttgtttgttttagagacagggtttctttatattggccaggctggtcttgaactcctggcctcaagcaatctccccacttcagtctcccaacgtgccaaaattacaggcatgagccactgcacccagctgtgctgagtatttttaagaatgaattggaatctaccaggtattggagaagaagaacacaaaggaaatcatgtgtacagagatacggaactgttaaatatcatagcgtgttaggaacctgctgcaattgtgaaggaggagtgaagaagcttgtgagatagaccagagccaaaacatgaaggaccttgtatgtcattctaggaagctcggatagctagattattttaaaactatgttaaaacaaactgggataaaaatggaaaactgctacttctaaagataagctcagagtaaacataaagtcatagaaaagttggcagcactaacattttccaacaggttccagctgacttttgtggaccagttgtaaattccaccaacagtcaatatttaactcacttctgagactgctacctatgaacttaaggctaagaagtctccctttgtataccctgctttcagttttaagaacagccctagaaggaaaataatggtctcctccttttgctttaaggaaattgaagccttgggccgggtgctcacgcctgtaatcccagcattttgggaggccaaggcaggcagaccacttgaggccaggagttcgagaccagcctggccaacatggcgaaactccatctctactaaaaatataaaaacttagctgggcatggtaacgggtgcctgtagtcccagctactcgggaggctgaagcaagagaatcacttgaacccagaaggtggagtttgcagtgaaatgaaatcgcgccactgcactccagcctccaccctgggcgacagagcaagactctgtctcaaaaaaagaaaagaaaagaaaagaaaattgatggcttgaatcactggcttatagcaaacatagttaagatatggcaaggcaaggatttgaaacctggtgtgcttagttgccaaagtctcactcttttctgttgtacctcccgattaatttaggtttgacttccttcttcagcatcttcggcaatgtagtaatagaattgatgaaaaatagtagtaacaattattgcccacctcagcctttgaccccttctgagctctcttaatcaacctcagtgctgagacccctcccctccattcaccactccagccctctcccattctgatgccatcatctccctgcttctatccagcctcacgctaaccagaatgtggagctttttgtgagcttgatttctgattcctctggctgccgatggagatccctctgaaggtgctcactggagcaattattctgcttgttcccccatctctcacccactcccccaagtatagttatcaggacgctgctgtatttcccattgtccaaggactaattcatgaaatagggctggcttacctctggttttgcactgactggctcagagatattttgagatccatgaggtgagttgtgttttcagcagatttcaggcacagtgtggcattttcagtgatgtctctatcgaaggccttcctcagcttgaacagctatgaaggggtgatgctgctaggagctgccttgtccaagagtggaggcatctaatgtgactgcggaggggctgggaagtgttctgcacccttgcttgtctgctggtttcaaatgaccgctaattaaagacaaatcctagcaccgctcatcagcatcttggttcaaattagttgtttcccagcaaaaagggcagacctctgaaagactaaaacacagaatagataaacactgagtggaaaggtcagggccaaaagacacttctcagcagagcggggcaggcagagtggaggttctcgtaactggaggccagtctgcaggttggaaatgggtggaacttgaagtggtggggaggtatgtacatgacaatccctagaaatatcaaaaagttattaatacatgggaatagttaaactgagaaactgaacttcagaaattaatcccaggattaaatttctgctcaaaaagaaaaaaaaaaagcagagaacaacaacgtgtatgactaagccacagcaccaagatatgtaggtatatgaatgtcttcatgtgtgtgtctatgtatgtaatatatatatcataaaggccaaaaaaataataaaaagcacgtcgtagggaagcaaataaaagtggaaatatatacaaacaaggcttgggattctataattagtaagaggaagggactctgtgaatgaatttcaatccccaaatccactgacaccctaaggaactcagagatccatgaagatagaacatgaaaaggcttttacattaatatgggcgtaatatttgaaattggaattgtgattccaggaaccagaaaaaagtgttttccaagaatttctggcaaaaatgtaacttgttcaggtgaaaaaagagtttaaacaatctctttttaattcctaattaaagatgagccgagatctcgccactacactccagcctgggcgacagagcaagactccgtctcaaaaaaaaaaggtcctgctcaagaatctcagaaatgatgacatggagaatgtcattaatttatgactatctggaacatctcttcagcagaggcaccattggggtagttgattcagaggcccacattgtatgttacacatggaggcatagcttttggaagcggggatgggtgcaaggggaaaacagaaaggctggaatgtggccctcaagatttctctctaaagtctggaaagatttcttttcttttctttattttttgagacggagtctcgctctgtcacccaggctggagtgcaggggcatgatctcagctcactgcaacctctgcctcccgggttcaagcaattctcctgtctcagcctcccgagtaactcagattacaggtgcccgccaccacgcctggctaatttttgtatttttagtagagacaagttttcactgtgttggccaggttggtcttgaacccctgacctcaagtgatcctcctgcttcagcctcccaaagtgctgggattacaggcgtaagccaccgcgcctggccggaaagatttcttaagctcccctgattcctaccctgagcagggcccttgcaggcagtgcttgggtatgaggaggaggcttttactggcaggacagccagagttcaggctcttgatccagctggaggtataagaaagcccactaaagagacagccatagccatcctcagagaaggaaactgattagaaatgaagttatatttctcccatcactgtcatcggcaaaaaaaattaaaataaaaaaaatacaacagccagaagaataaaagtaccttcaagatcttttttggggaagacaactaataaatttctgtgaactccttgaggaaagcatgagtaaagcaagcaaagagcagaatcttttttttttttcctggccatagcagcatctgacagaagtacaaatgcacagtgctgaagtcttcttcatcctaaggttggctaggttggttccttcaaaggattaaagctgttcttataagatattccagataccctttgtgagaaatccaagatgtcagaagtgattgaccatggattagatcttaattattattgccccaaccatgttgttggtaatcagccaaaaaaagacaaaaatccatgctctgcacagcaatgcacaagtcacctccactttgtgagcaagttcttctgacaatgggaagtactgtctagttagtgggatttgacccctgaagtgtgggtggagagatggaagagggaatggaaacaaaagagaaaacaagcacttgggagtggcaggggaggagaggcccagaaagaatagcaaaggaggatctaaatgtcataaccgaggccctggtggtgcacctatcagcaacttgggaggctgaggttgaaggattgcttaagcctaggagtttgaggccagcctgggcaacatatgaaagatccctgcctctactgaaatattttaaaaattagcagggcatggtgggccacacctgtagtcccagctactcaggagacaggaggaccgcttgagcctaggagttaagaggccatagtgagctatgattgcaccactgcactctaccccaagcgacagtgagatcctgtctctaataataataataataataataataataataagggagtcataactgagctcaaaggaactcaaattctggagatcaagccagagatgtggggcagaagcagtatattgtggtcaaaagtgagtacagaggactttagaggaaactagaaaatgggatgggagagaaaaatgagtgatcaaagagaggtcaagtggggccagcagtagaggccagcatctgattcctggttataacttgagctctgcaaacatgctgaaaatcccataaggtatatgagggcacggtgtaacaagatactatctagtgtgagataattcaattaatcactgtgattgaagctgaggaacaaaacttgggcattatgagtagtaatacagaacaagattagagggaaaaaatgctagcagttagttggaatgttcttcgattatgtttatattgaacaatagagaagctgcatgacatagaaaagagagcaaagaagtctgaaaatgcaggtaccatttctgccatgttaacaagctgtatgtcccaagaaaaagtatttccaatttagtgtgggtttggagtgtgtgtgattattttatcatttgtaagaataaaataataataataaaataataagggtaactgcctcaaagaattgtgaaggctaacttggtaatgtgcatttaaacattttgtcaaattgatcttttaagcataatagaaacaggattgagataagaattaaaaacttaaacattttgtgtaaaaaatgctaataatcaaaataataactaccatttagtaaatgcctatagtgtgttggatgtaaaccagatgctttggaaaccttatttaatcttcacaatcacctgaaacttgaatatctttatccccattatacaggcaaggctcagagaggttaaggaacttgcccaggatcattcctttaaaaagaccttattactcacaaatgaagtaaacaaataatatttagtttgtttcatagtttccttaactataaattgtaaaactctaactcccagaaacaataaggaaataactgaaataggcaatacctttgaatttcacaattttttaattttacaaggtaaaaaaaacaaattttaaaattctgttgggtaaattggaacagtctggactggagttggggcaataaaaaaactttaaatctaacctgtcccaacacttaaatgccttaactttggaaatatttctgggaaaaaaagttgatgagaatatcttgccttgtaagtaaaaaattgactaattgattcataaactgagtcaattttgttactttttggcaaattaaaaaataaagctcttgtttacttacctaaaagagccacgtccagctcactggaataaaacatcgctgtcgcaaaacacaatctaggtcccttaatcctgccttttttgatcttaaaaggtggtaacattcagttcggagctcactcatctgtaaattgcatcacattatctctgagttatttaagaagcaagctctgtttggtttcaggcatttttaacctgctaaaggcaagaagaagtgttcaccacatagttgcaaaggtcttcaacttgccacagccaacagaaaaatcaaaatgattgaaccctttgggaatcagtatattgtggccaggccagtgtattctacaaatgcttttgaggaaaatcataaaaagacaggaagacatcataagacatttctggatcatctcaaagtgtgttgtaggtaagatattttttaaggtattggcattaggaatacatttttgaagcactttcccctaaattttctaactttccaactctcctttctggctctagtccacagcctacagtcctttcctctttagtttccaaacctcctactccctgacagagttggaaaggtagtgtctaaaatgaaccccatctcggcttatcaacacggtctttccaaatcagacaactaacagatggggacagaggaaaattctcatttgaaatattgcatgatttgagctgaggatgacaaataggtctattatggttaaagaaaagcaagcattttaaaaaatcctttgttggtgaccagagggcagctgattatgggtaaagaatgttactgggagtgaaattactagtttaatctttagcatattaccatctttaccaatttcccaccgacaggtactaaacttaaaatttgatattaattgactgacctgtggctttccatgttttcagctgttccccacaaaaggccaagagaattgtcctctctttgttccccatagcatcttggttgccagcataccggcttaaagaatggttgctcagtgatattgtttctggtatcagcacagggattgtggccgtactacaaggtaaaattttttttaagtataatttatatacaataaaattcttcctctgaatgtgtacagctcagggacttttcgtatattcactaggttgtgcatctgtcaccactatctaattctggaacattttcaccaccaccaacccctaaaaatcccttacccattaacttcacatcccccctaccctttctctgtggatttgcctcttctgcatatttcatgcaaatgaaataatacaatacatggcactttgtgtctggtttctttcactcaccgtaatgttttcaaggttgatccatattgtagcatgtattggtacttcattccattttatggacaaataagtattctgttgtatggacatatcacaatttttttatctgctcatcggttgatgaacatttgagttgtttccacttgggggctattatgagttatgagtaatgctattttgaacatttgtgtacaaatatttgtgtgagcatgcttcaattttcttgggtatatcactaggattgtaattgctggatcatagggtaactctatatttaatcatttgtggaactgctaacttattttctaaagtagctacaccattttacatttccactagcagtgtatgagggttcagatttctccatatcatcaacacttgttattgtccatcttttttcttttagctatcccagtgagtgtgaagtggtatctcattgtggtttgcatttgcatttctctaatgactaacaatattgaatattttttccaggtgtttattggccatttgtatatcttttgaaacatgtctattcaaagtttttatccatttttaaattgggttatttgtctttttgttgtggagttgcaagtgttgtttctatattctggataccagacccttgtcagatatacaatttgcagataacttttttattctgtgaattattggttaactttcttgatagtatcctttgaagtacacgtttttaaattgtgattaagtccagtctatctgtatttttcattgggtgcttatgccaggggtccccagtccctgggccacagaccagtacaggtccgtggcctgttaagaactgggccacacagcaggaggtgagtggcaggtgagcaaatgaagcctcacctgtatttacagccgctccttattgctctctttacctcctgagctccacctcctgttagatcagcgacaacattatattctcataggagtgcaaaccctatcgtgaactgtgcacgcaagggatctaggttgcatgctccttatgagaatctaatgcctaatgatctgtcacggtctcccaacacccccagagggaaccatctagttgcaggaaaacaagctcagggctcccactgattctacattatggtgaattgtataattatttcattaaatattacaatgtaataataatagaaataaagtgcacaaaaaatgtaatacacttgagtcatcccaaaaccatctccccttccctagtcagtggaaaaattaccttccacaaaaccagtctctggtgccaaaaaggttggggactgctggcttatgccataggtgtcatttctaagaaaccattgacaaatccaggtcacaaagatttatacctatgctttcttctaaaagttttatagttttagttcttacatttacatctttaatacattttgaattaatgaggtaacttatttttaggatccaattctaaataccataagaaccaaatgagaatgtctttgattcctcttgcacagagtaagggctctgctgcttgtgtgtttacaggtttagcatttgctctgctggtcgacattcccccagtctatgggttgtatgcatcctttttcccagccataatctaccttttcttcggcacttccagacacatatccgtgggtaagtcagttactgagctgattaatgctcacattgttttttccttatgaattttattagccataccttctatcaattccaaatttcacataatccaggagaagagtcatggtctcctgtgagaattaggaccagggtttgagatggagggcagggtcacagatggcagccattttatttatttatttatttatttatttatttttatttattttttgagacggagttttgctcttgtggcccaggttggagtgcagtggcacgatctcagctcactgcaacctccacctcccaggttcaagcgattctcctgcctcagcctcccaagtagctgggattacaggcatgcaccatcacgcctgactaatttttgtattgttggtagagacgaggcttctccatgttggtcaggctggtctcaaactcccgacctcaggtgatccacccgcctcggcctcccaaagtgctgggattacaggcgtgagccaccacgcccagccttgccagtcattttatatggtcttattctgtggttgaaagacaatgtgctttagagaggcatatactgaccacgattcacccactgttaattaggtccgtttccgattctgagtatgatggtgggactagcagtttcaggagcagtttcaaaagcagtcccagatcgcaatgcaactactttgggattgcctaacaactcgaataattcttcactactggatgacgagagggtgagggtggcggcggcggcatcagtcacagtgctttctggaatcatccaggtgagcaccttctcatgtaacttgcccacctcaatctgttcatcttgactgttacacatctctctatttttcctcccccctgccactcctccccatcttccctttggtttgtctctccctcatggcccataggaaatactgtacgaagggtcactcaccacaaccagagggagaggagtgggtcaacagtacaaaaacgaatgaatgtgggtctagacagaaggaagaaggggaatggagaggcacaaacagtgacaagcgaaatgcttcaacatatatctgggaattgatagagtcaagaaacagcatatctgggaattgatagagtcaagaaacataactgtatacaagaaatcgtcatactggtggctttggaatttttttctttaattcttcagcaactataatctagttggaagggatgggggctttgaactgttcatgtcaattttggggaaaactgacgaggattatggtggagcctaaagtctcacttccaagccgtatgctgacactcctgctgaatactgaaaatgtcatggactttttgagatgttgcctaagtttatggataatgatattattggttaagaccatttcttaaagaaaggaaaagtcagtttctacaaggacataagcatgcgtcttattgacaatttggttagttatttctaatacatttctgaacttagtatagaaatggaacccaactgggctttgggcagccacagctctggctgcgttctggagatgtgagcagaaagacaggccaagtatccaagggaaggagaatccatccgattcactcgattgcaaaacaatgatgctttaggggggaattaaccatccttttcccccagctagaaccaagcacttctgatgtccaatatgcagttatgtatttcttaagcaagttgagcaactttgaggaaataggatagacactcgctcatgcgtgctccagcagctagaaagtataacttaaaattacatcagcaaatttatgagggctgatgctaggtaagattctactagaaaaggcctatgagtcttccaaagacagcacacttaaaaataaattaagtgcaaataagcctgttacttcttgggggcaaactagacttatatcctatgtgaataccatgtgacgttccacctggatgatgcggtggaagggaaggagagagaggagccctgggtgggaggcgtcccaggaggcagggacatttgcttcttcaaggcatgtacatacaggttgagcctttacgttttgtgtaatattatttcagttgcggatccttgagtttgctgaggtatactcctaatctatgctgacaaaggcttttgttctctttccagttggcttttgggattctgcggattggatttgtagtgatatacctgtctgagtccctcatcagtggcttcactactgctgctgctgttcatgttttggtttcccaactcaaattcatttttcagttgacagtcccgtcacacactgatccagtttcaattttcaaagtaagtatttctttcacctaaaaaatactgaaatacatgaaactcactactgtgtttttagagagctttcctttaatgcctttgccatggggtttacctacagtttgtaaaattttttcatattaaaaaagaaagcagcactttgggaggccgaggcgggcggatcacgagatcaggagatcgagaccatcctggctaacacagtgaaaccccgtctctactaaaaattaaaaaaaaaaaatagccgggcatggtggcaggcacctgtagtcccagctactccagaggctgaggcaggagaatggtgtgaacccaggaggcggatcttgcagtgagttgagatcacgccactgcactccagcctgggcaacacagtgagactcttgtctcaaaaaaaaaaaaaagaaaaagaaaagaaaagaaaaagaaagtaaagccaggcatgatggctcatacctgtaatcccagcactttgggagcctgaggtaggaggatcacttgacacctgaacccaggagttcaagaccagcctgggcaacaaagtgaaacctcacctttacaaaaaataaaataattagccgggcatggtggtgcatgtctgcagtcccagctttttggaaggctgaggcagaggatctcttgagccagagagttagaggcagcagtgagctatgattgcatcactgcactccagcctgggcaacagagcgagacatagtctcaaaaaaaaaaaaaaaaagaaaagaaaaaagaaaaagaaaagaaaagaaaaaaggaaacgaaagaaaagaaaaagtagcaagggaacaatactgaaaatcaaccacatctaccatacagctaatgttaacaacaaaattaagtaacacttctcttagatttgactcaagtactttccaaaaggaaaaaaaaagtctatgttttaaaagctttaccattttgtcccaagttttaaactgtttcttaaaatcttattttgaaagaaatttgctaattgagttatgatgttttcctgtttcttgaaaagcatgtctcattcttttagaattgaagttcttgggtctttttgcatcctgtttagaaaacaaaagaacatttaccactatgtagatagggcagcagttctcccctcctccagaggatgcaaagtagaacagatagtgttcttagttttaaaacttgggacaaaatggtaaagcttttaataacatagattatttttttgaaaatacttgagtcaaatataggagaagtgttacttaatttttgttgttaacattagctcgatggtagatgtgtttgatttttaacgactcccaaaagtttttgggagttgagacagaacttgctccaaattggaaccaacactctctttcatccagaggtattccaaaagtggagtgttctagaagcaatttgggatccagttttggcctgcttgagctttttggggtaagtggatatggaacccaactagcttcaagaagtatgtgcacatgcatagtgcacagttagccagaaaactattttccaaaagtgacatagagagtcagctaagaaatatgagggggtgtaaaccccccaagagggccaggaattgagcatactaagcaaaactatcaaagatcagaagttattccctggacagagtagtgatggctgtgaaataaaaaatgacgaccaaagagacctaataagggcagaagaccagtggtaaaaatgtgaaaagtatccaacaaaatttgacactagccaaagagattcccagcaaaaatgccagaagcattcttaaactagtgtgccacctacactatgctaacttactcttctcatatctccatcgctactctctacaatttcacattcacaattaaaccggggcaatacaggaaatcactatcagtctctatcagtctttttgcttccatgtttatttttatttgtttggagatgcgttgtatccaaattgtgcattaatatagggctttggtggtttttgtttttataattgtaggtactatactctgtattctcacaaatagagaagactaatattgcagacctggtgacagctctgattgtccttttggttgtatccattgttaaagaaataaatcagcgcttcaaagacaaacttccagtgcccattccaatcgaattcattatggtaattgatcattttcagactctgtcatagctactctactgtttatatgttgtaagtccttcaccatttgtagctcaggaagttttagtggggcagaggccatctctgcagttttcgggcataatgtttagcatggttttattttcattcagaatttaataacttcctcttatgattttgagttaattttttccacgtgagacaaggatagtgcagagagcaagacccttgacaaaatgtcgtgttagagccatttgaatttagctgtggttctcaatcctggcggcatgttagaattgcctccgaatttcttaaaaagtaacaaagcctgggctggagttcttacttaacaggtacagaagtgggttttggcaatttatttttcttcaaagcaagactcttacttgcatctcacatttctaacttgggccatttgcaactttgcagaccgtgattgcagcaggtgtatcctacggctgtgactttaaaaacaggtttaaagtggctgtggttggggacatgaatcctgggtaagtgtgtcttcgatgatggcatcaccatgcactaagcagagagttagcagtagtgacaggagaggtacaatccgaactgcagttcagcctgcaggtaaccctcatcagaatcctccctgcaccctgcatccctaaggaaggctcactgctttccttctaggaaggtgctacaaagaaaggcagggtgtgcagttctttttttttttttttcgcctccccacagtgaatgcagttcttaatatcagaaggcttctccttgtggaagaactcacaaacaagacaagcagggacacagaccagtagaaactcacaggaaagtaaaagttagcaaagtagtgaaagtctaaaaataagcaaagtaaggccagacccggtggctcatgcctgaaatcccagcaatttgagaggccaaggtgagaggatcacttgagcccgggagttcaagaccagtctgggcaacacagcaagacccccatctcttgtttttttaaaaatatataaataataccataaagaaaaataggcaaagtaaactgcttctcctcttaaagaaacatcaagtgaaaccagatttccttgtccataaattactataaacaatatgtaatgctttgtttgaagttactggagccaagttctgaaagttcaaagaagacactgaaggaacacaggcactccacgtgagcagtccagataggcacactctgtcctttctcccgatcagattcaaaacaagggcagagcaacttttcccactgcaaaaggatgagaagtccagtttgtacaagaattttaaaatgtatttcattacattcagtggattgagaaggaagatcattttgtgttgtttcttctaaccacagaatcagtttcttccaacttaccaaggaaaaggtgttttcctgttttgttttgttttgttttgtttttttaaaagacttctctccctctctatgcttaagaaatatttgagaattcgagaaatcagcatttatatgtattttttttactttaaaacagccaaattcttttaaaggcaaatatatgtactttttatttttttaaagaaaaaacattttttttattaccagatcttcgtgtgttacatttcacgaatctcaagcatcacttttaatttttaaagttttaaagtggaaattaggctgaaactgaaagactgtttctagggtttccttctattctgccactttgaagtgatttcactttacttaaatgtcttgggagacataaaccaaatagaaaaaatgaatacttgcaaaaccaaacaggatcttgtcagaagggcttggaaaataaaagataaacttaagatcactgagttacaccttaaatacctcaacaacagtcttatttagtgaatgtattttcaatgtcagtgtacctctctccacagtgtgtagggtgtggcaacgggtaaccattacgttcaatagagtggcagtgtaacctagtaggtaagctccagtgttctagaggcagagtacctgagatttgattctgactcactttttgagcttgagcacattaccaaaaactctgtgcctcaatgttcttggctgtaaatatgaggctaaaaataatagctatcaagtaggattcttttaagagttgagtgagttaatacatgtaacatgcttaagtgcctgacttacaataaatgttcaaattacactactattgttaactagtttaacacctaaattaggtagcaagcacttgagctttttatgctccatttttttttctgggtgatgattgagtaggtattttaagtttttgttgattgcaaatagactataactggaaggtagtgattattaattattgctaacctactgttcatgactatgccaccttagtagttattttgcaaagtctcatacactaaatacaaataatttggctgaagaaaagtgctcattgaaacagtaaaggaaacacaaggagtatattcagattccagagggatcctataataatagctaacaggcactttgtgttttacagtgtgtaaatagtatttgcatttattatttgaccctcccactaaactgtgaagaaaagagaacaaggacgggcgccatggctcacgtctgtaatctcagcacgttgggaggtcgaggcgggtgaatcacttgtggtcaggagttcgagaccatcctggccaacatggcaaaaccctgtctctactaaaaatactaaaattagctgggcgtggtggcacacacctgtagtcccagctacttgggaggctgaggtggggagatctcttgagcctggacagtggaggttgcagtgagctgtgcactccagcctgggaaagaggagaccccatctcaaaaaaacagagaacaagttttattatcctcactctacaaatgaggaaattgtgacttgggaagggcaagtggcagagccaggaaatgaacccaagtctttagactgtaaatcttcatcacatcattctgtctatggtgttcagagaccagaacaaaagaataataagatcctggttattaaaaaacaaaaacattccaagctaacttttggatttataatggcatcagatataatagtacttcttcaaaattatggtataatagtacttcttcaaaattagagataaaaatgtattaccatagatattcacaaaatgtggaacagcaattcagaaagagttgattggacctaattaacccacttccaataagtctgatgtcagaaatatatgcttataggagtggaacattttagtaaattgatgttgagtttaagatacatgcaccttttatgatacaattagtaaatataattgaactggtctacattcatgaggcttaagcacagaagtacgccctgtgagttgaaggtttctctgacatatatcaccttaaagagaaatccactctccattagggtcatggttgtctctagcatttctgtgaagtgcagggcagagtccaaggcccatctctttgccaggagttttccatgaaaggttattattatcaatggaaagaagacttttttgctttccttgtctcacaattgtgtttgctcaaaggacttcatgtatggataactattgggagcattttgagtgatgctttgcagcccagtgtaacaatacaagtggaatagaagacattttgcaggaagcttataagaatacacacgcacattatagtgtggttttactggcaaaatcatatctgatttaccactatccttggattgaatttgcagtcttttaccaaattcaggcagtgttgcttttcagcattaagaaagcagattgcaaaattgttagtggagctaaattctcgttaatcatactccaaagtgagacacaactcagcctagattgcattcattcattgatttgcccaatggttatatcagtttataaattggttggtgacattcagacttgcttaatttcaattttagatttcagccccctattacacctgacgtggagactttccaaaacaccgtaggagattgcttcggcatcgcaatggttgcatttgcagtggccttttcagttgccagcgtctattccctcaaatacgattatccacttgatggcaatcaggtaagtaaacaaactacactgggtctcactgggcaactttaaataatattttgcacacataatatcaatggtgccacttctgaaaaaggttcattcttgtcttcctgtcaggagttaatagccttgggactgggtaacatagtctgtggagtattcagaggatttgctgggagtactgccctctccagatcagcagttcaggagagcacaggaggcaaaacacaggtatgtcaagatctttgctgcaagcactgtcctagcgttagtaactaggaaattcaagccaggggaaaagttgagttggtgatgataatttttttatcctcacagattgctgggcttattggtgccatcatcgtgctgattgtcgttctagccattggatttctcctggcgcctctacaaaaggtaacactgtctttggatagcatctctacttttagtggtaaatcaaggaccccggttcttaaattctgaaagcacaaactaaactaggggaaatgaggtaatgacaaactctcaagtactcttcttagccaatactctgtatgagccaaaaatatttctttttccctggcaacatgttctgaatgttaggaacacaggtgcccaacctgccttatctcctctacactttgcatgtgcatagccccaaatagaattaatgttgaaataggagggcaccctggcaccacactttcaacacgcatggactgagtagaggttttcttaaaggttaaggtaatcaggccctctatctaattcagagaatggccctaccagccacacaactcgttcttaggaacacaccctgaagcttctagaactttggtttaactccaagaccaacactgttggattgtgggatgggagtgaacagccagcacagacctcccagccctactctcatgctcctctgcctataagcttgagggtttagtttaatactttgtaaactgctgcagcactcagatataaaacataccatcagaccctggaaagcaaaggctctctaggaaacaagatgacagtaaatacattgttccttgtggttttaatataattttgaggtggtacatggagccctgttgacctccttctaatcctggctctgctacttattatctgtgtgattttgggcaaattacttaaccttgctgaacctcaagcgccacatttgtaaaatagaaagggaaataatacccactacacagagtgactataaaaataaataagatcatgtatgtgaactacttagctgagggtttggcatatgataaatacttgataaatgatagtcattattgttaataatattattattctacattgtattacactcctggctataaaagacatagagatatgatacagcccacaaatgtctattggctgttacctaggccttttttccttgttggttggtagccgaacggtgactgtggtcccaggttgctggactcccagtgtggtcatctcaaaaagctcaatggccaaatccatcttcaagcagggcagagaacaatttgccaaaaatatgcattctccataggctatacttctgatttcaaaataagtggcataaaaggaatgaaaaagtcaccactaaagaaatagaagaatgttatctcaataaaaataaacgcacacacactcacccctacagagagaactccaccctctcatgcttctccccgggtgtaaacttgagttctacctagcccacatcaatttggagacactaaagaaataattaccaaatcttgtccaagatttaatcaaagccccttttataaagggtcctgtgatatgttctttttaggccattgtggtcaggaatgtctttgtttcaaacacccaaataactatttgcttctttttatcatatgaaggcaaaataacccataataaaagctcataataggtatttattgagtgctcactgcatgtcagcagagctctaagcgttttctcttcatttaatcctttatatcaaatgcagtatggataccagattactgcggaaattatccccctttcctttctatgatttcttaatgctctgtaatctttactttaaaagtaatctgttgtatatgtatgtcatcgtaaattacttcaaattgtttttccgtagaatactgactaggtgggaaataatgcccaatggaaaaaaaaagtctcttcgcacaggtgtctcttgacatattttatacttagagaattaaaagtcctgcaaaatggagaggcccgttgtacagtcctctgacttctttgcctagctaccacaatggtgacatcttacacagctgtagtacaatatcagtactatacattagtatagtatgttaagtagattacagactttattcaattttcaccattttttaactggcattcacttgtgtgccaaattttttaaaagtcacttaagaccatatttcttctaaactgtgacctctattctcacagttagtaaaattaattgcttagatattatattataaggattacctgtgaaaattagaaataggcagatcagttcaactgtcctcaagatataaaaataaaaactgtatttggcttttctttgtacactgtgttttcatggtatagcagtatacaaattccatactccattcagaataaaataaattggcagggggaacaggacggtgaggggcatgttcctacaattacgataaaatccaaagaatgaagagaatatacttagctattcagcatttttcaccttaactatcacaattcctgcaagataaaagatcacattctggctgtggaagaattggaagtctgaagcttggctgtagggattagtactggcctgggaaatattcattcattggctcagccactcattcactgactaattttaaagcccctcctgtatgcatttaacatagtaggttctggggatatagcaggaactagatagatatgtttcatgctgtcccagaaagcccgcctcaagtcatctcattccaggacctcaagcttcccaagctatttttttttttaacaaagagcaacccccatctccttgactccaataaacaaacacacattagactgtctctgcttgggaggaatttattccaaatgttagtctgtcataggtctgaaggtctgcctttctctgtcccaaggtgcaggctactaaacgccatcagatcatctatctcataatcacaagagcagcctaggccttgtcactgttgtggggacaaagtcattcataggaacaggtcagagtcccagttctggtgtgtcttgcgtggcatcgcacaccggaaaagggtgtaatgctttgatttgctttgaggccctttaaagcacacacttatctatagccttcacctttgcttccctgtggtttatttcattaacttaaagtacatctgatgtttgtgtttttcacagtccgtcctggcagctttagcattgggaaacttaaagggaatgctgatgcagtttgctgaaataggcagattgtggcgaaaggacaaatatgattgtgtaagtagaggcaatagtatttgaaagagagataaatcacaatagcattttaatgctaatgtgaaatgcatgtttatattgtaaactaagtgaaattttgtttctatatatctgttcaaaaaaaccttagtttgttttatttgctatttttaaattgcatattctaatggtcattttctgggactttaatttttttaaatggctacttttaatttaaaagaatgggctccatgaaacactagtctagaacttccttaggcctattctaaaagttcttgcagtaatcccaagtaccacagaaactctctgaatttagggtacgcatggcttctgttcttcattacataatgtttttgtttccacgaatctgtgaagaacttaatttctgaacattgcttttggaaatactctcatttggaaaggctcccccttgctctcacatgctttgctattttaacagggtcaaagtctgtggtgtaaaaatgcctgttaacatacccttaggtatttaaagatcataactagtaaactacacttggtttacttttgtggggcgttttaacacccttttggcatgctaaaattcttataaagatagcaaccattaattaaatcaacagaccaagagtaaaacattagtataagctctaccagttaatttgctgatttttttttaagagataggatctccctctgtcacccaggctggagtgcaatggtgccatcctagctcactataacctcaaactcctgggctcaggcaatccctctgccccagcctcctgagtagctatgactacagctgcacaccaccatcctcagctatttttttttattttttgtagaagcagattctcactatgttgcccaggctagtcttgaactcctggcctcaagtgatcctcccacctcagcctcccaaagtgctgacattacaggtgtgagccttcacgcccagtctaatttgctgattttaatgaacagcagctggttctattaggttggtgcaaaagtaattgcagtttttgcaattataattatcactgtgacagataattccatttcctaaatgagttggagatgggattagaaataaatacactttctttgaatcctcttatatttgtgtgtgtttttgtggcccagaacctgagccagcagaaatgacctcttgggaaaagtgtcttctgtgcactttgctccctggcccaagatgacaactttcaacttccaccacgtctggcaaatttttaaattttttttatagggacaaggtctcactgtcgctacaaaaaaaaaaaaaaaaagtctttttaaaagaccccgtctcgacattgtactttaatcaaagtaaattgtagtgtatgtgttgctttcttttcacagttaatttggatcatgaccttcatcttcaccattgtcctgggactcgggttaggcctggcagctagtgtggcatttcaactgctaaccatcgtgttcaggacccaattgtgagtgctcaaagtgctctgcatcctggcaggcttggacctgcccaaatcagaagaggaaaaaaaatgtcactggctaaaagaacagtagttggttgataggtgtgcatttctatcaggatggggcagtttatcctccctccagttgctcatctcaaggcctgaagggcaatagcacggcccagctttagaacatcagcccagggaggagacttgctgttggtctgcttctggctttgactccagttcaaataaatcatataaatctctgagtctattcgcccagctataaaccagaagtaattctattccaagcaggtttaatgtctttgccttgtacttgttaaacatggaaatgtgttactgagattgtgagattgtttccatctagtggatggatttcctctttataggttgttagattgccctcgtacctttaaaatatggagctggattagagaacttctcaaaggcccctcttaccttaaaattccacaaaagccatttggaattcttgatttttaataatcattcagtccaagcatctttttaatttttatttatttatttatttattgtcttttgagacagagtttcgctcttgtcgcccaggccggagtgcaacggtgtaatctcggctcactgcaacctctgcctcctgggttcaagcgattcttctacctcagcctcccaagtagctgggactataggtgcctgccactggctaatttttgtatttttactagagacagggtttcaccgtgttggccaggctggttcgtgaattcctgactttgggtgatccgcccgacttagcctgccaaagtgctgggattacagtcatgagccatggcgaccagccttgattttttaaaatctctgccatgtaacatcactaccatgtggttgctcagcctattttgaattacatggtgtgacagaaaaagatgcttcctggggaactaaggagttctacaacagaaattgttatcacaaagtcaatccctgactgatggaatacatccatattgaaatactcccgaactctttcatttatttatatttcattccattttttactgggaacccatcaaacatagagacaaactgaatggtcataagcaagtcattttacttttccatgttctcatccatacaactgggtaatcatatccaccttacctcatggaataactgtgatattcacaatcaaaatggcaaaagcatatggagtgctttgtaaactgtaacatgacaaatgggaggcacttttcaggtgctgtgagaggacacaaagataagtaaaacaaggtgttcaccttccagagtctctgatggcatgatgattccccaaccttttacattttgaaaagtgagcctgctttggtatgctggaaaaagtcagtgttagccttataggcttaacaaacatacatgaatgatttacttggtgtttttctccctacagtccaaaatgcagcacgctggctaatattggaagaaccaacatctataagaataaaaaagattattatgatgtaagggagattcatgtttttctttgacttgctaaatgatattaactatggatctaatgggcaacacctaacaatgcttctctgccttacagatgtatgagccagaaggagtgaaaattttcagatgtccatctcctatctactttgcaaacattggtttctttaggcggaaacttatcgatgctgtaaggtttggggttatttaatttttttccttgtaatcttactgaattctgggaatgtcattgttctgtaaggtcattgttgagactgggttgtgtcacatatgttgaggtggggttgtgtcagtattttttgtcccacgtcccagaacagatgaaactaccttatggggagtttgttaataggttgggaaataagcctcttcagatgacatctaatatagaagaatccttttctcaaattctgatgtagagtaaaagaaatttaccaagttttgggctgctagcttttagtagatgtcatcctacagattttctttgggcatcaacttcagaaacaatgaaggagcatttaatatttgaccacatcctcaaagagattcagtataacagttgtaaatgaatagttaatactgaataacaatacatactgagtgtccctggcaaactggagagatgatgacaaggaagcagtcttgacagttaagaaaaaaagctcagtcctccctcttgaaacatgcctttggtctactctgtaccttgcatacagcctctgccttaaaccttaactattattattagtttgatatgcatccgacatttttctaccgagttttttgttgttgtttgcaaaatgagattatattgtatatttggttttctgtactgcccttttcgattactctagtaaacttccatctaactatattttttgtcaaggatttttttttttgagacaaggtctcgctttgtcacccaggctggcatgatcacagctcactgcaacctcaaactcctgggtttgagcaatccccctacctcagccccccaagtagatgagactccaggcatgtgccactacaccccgctaagtgctaagttttaaatcttttgtagagacgagggcttgctttgttgcccaggctggccttgaactcgtggcctcacgcaatcctcccacctcggcctcccaaagtgctaggattagaggcttcagccaccacgcctggccaaggattttttattacataatttgatcctcctctcttacttatctgtaactaaatattacagcaataagaattcattagtgttgaaaaaaacaaagattagcctcaaatataatactaaaattataaaataaaattgtacaataataaataacataccattataaattttaataagataaaaattacatacaagcagaatacttatgtaggtgcaactcgtactcaataaatagaaaataagtaaaataaaattccctaagagttgtgtaggttccaaacacaaacagattcaaatagagtttatgtccattcatggataatttatggatgaatcctggactgtgttatacaaaagcttttgactgttgataactgcatacaggtggagcagaccatgggtctgacccaatgttctggctgatattgtttaaaccacttttaaattttgtcacaaatatttttattatctgtcccaatccctcaaatcactccagttaaagttgttagaactatgctatataaataacagaatattcagtactcttgtaacacagcaatgggtttctcaggttggctttagtccacttcgaattctacgcaagcgcaacaaagctttgaggaaaatccgaaaactgcagaagcaaggcttgctacaagtgacaccagtaagttccttgaccacatttctatgcattatagctaaaagcttagtaaaggatgattcaaggtgtagttccattcctttaaatgaaatgccagataaacaagggatttcatgtgtcaatgagtgttatattttaaaatgacatccttctgagggtctccctaaaatttttattctcctgggaaaagtaccaaacacaattgtccacaatcttgttgttgtttgagacagtgtcttgctctgtggcctaggctggagcgcagtggtgcgatcacagctcattgcagccttgacctcccagactcaagcgaccctcccacctcagcctcccaagtagctgaaactacaagcacatgtgccaccatgcctggctaacttttttattttttgcagagatggagtcttaccatgttgccctggctggtctcaaactcctgggctcaagtgatcctcccacctcagtttcctaaagtgctgggatgacaggcatgagccaccacacctagtccaatcccatcgtttggctcaactcagaatcagtgcttctgaaactcactggctatctctgacatacacaatgtttttcttggtcacagttttcatacttgttatcctctcctgcagaaaggatttatatgtactgttgacaccataaaagattctgacgaagagctggacaacaatcagatagaagtactggaccagccaatcaataccacagacctgcctttccacattgactggaatgatgatcttcctctcaacattgaggtccccaaaatcagcctccacagcctcattcttgacttttcagcagtgtcctttcttgatgtttcttcagtgaggggccttaaatcggtaatttctttgttcttaatggaaacaaccaatcaatgactaaaggttaaaaaaaaaattgtatttgtgggctgggcacagtggctcatgcctgtaatcccagcactttgggaggccgaggtgggtggatcacctgaggtcaggacttcgagaccagcctggccaacatggcgaagccccgtctctactaaaaatacaaaaatcagctgggtgtggtggcgtgcacctgtaatcccagctactcgggaggctgaggcaggagaatagcttgaacctgggaggtggcaattgcagtgagccgaaattgcaccactgcactccagcaatacagtgagactctgtctcaaaaacagcaacaaaaaaaactgtatttgtggaaggatgctcctttaggtaacatgcatttaattagaagcaaatgataatcttagagtattccatggagggaaaggtggtgttcagtggactcttgaaagggcatttttccatgagactgggtactatattgaagggaatcaaatctacagttctaacgtatgctgaatctgctggtggacaactatgctcacattcctttcaaatttcaattctgtggtgttctcaaatctttgtgggcattgtgtctaaattattctgaaatcagagaagatctggaaaggtcctgggaaaaaatgtaagagtggatccttttgttttatcctcatccattataagctgatgaaatttcacttggctaaaacccaaatagatatatgaaagaataaatgtcacatgtgatttcaaaacacgactgaaacaatcagattgcagtgtgttttctttccacagattaatcatatttctaaaataaattagtttctaacagaaatgcagaaacatataaaaagaaaatttaagaaattctacatctttctctctttttcttgggttttcacaaaaaatctgcccaagtgagagctgacctaagataagacctattcagcatgggtgaactggatacaaaattagaaaatggaagaattttttttaaatgttaacatcatgtaactctcaagtctacttgcgttttcttttcttttttggttttggtttttgtttattttagcttttgattactttagcttttgtttctgcattttcactcacacacacacacacatttattttttggttctagcagtataacacaaaggacaggggctctaattcttagttaagtgcctagaagaggttctgaaagtgtttactgatgatggcaatgacattaatgatcatctaacctgatcaaacaatataagctacttttcttactttacatgatcttactcatatcactactggtatttgttcttagcctagagaccagaaaaatgtataaacattcattggtgctagatacatccattcattgtggacaaaaataattagcaactcatggtccataggttcttttttaaaacttttatgtagcaagaaagctctagttgagatcatcccaaagaagacactattttaaaattaaatcagagttgttcttatgagtttgagacagaacattttcccataatacttccttcaagaatgatcatttttaacttcttactgaggagaagggttcttttgtttgggtttatttctgtcacagagccttgtttttaactttagtatcttctgacactattatctcttttcaaaatgttaaagcttctaaaaggaatatatcacccgtaaggtataattctgattgttttctttatatttctgacaagtgaaactgttccctaaggaagatatacttttctttttaacagattttgcaagaatttatcaggatcaaggtagatgtgtatatcgttggaactgatggtaagtggctttatttttgttttatgttctgacaatcacttcaggctcactgccaactctcagtctagacagcctctccaaagaatgagtattttatataatcatgatgaaaatctaatatgcagccagcccaataaaaatccctatggaaacagcatctttgtattttagttatgttgatatgtaattaaatacattctacaatttgaatcctgatttcataggcaacaaaggaggaacatgttaactatttttcactctaaacttcctgaaaaggtagccttgttttctgtctctcttcctcccttcccttgcacaatccagcccataacaatttggttgagcttcacctgctgatgagaccatccttgccaaggttatcagcgatgtccagattgttaggattaacggccttcatctcaggtccttctgcagcagcttacctgagcatctggcactctctctagcatttgtctttgaaactctctccctccctgactctggcaggacagttcttattcacctcctacctctcaaacatctcctcagggtctgacattggttcttctcccactttcagtctcccccaagcttcaaccgtacactctataccatagttctaattccacagactctttctagtcaatttcctacatgtttatgatttcatgtgcatctacttgttaatgaatccccaaactatacctccagcccaggcctttcttctaagctgcagaccaatggactcgactgtggatgtccccaggcacctcagatacacgcttttagaactacgtatatgattccccctcccaaaaatacttctttcctatcacaatcactgcatcactgcttacctagttttccagatagaaaccctgaaaccatcaccaatttctgctctccttccctctagtcaatgaccaggtcctataaatatttcctcttaaatcagtctcttcctctccatttccagaactttaatctagacccttctcacttctcaactaggccttctagaaggactttctaactaatatccttgcccatccctataatgctctcccatcccattttctgaaagaagccttcttcaggaatttttccgacaataactgaaaacatccttgcttccccaggcagagcaccgggtcttcagactgtttgtatctacagagtacgcacgtatcacataattttgcagttcagtttctgtccctactagactatatctcttccagggcaggtattgttcctgcttaccttcttcctgtctcttccctagatcctaggacatgatgggcattcagtaaagacttattgaatacctactatttatcaggcacagttctgggtgctgggaatatagcagtgaatctgacaagcctctgtcctcatgaagcttatagtctcatagaaaagccacataataaacaaacaaaagcatatttcaggtagtgataagtgctaagagaaaagcagagttaagaaacagaggctgggagcggtggctcatgcctgtaatcttagcactccagaaagctgaggcaggcagatcacttaagccccagcgtttgagactagcctgggcaacatggtgaaacctcgtctctaaaaaaaaaaaaaaatgttagctgggtgtggtggcatgtgcctgtagtcccagctactcaggaggttgagatggaaggatcgcttgagcctgggaggtcaaggctgcggtaagctgtgatcgtgccactgcacactagcctgggtgacagagcaagaccctgtctcaaatcaaaaaaaaaaaaaaaaaaaaaaaaaaaaaaaaaaaaaaaaaaaaaaaaaaaaaaaaaaaaaaaaaaaaaaaaacccctttttttttttaaaaaaaaaaaaaaaaaaaaaaaaaaaagaaagaaaagaaagagagaaagaaagaaagagaaagaagaaagaagaaagacgaaataagaaagaaagaaagaaaaaagagagaaagaaaaagaaagaaaagagaaagaaagaaagaaagaaagaaagaaagaaagaaagaaagaaagaaagagaaaaaaggaaggaaggaagggagggagggaggcagaaagaaaaactggtgatcagggatgtccagcaatatgacattttgagtacagactagaacgaagtgaggcagtcaaccttgacagtacttagggggagctttttagggagaggagacaagtggtacacatatccttcgaaaagtataaaattggcatccttaatctctccctttctactggatcctgtccctaaaatatacagacatattctagtttcaagacttttaaaaaaaacttttaagttcaggggtacacatgcaggtttgttacataggtaaactcgtgtcatgggggtttattgtatagattattttgtcacccagatattaagcctagcacccattagttacttttcctgatcctttccttcctcccacccttcaccctccgataggccccagtgtgggttgttcccctccatgtgtccatacgttctcatcatttagctcccacttataagtgagaatatgcagtatttggttttctgttcctgcattactttgctaaggataatggcctccaactccatgtacctgcaaaggatattgtttttttttaatttttttatatgtttttatatagtattccacggtgtatatgtaccacattttctttatccagtctatcactgatgggcatttgagtccatgtctttgctattgtgaatagtgcagcaatcaatgtatgcatgcatgcgtctttataaaagaatgatttatattcctttgggtatatatccagtaatggaattgctgggtcaaatggtatttttgtcttcagccctgtgaggaatcgccacactgtgcttatacactgttggtgggagtgaaaattagttcaaccattgtcaaggcttccttataattaaaaacatccccttgatcccagaaacctttaatttactaacaattttaccctttcctcatcatcccagatattttggaaagtatctgttcctgctgtctctgctgcctggcattcttttcagtctttatcaaagattatcaccttccttcccattgcatgccacccactccatcccagatcctggtggccacaatgccctccacgctccctctccctctgtcactgaaagctttctgtaaacagaagaatccatcttcataactgtgtaccttctcttcctccacttttctgcaaatcctaggcacgtttagacggtatctgctcaagttttcccagatacccaccaagaggaaaatttctcagaattttcatagtacatgatctatatctctctcatatattcaacaaaaaatatgaagacatactatgtgctgggaatttttttaaaactaagaaaacaataaaggaaaaaaactagattgctcctttccctcattattataccacacgttttctgtcagtactacaggaatatataaatgttctatcttccttgagggcaagattcaggtctaatttatcttttgatctttcttattactcagccagagttttgcacatggcagacataaggtaatagttggttgagtcatctatgtaaatgaatgctgcttagtgcctacaaaaatgggatttctcaaagatgattagagaggtaagtggtaaggaagatgttttcccataaaacccagcagctttgggaaaatgggctacaataaagaaccacagcatatcactggtccataaacatatgttccattttggcagaatcccaaactttaataagaagccacacttgatactctaatcattaagcagggagatcaattcactaggctcctgcctaaatgaattttcttctaggaactactgtttttcatttgctcctttgccttcctcctttttacattagggcattaaattttttttattagaaaggtatttgttagttccaaaagacattgtactaaagatagactggtattataccactgcaacccacacacacttaaccaaatgtcaatgaaacgcacatttgcaaatggaaggtgaaattactagcctcaaggggaaaccggtagccaaacaattgtttcttcctaaaagttactgtttttttctcttcagatgacttcattgagaagcttaaccggtatgaattttttgatggtgaagtgaaaagctcaatatttttcttaacaatccatgatgctgttttgcatattttgatgaagaaagattacagtacttcaaagtttaatcccagtcaggtatcagctctttggtgactttcacaattgcataagcagccatctgcactccttaaatttctctttttcaacattaaaaaaaatcagcccctaatccatatttccattctctttttctcaggaaaaagatggaaaaattgattttaccataaatacaaatggaggattacgtaatcgggtatatgaggtaagattcttcaacaggtttatcttcacctagacatcacagcaaaaaaaaaccttcaaagtagtgaggccacttcctgcatgtggcagaaagtccagcacttgcttgagcctctgtgcctcatccctagaaaactgaagcaatgctaaccaatctcacagggagttttcaggaaaagaaactcagacccgtacaaaaacaggatgaaaaaatagtgataatagatctccattaatgcaatattgagcatatcttcttttgtttttcaaaccacttacaacaatgctcttattctggccctgtaataatccacgtagcagggaaggtattgctctttccatttacaggtgaattagcaatgaaaatgataagctaatacacacctcccaatagccagatgcttgagaagtccctagcacagtgcccagtcaagcaatgaaacaagtttctatccttccttactagagtgagttgccaattcagcatttaactggagagtcccatttcattgtagatgttcatttctagaacattcagtcctttaaagcaatgtttctagtttgggaaaagtagaatcacaaattaaaatgggtttctgctgtaggccaggtagatggcaggtgtattacattcattatctcaatccttataacaatatacaaagaagatatcttcattttccaaatgaaaaaaaaaaaaggaaacaggctcagagagcttaactaatctgcttgaggtcacataccaagtgaccccaacaggactgcactaagatctttctgatgacaagacctgtcttctgttctagtacaccatctctatcctctagtgaaagacaacggattgagggaccagagaaagaatttaatgattgtcttcaagcatggcaggcagctggtggtatttctcttagttgaaaggtctcaaaaaaggaatttctagtcaaaatgaaaaagaaatgtagagcataagataaatctggaacattattaagagtggtatcaagtagcaaaggtcagatgaaaaggccattctagaaaattggatagacctgaggtaagaggcgaatgtacataagcaccatgattctgtctcccaggactagattccagagaaacccaataaaactggcaccttgcctgagtaccttataagaaaagtctcacaccagaaaccctctcctcagtaattgtattcagaattgtcaccaagtattggaggataaagggtaggaatagcatttacctcatgtctgacccaaacactagaaccaattgtctaacaaatctagctagcacagtggtggaacttggcttccccatattaaaaaaaagaaacatttaacaccagctctttggtctcaaggaaggtaaatcaccagctgtggataggccaccagtggtgactggggtaacagctgaatataccaggccaacacacatagtcctttggaataaatgtgaagaaagatattgctacaacacactgtaccattactttaagttaagttaggcctttgaattacaatgtggtatcacatagatctatgttaaacaagcagtgatggaaggtacttgatcattaaaattcaagacaaaaaaaaaacctgttaactctggtaaattctagctcctaagatgtgattattgtaacagaacttgacgagtattttaaaacaagaactttctgtcttcttccaggtgccagttgaaacaaaattctaatcaacatataattcagaaggatcttcatctgactatgacataaaaacaactttatacccagaaagttattgataagttcatacattgtacgaagagtatttttgacagaatatgtttcaaactttggaacaagatggttctagcatggcatatttttcacatatctagtatgaaattatataagtattctaaattttatatcttgtagctttatcaaagggtgaaaattattttgttcatacatatttttgtagcactgacagatttccatcctagtcactaccttcatgcataggtttagcagtatagtggcgccactgttttgaatctcataatttatacaggtcatattaatatatttccattaaaaaatcagttgtacagtg

SEQ ID NO: 44 - DNA, 6614 bp, Homo sapiens
gatttttcagccttgcttggttttggccaaaagcacaaaaaaggcgttttcggaagcgacccgaccgtgcacaagggccatttgtttgttttgggactcggggcaggaaatcttgcccggcctgagtcacggcggctccttcaaggaaacgtcagtgctcgccggtcgctctcgtctgccgcgcgccccgccgcccgctgcccatgggggagatgcagggcgcgctggccagagcccggctcgagtccctgctgcggccccgccacaaaaagagggccgaggcgcagaaaaggagcgagtccttcctgctgagcggactgggtaagcgccgccgccggccccgctgggggcttggctcacttccccagagcggcttggaggcaggggccggctttcgtcggagttctcggggccggggtcccggcggcgggaacgggaggacctggcgggcgaggtcgcgcgcgcaggcctgcgccccagggataaaccccggagggtggcgcgcaccgccggctcgggttggggaggagggtgggagtccggccgcaggacggcgcctggccggggagagggtatctgcagggacagtgagcgaagccaccgtggccgccgcgcacccgccgggaagcgcttcggcgctgcgaacccggctttctccggcggcggaataaatgagagaggtggaaaactaccccgggctctccggccctccccgcgccctccgccggcgcgttctctctctcctgccccaggagccgatggagactgataacggccctgcgccaggccgtccccgggcggtcctcgcgcccccgcccggggctcgccctctcaatggggacagaaccgcccgccgcaggcagcgtagccgccagcaaaccgcgaggcggccggggcggggcgaggggcgaggcgaagggcggggccacttctcactgtcgcgcaggccccgcccccgcggcggtgccttttttataaggccgagcgcgcggcctggcgcagcatacgccgagccggtctttgagcgctaacgtctttctgtctccccgcggtggtgatgacggtgaaaactgaggctgctaagggcaccctcacttactccaggatgaggggcatggtggcaattctcatcggtgagtgcaggaatcttgcgggacttctgctccaggagacgcaaagtggaaattttttgaaagtcccggatcagattagtgtgtgtggcgccggacgttatgaagccgtctaaacgtttctttatttctcctccttcatccacagctttcatgaagcagaggaggatgggtctgaacgactttattcagaagattgccaataactcctatgcatgcaaacagtaagtttgaccggatttgaggaaataactagtatagtttgaatttgccagcggtaaacattctcatcacggcgtttatcgggaaggcgaagacttcttctggggtggggatctcatttctccttaaattctaatatatttgacacattttaaacattaaagttaatttgctgatttggcttgaactggagatgtaagataaatggttcgtgttggccgaattcacggcctttctccatgagcaacaatccttatttctgtatttaatggggtttattattttctttaactgactaatgtattggggtattttcagtttaaacagtgaattatccgggtagaagtcggtagagccagaaactcacttttgatgttggtgtgccccctagtggcgagctggattctaaatcgtgccctttattccctgcagccctgaagttcagtccatcttgaagatctcccaacctcaggagcctgagcttatgaatgccaacccttctcctccagtaagtttttgtatgtgccgtgcatctgtggagaactgtaagggagtcagttagtattcctacattaatggattaaaatagcatttctagaaattagtatcaaggcaggaatgcttcattatggcataacaagtgatataaatatttaagtattgagtcagagtattattttatttttttcctgggcatattttacctccaaagtggttattttaaaaggcatatttcataaaaaggttttatctgtctgaaacaacatgactgtgtgcagtttccatactcatttgaaatgtgatgaaatgtagttttgaatgtttatagatgtatggtcatttgcatcagtcatttgtagatgtaacattttctacatcgtttatgttatagatgtcttcctttgaagcaatggtattaaaagaaattctttttttttttttctagccaagtccttctcagcaaatcaaccttggcccgtcgtccaatcctcatgctaaaccatctgactttcacttcttgaaagtgatcggaaagggcagttttggaaaggtaatttcaaatctgaagatcttttggtacacttccttcatgtcctcttttgtattctccctggatgaggatagaaaaatgatttttttaaattgaaatttcaggttcttctagcaagacacaaggcagaagaagtgttctatgcagtcaaagttttacagaagaaagcaatcctgaaaaagaaagaggtatgagatgtgcttgatggggctggcattggcggtagacactccttgaataatcttgattctggaatgttggtgccaagttgaaacatgccactaaatctgaatcgtcattttcctaggagaagcatattatgtcggagcggaatgttctgttgaagaatgtgaagcaccctttcctggtgggccttcacttctctttccagactgctgacaaattgtactttgtcctagactacattaatggtggagaggtgagcaggggggatagaagtcaactcttagtgtctctgcacagcctgctttgttttagtttgagaaaaaagttttcaaagatttttggtggggagaatgttaccagaattagcatttccttcaacctgtcaggtttatagttaatagattacttggggccacttcctgcagttgttcttttgctgtgtatgtcaaaactaattaaattcatttgcaacccagaatgactttgttctgtctcctgcagttgttctaccatctccagagggaacgctgcttcctggaaccacgggctcgtttctatgctgctgaaatagccagtgccttgggctacctgcattcactgaacatcgtttataggtaagcctgagagctcttcaggctaccagttttggtataaaggagacgtagcactggctgtttcatagggccttaaaataatttgtgtttatttgcaacttggttgcctaaaaccagatcccctagcacgtgagctggcttgacttaagtgccaagggggaaccagccaagtaggattgtgcctaatccagaatagatgagcagaacaagggctcccttttttcttcactacacaactacagtgaacctaaaatgcctctaatacctttagcaattatctttaagaggatatcttatgaagtgaaattaacttgtgcaactacttttctattcacttttttacagagacttaaaaccagagaatattttgctagattcacagggacacattgtccttactgacttcggactctgcaaggagaacattgaacacaacagcacaacatccaccttctgtggcacgccggaggtaggcgctgtcttggtttggtgcctggtttacccccgccttccaagagagagatgtacaatcatgcacttaactaccaaaaagagtaaactcctctcagagacttcttaatacagttcagtgcaaataaaatacatttgctgtttgatgtagcatgagaaatcccaagtccttctgttcctttactgaaaagtagctgtttgtaagtaagatctgcatcataaaaactttctaaatccctaagtaagagatatcaagtgcccagcagtttcctaaatgtcagtacacataggtagccagtcaccctcaaaaagtccagcagttttatcaggaaggaatctaaagatatctatcttccaagctggctctgggtctctcagctttttcaaactaaatgtgtggtcgtgggattgcttgctttcgcaggttctaaacgctgtttccctggtctgtttttcagtatctcgcacctgaggtgcttcataagcagccttatgacaggactgtggactggtggtgcctgggagctgtcttgtatgagatgctgtatggcctggtgagtggcacattgggaaccatggaacactgcctgctccctacaatattgccttcacacagcccatgcttggccatggtgtcttgcccttaccagtacgcttatcaaaagcagctaagaggcatattggttattttatagttcataagaataatcacttacctggttcttttgtgcatttcacattttactagataggaccacattgaacctgtgtggtggtgaaaaactaccacttattaacatctaccccctcaccctccacacacacacacacaaacacacacacgggttgcaaagtagacacttaaatagcaagggaaaagaaagcattgaggtggggagagtttctcaaatcgagcctaatatttattgccgtttatatctttttctctactggtaatgtgtgccatatgaaacttccaattaagtctaaagtaattttccccttctttcagccgcctttttatagccgaaacacagctgaaatgtacgacaacattctgaacaagcctctccagctgaaaccaaatattacaaattccgcaagacacctcctggagggcctcctgcagaaggacaggacaaagcggctcggggccaaggatgacttcgtgagtgatgttttcctgtcctcctgggccggccgggacgtgcactagacctccctgcccttattgaatgcacctgtctaaattaatcttgggtttcttatcaacagatggagattaagagtcatgtcttcttctccttaattaactgggatgatctcattaataagaagattactcccccttttaacccaaatgtggtgagtatctgtctctcttctaagtatagagaagcccaaagggcatttattttaattcagaattgtctgggggagggttggaaggaatacattggcagatgttttctccataaacctgttattttacctacataaaaagcacatttttgtgtcccaacaaggctcccataatttttagacacatttatcaattcgaagcaccaaaaggcaacaagtgaacattattcttatgtttaactgtgtgtagccttttgagattttgtgcttgaagtgggtgattatggaagttgatataagacttaaacttggtatttaaagcctggtcaagatttccctgtcctgtgtctagtgtgagttcttgacaagagtgtttttcccttcccgtcacagagtgggcccaacgacctacggcactttgaccccgagtttaccgaagagcctgtccccaactccattggcaagtcccctgacagcgtcctcgtcacagccagcgtcaaggaagctgccgaggctttcctaggcttttcctatgcgcctcccacggactctttcctctgaaccctgttagggcttggttttaaaggattttatgtgtgtttccgaatgttttagttagccttttggtggagccgccagctgacaggacatcttacaagagaatttgcacatctctggaagcttagcaatcttattgcacactgttcgctggaagctttttgaagagcacattctcctcagtgagctcatgaggttttcatttttattcttccttccaacgtggtgctatctctgaaacgagcgttagagtgccgccttagacggaggcaggagtttcgttagaaagcggacgctgttctaaaaaaggtctcctgcagatctgtctgggctgtgatgacgaatattatgaaatgtgccttttctgaagagattgtgttagctccaaagcttttcctatcgcagtgtttcagttctttattttcccttgtggatatgctgtgtgaaccgtcgtgtgagtgtggtatgcctgatcacagatggattttgttataagcatcaatgtgacacttgcaggacactacaacgtgggacattgtttgtttcttccatatttggaagataaatttatgtgtagacttttttgtaagatacggttaataactaaaatttattgaaatggtcttgcaatgactcgtattcagatgcttaaagaaagcattgctgctacaaatatttctatttttagaaagggtttttatggaccaatgccccagttgtcagtcagagccgttggtgtttttcattgtttaaaatgtcacctgtaaaatgggcattatttatgtttttttttttgcattcctgataattgtatgtattgtataaagaacgtctgtacattgggttataacactagtatatttaaacttacaggcttatttgtaatgtaaaccaccattttaatgtactgtaattaacatggttataatacgtacaatccttccctcatcccatcacacaactttttttgtgtgtgataaactgattttggtttgcaataaaaccttgaaaaatatttac

SEQ ID NO: 45 - DNA, 33231 bp, Homo sapiens
attaaaaaaaaaaaaaaaaaaaaaaagccaaccacttacgtttacagaattaaaattgcagcctgccgctgacaacctgagaaaaagagacaaagtcagtggaatagcccttgttatttatgcaagtccgcatacagctagccctggagttcctggagagcaaggaacctctgtcccaaacttgactcagagcttccaaagttggtgtatttcaacaagtaagcattccattgagccaacaatttggtaggctaccagcggctctggagcgcctgttgatgatgacagtttttgtgggggcatctcaatatgacacacaattgacactgaccagaaacacagcgccaaggacactctagtcctagccatgaaatgttatgattccaggttttcaggacagagcagagtccacttctcatctccagtatccgtaaaaatttgtccaaaatgtaactaagaaaacacaatgatattagttacttctgctccccgtcaccctcaaccccactgattacgagatgggaactcacacaaaactttgagacaaaagagcaacaagtttgctttattgtttgcttgttttgttccggagtcggggccgggagggagtgcaggaggagggatccaagcttccaagcctctgctccgctctccttctatccagttggtctttagggcactgaaggaaactcttcttcagaaataaccttttaacttttcttctgtcagctgcctgccaatcacggagccagaggctgaggggaggctttgagccggtctgcgagtccggaaggcaaagatcgcgaagcttggcgctccagaacgctcagggggcaggtgacacagtcgtgggttccccggcgggcgctggcttgacagtttcctccccgcccactggcaggggagcgccccgccgggctgcacgcgcgcgcgcgcaggggggcataaaagccgcggccgcgcggagacgcggagctcgcccaccgcccgccccagcagtggctgcaccatgcacgtgaacggcaaagtggcgctggtgaccggcgcggctcagggcataggcagagcctttgcagaggcgctgctgcttaagggcgccaaggtaagcccggcgcccagccgcggaaatttctctgcccacacactccgagactcgccccgccgcccgaggtgcactggcggagacagggaggccgcgcccggcgtgcccactttgccacttccaaaatttgctgaagctgaggctgtgagcacacctcagaagtggctgggagggaacccaaacctaattgccaaatttcaggtccaggaggggagcctcttgtgtgtttattgtttgtccgtctatttcgtgagctgcgcaggcccgcgattcctctcctcttgtctataggtagcgctggtggattggaatcttgaagcaggtgtacagtgtaaagctgccctggatgagcagtttgaacctcagaagactctgttcatccagtgcgatgtggctgaccagcaacaactgagaggtaagacaggggaatcaatctgtcaactgggaacgtgctctcaacaagcaacaacctgaaggcagcccggccagggggccctgggtgccgcctccgctgcctcctcgagagcagctaccttgaagctccaaaagacagtttggactgatacgtttccttctgacagcccaatagctgtaaaaccgaaagaaaggcaagactgctggagaaatccttttattgtagtcatttggcagcattaatgtaatcaaaattcctttatgtattcaaagacagtgctgctgcagtaattattaaatgattgaaattgcagacaaaacttggaaaattaaagtaggttaagtaaggtactgttgacaaacaacttctcccagaaagctggagtccaatgacaatcaaatgtggcagtgtttttcgtttaaacatatcagaatacaagttcaaggagcatcatcacagaagtgctagatgcttttgaccatatgttttctccggctttttccccaatgagacagtactttaaaataataataatagtaatcataataaagtatacaatgttagaattgtagtagaaacatctctatcagcctttcctcaatgctttcctgtttccggctactcacttaaaatagaccaatctacttgtgaagtatcagggacaatattggcatacacaataaacagctttgattataaagctgttttttttttttttgtacatctattggagaacttgagagtgccccaataaacttacaggaaacaaaaattctggagaaaaactagaaaagtaaaatatttgtatttcacaaagttttattcaaagagactgagtaaattgtaaggcactttttaatcaaggggtctgaaaacttttgcaaatcttattccagtgctcctgttcttaaagggacatcaaatgtacatttattttaaaattttaaaatattctgtaagagaatgaaaatgaactgacgtgttagaaggaagtggtgtaccaacagttaagagaaattgtaaaggaaattacataactgaaatctgaaaatgctaataaagacctataacacagatgacaagcatgagcagaacagatttgtaaacacaatgcaagaggaacatattgtaccagaggacaattatgttgattgcacatgatattttggatcaaggatagagccaggtcagatctcaacattcatgctgatggcataaggaacagtataaacaatctgaaagccatttctgtctcaatttatatagtttcataaatgacatttaactacaattgtttttttcccagtatttaaaattaataccttggctataaactcattccttaaggataaatgattgtggaggaggaaaaatactcagacacataagtgacccgggaaggcatgttggtcatgagaaatccacatgttgtctggacatgagcatttgcttgcatctaaaggaaacatgacattgattcttccagtttcaggatttaatgttgcctataacttttaaaattgtttagacagtgtggaaattataaaaatatgagatgaaaagtttcttggagataatctaaacataacttattttccaaatgaacaaatcacagccaagagagtttaggtaagttacaaagagtaccatagcatataaatgtcagcaagaggtagactgtctgttgcttgagcctggaattcaatgggatgtcagaaaacaagatggtatactatacattggtaagggcagagtataaggaatacggtggagaacagaatgaggaaagaaaattaaagcggcaattagacatacatatttaacaccctcattttccaaaaggtgaaggttgtttctgtggagttatgaagagttagaacatactcagaatggaaggagaaaaaaaaaatactgggggacattttctggacccaatttgagattttaagaaacatttttaagattccatgaaaaaaggccgggtgcagtggcttcacgcttgtaatcccagcagtttgggaggccgaggcgggcggatcacgaggtcaggagatcgagactttcactcgcgtctgtgtgaagagaccaccaaacaggctttgtgtgagcaacaaggctgtttatttcacctgggtgcaggctggctgagtcggaaaagagagtcagcaaagggaaataggggtggggctattttataagatttgggtaggtaaaggaaaaaggggggttgcccgctggtgggcagcagtgggggtcacaaggtgctcagtggtggagctttttgagccaggatgagccaggagatggaatttcacaaggtaatgtcatcagttaaggcaaggaccggccattttcacttcttttgtggtggaatgtcatcagttaaggcaggaacaggccatttaagtatcactacttttgtgattcttcagttacttcaggccatgtggatgtatatgtgcaggtcacaggggatataatggcttagcttgggctcagaggcctgacagagatcatcctggctaacacggtgaaaccccgtctctactaaaaatacaaaaaattagccgggcgtggtggtgggcgcctgtagtcccagctactctggaggctgaggcaggagaatggcgtgaacccgggaggtggagcttgcagtgagctgagatcaggccactgcactccagcctgggggacagaacgaggctccgactcaaaaaaaaaaaaatccatgaaaaataaacagtttgtgtttgttgttcttccattcccgtacagtgagtgtaaaaggtacatattaggaaatcttgaaaatgtttttagtaaacaactagcatagtaatttatctatatggcaactgattaatccatgtcttccccaatatgtctggtggttgttaatgattatatgaatttatttcaatcaaaataaagcttatgctgacctactttttttaaggacttgatatgttggtctggacacctgagaatatatttccgtcatgtagaaaaacaaccacaatttttatccatagtgtaaaataatagaagtagaatgaatgatcaaaggcccggggaaacagtttaaatcaattagaactctgtcaaaggctgctttgagaaacaatagacatgtgattggacagtgtaatgaaagacattcaggcctcagaatccatgccaactttatcctgtttgaacatagttttatacaaactagtaatcctagtaatctgaagtagtaataatagtgagaaagaagaaggaaatagtaaacatcgaagtttcagtaatcaaataaaatcaactgaatgaaaagtagacttttactaagatataaaaactcccccaaacatgcataatagatctgaatacacaagaatatttgtattaacataacactttatgaatttaatatggcttatggaaaaggatgtttaccaatagtctaagctacagagcttcagtagcttctcagggactaagagacattgcttgctctaactgacttcaacgagctcttagcttaggatcttagctcagttctctaaaatgtaccccattaagttactgcttatagaacttcaatgtgcatacaaatcatgtaagaatatgttaaagttaagattcttattcagttagtctgtggtgtctgcaaaattctgcattcttaccaagctgccagattgatgcttctagtccacaaaccacacattgagaaacaaggaattaattacactcagcccatgagtttagtaactttcactatgagggtaaataaactgaaattcctctcatggcataggacatgatttaaatgtatacatggaaaataagaatgtatcactaatatcttgttttataattagacacttttagaaaagttgtagaccactttggaagactggacattttggtcaataatgctggagtgaataatgagaaaaactgggaaaaaactctgcaaattaatttggtgagttatcttagctatatttcttgtctataattatttaataacatgatgtttgtaaagaaaaaaaggttcttggagtcatggaaacaaaacaatgacctacaatattgaaaaagggaagttacagaaagctggataaaagcattttcttttataaaaaggaagacatttaattatgaaagtaagtctatcttaaaatattagaaagaagcatgaataaaatataaatgattgcttaactcagggattggcagactatgacccacaggccaaaatagcctgccaactcttttggtatgacctgcaagctaaaaataccattttacatttctaaatggtggataaattcaaaagaagaataatatgattatatgaaattcaactttcagtgtccataaagttttattggaacacagccacagtcattcatttaagaattgtcattggctattttcatgctacaggggcaaagtttaatatttgtaaaagatcctgtggcattcaatgactaaaatatttacaatctggccctttacagaaaaagctcgtcaaccgctgacttatttatttaaaagtaaatcttaattaaatgctagaatgtaacagaaaacaaaattaaagtgacaatcgaactttgtaattagtaggactttttatcctgaaagttcgtggttcgtgtgtgtgtgtgatttccataatgtttgataatgacttagctcttaaaaatggtagaattaagaaataaaattttctcttttatccattaagtcatgagtttatgggttacctcattctataaatacccttgacataagatattggagtttagtaaaaatcaaacgttaactaaaactaaatgtcaaataggctgtgcctggggtctccctgaccttgctaaggtcattctcaccaatcttacaaggcaggtaattgtagagtacaatttggccactgtgtatgtataaaggtacagggagtgacctcctacttcatgatatcctcctagtagattataaactccataaaaacaagaactgggttgtgtttttctttgtctctctctcagtaatcaacataatatcttgaagatagtgcttagtcaatacattttttacttaaattgaaatgcccatgagtaattacctaactgctataataacttgatagaggcaatgaggatgacacttcttcacaaaagagccaaatctgtaagtcctaccttgagaagagtacaaaattgctccctaaacttgacagataactaaaatacagttttcttttagttttttaaatttttcaattatttttgttggcttttcttttccaacttttattttaggttcagggtgtacatgtgcagatttgttacctgagtaaatcgtgtgtcactggggtttggtgtacagatgatttcatcacccagatagtggtcatagcaacccatagatagttttcccactctcacccttctcccacccttcatcctcaagtagaccttggggactattgttcccctttgtatccatatgtgcttaatgttttgttcctgtttgtaagtgagaacatgaggtatttgattttctgttcctgcattaatttgcttaggataatgctctccagctgcatccatgttgctgcaaccaacatgatttccttttttatgggtgtgtggtgtttcatgctgtatacctacccgtattctttatccagtcccccgttgatgggcatctaggttgattccgtctttgctattgtgaatagtgttgcgatgaccctattagtgctgtgtctttcttggtagaatgatttatgttcctttgggtatatacccagtaatggggttgctgggttgaatggtagttctgttttaagttcttcgagaaaagctccaaaatgctttccatggtgtctgactagtttactttcttaccagcagcatataagtgttcccttttctctacagcctcgccaagccaacatccattatttatttattttttacttcttaatgatagccattctgatcgctgtgaaattgtatttcattgtggttctgatttgcatttctctgatgattagtgatattgagcattttttatgtttgttggccatgtgtctgtcctcttctgagaagtattcacagaagtctctttatgtcctttgccctttttttaatggggttgtttggtttttgcttgttgatttgctcaagttccttatataatctgtatattagacctttgtcagatccatagtttgcaaatattttctccagttctgtaggttatctgcttactgctttgatagtttcttttgctgtgcagaagctctttagtttaattaggtcccatctatttttggttttgttgcaattgcttttggagacttcatcatgagatctttgccatggcatgtcttcagaatggggtgctttgtgttttcttctagaatttgtatagttttaggttttacatatggtgtaaggaaggggtccagtttcaatcttctgcatatggctacctggttatcccagcacaatttattgaatagtgcatcctttccccatgctcgtttttgtcaattttgtcaaagatcagatgattgtaggtgtacagccttatttctggcttctccatgctgttccattggtctatatatctgtttttgtaccagtaccgtgctgtttgggttactgtagccttgtatagtttgaagtcgaatagtgtgatgcctccagctttgttcattttacttagaattgctttgactattctgactctttttggattccatatgaatttgaaaattgttttttttaattctgtggaaatgatgatggtagtttgataggaatagcattgaatctgtaaattgctttgagcagtatggccattttaacaatattgattcttcctatccatgaacatggaatgtgttttcatttaataatgacatctctgattcctttcagtagtgttttacaattctcattgtagagatctttcaccttgctggtgagctgtattcataggtattttattctttttgtggttgttgtaaatgggattgcattcttgatttgcctcttagcttggacattattggtgtttggaaacattactgatttttgtacattggttatgtatcctgaaacgtaacttaaattgtttatcagttctaggaaactttgggcagagactatggtgttttctatgtatagaatcataccgtttgcaaaaaaagatagtttgacttcctctcttcttatttagatgccctttattcctttctcttgccagattgctctggcttggatttccagtactatgttgaatatgagtggtgagagtgggtatccttgtcttgtttcagctctcaaggcgaatgcttccagctttttcccactcagtaagatgtttgctttatgttacttcgatgcctatgttgttgaggattttttaacatgaaaagatgttgaattttacctaaaatcttttaattaagaaggaaggttctattttacagtatggataccctccttgcagttcttttaaaactttttctccagtgtacctctttcattatatttgaaaataacttgaaactgtcaagcttccctcaaaatctttttgggattctaattgcaaatatacatacatgtgtttggagagacctgatagctgattttcctgagttgagacagttctgtgatcttcttctactttagggtagaaatgtattgaaatgagatattctgtctgtgaatcatacttacatctcttggctaaatcttccattattatgatatatgaatgtttaatataccattgaatttttttaattcctaatttagtatttgtgcttctgtacttataaattgtactatccttaattttcttttcttataatgttcttatttggtttgggtgtcatctatatcctggcttccttttatgtccttgatctgttcatttctcaacagaggcattcttatctcaaatggcaaatggcagtctgcctacctcttttagtaattctgtaagtttagactctatatattataaatctataatattcagagcataagttgctaatgattgcaatttattgatttttaaattttttttaaagttaaacttctgatttgctgtctgatgattttttaatctattctatattttcagatataaaattagtaccctatcattttctttggattcacattcacctacctttttccattactttattttaaaaatataagcaaccttttatgttaaatttgttgttgctgatggtttattgtgagatcttagaatcctctaatctgtagttagacacaactgggaacatctgcctttttaatatttgtgagtttaagccatttatttttactcttccgttttatactttaatatttactgttttctttttgtttttattctttttctattccttccctaaatgcattatatagctttaattttcttatgctggtaaaaaaaaaaaatatgcattttatatttactctttggaggatacccctgacttattaagagttgtatttcattacatcttttggtagcctgataaaacaaaaattttgaaaatatggctaattgggaactgcaaggatttttaagaatatagactcatgccactttccaaaaccacattaaatgacgagattttctttgaaccaggctatcccagtgaaaaagcacaaattgcacaacagctttctctctttaacattactactgatatttgtaatagcttcatcggtaatatctacagatatttttacagataaaattaatagagtatatagttcctgtatttggtgacttcctaatggacacttgctgtgtcttttctctgaaaaatcagctgtcagaaacagtgtgcaatgattacagctaacgtaaagaaacatggaaatattgaggcaaatattacgaagttacagaattcgactgatgtcttcatccagctgagagggcatgtttgctttaatgtagcctgtgtgaatacctgctctgagctggaaagtgccaatatcatgggcaaataggaaattctggaagaccaggggaattttattgtgatcctttagttataactaacaggcctagttccttctccattgaaatttatccagcctttatttttcttgggactctgctgacataggccacttttcagcttcacatcaggaactgatgatatatgtttacataaagaaaacaccatggaacctttgttaccaatgtattacttaaaaatatgttacttcccctcctacctaaacccgttgcaagagtagaatctgaccaataatttaacttccaacttgattatctctgttactgtaatgcaaatatttgtgtgtagtttatataactcttttttgaaactctgctctggatttaatttgcctccttgggtcttatacaattccatgtttgttcttttgcatgtttttctgtattactgctcatgtcagagagtaacctcttaaaagactttaccatatatctctccttcttctaaaatattatacaacatatttataccattttcatagggcttaccagttttttaattttattagaattatttaaatatatacataattcatgctattcatgctagtaaaccacaagttctttcaaggcagaaaactattgtcttgtgtccttacagatgttagttaatagttactgggtcacctgccattacctgtatatgatattttgcatacatgagagtattcacttctatgtctcagtacattgctttccaaatacattagttcttccaaacggtatcatctgtccttctacttttactccttatcaaatttactccttacttttcactttgctgatctcatccttcttcccactaaaccttttcccagtctttggtttccattaggctattttatacttcctccttagtctgaagccaacaacagcagcattatgtattgctgttcagaacacagaagaaatgttcagcaggccgggagcggtgactcacgcctgtaatcccagcactttgggagaccgaggcgggcggatcacaaggtcaggagattgagaccatcctggctaacacgatgaaaccccgtctctactaaaaatacaaaaatttagccgggcgtggtggcggacgcctgtagtcccagttattcaggaggctgaggcaggcgaatggcgtgaacccgggaggcggagcttgcagtgagccgagattgcgccactgcactccagcctgggcgacagagcgagactctgtctcaaaaacaaaataaaattaaaaaaaagaaatgttcaggaaagaatgagtctttgcaaaactatcaacactcatgctggcaattgggcagaggtaaacttaactttgaatattgattggaatggtaattctgtcatgtagttttgtaactttctgaagtttctgtaaacctaaatatgttcatccccactgatgtggaacttacagtctaattttgacatttaactaatatatgttgaattccttaacccatttatgccagaggttgcaatattttgaatttttgcatgagttaaaaattagaccttggcaatgaccttgaacagtaggatataaataactctcacgtgcttagtattccaataatggaacactaggcataagtgggtcaatatattcaaataagatttaaacaaaataaatgaatgttgctagtcattttttttttttttctgaaatgcacttattgactaaagatttgccctgggaaatacatttctttgggattagtcaaaattagaatccagtcttgactctataatttataaactgttattttatttctctcatattgagcttcccagggaggaaggtaaactccctatctctaaggactgttacgcttaaataaaccatagtttatgtgaatatccagcacagtgccactgcatagaatttattcaataaattacacttcccttccagagcatcaaaatctacattttctggccaggcacggtggctcaggcctgtaatcccagcactttgggaggctgaggtgggcggattagttgaggtcaggagttcgagaccagcctggccaacatggtgaaatatataatatatagacacacgtgcacatgcgtatataatctagaataaggactacgttgttatagtaaaggaggaaaagtgaaaaatgtcatttctacacagccaaagcattagaccctgtcttgtagattcatcctttgaactctttcatttgaaaaattacccagttcttaacctgataatggatgagaaaaataatcccttgcctttctccaccaaagacctaaagataaatattgcttttctaaaaaattaaaaataaatcttaaaaaatctcaaattttctatctggcttcatcttgttcatgtcgaaaacacaacagtggggtgtcagcaaagctgtaatacctgagaataaaagcgtagtgccaatacgcatgaacagaaattctgttcagacatgctgaagccttctgcagaaactaacagaatccaactggcttcattaatttcagccatctacatctttttcttcttatataaacaattaatgttttggttttcctttctaaagaaaatcatgtggagattttattcattctccctaagcctacttactgtcaaattgacacatggcttaagtgaatagaacctccaatttccttttttgttcaagagctactgttaggtaggagaagtatatctgaatccttgcaaaaaaaagaaaacttcaaaaggaaatttttaagagaaaaagaaggtaagtacatgtgtaacctccgtttcagacgcattacctattgtatcgttttctttgcagtattgtaaagcatgaaaaaaataggaattaagatgtcaaaaaagaattttccttttttaaaagtctgagctggaagggataggaattcttaaatccaaaaggaaaagtaaggtttgaaatatcaatttgatcacacaggtttttttttttcttttttttttttggtagtgatttgaacaaaaacaggaaaagtgcctacacatggatataagtggcaaaacagtcaactatcaaaaggatagctgtaagcagtgattaataaaatttagttatagacattactaaagaccagatgtccagctaactgacaatcaccacttaaactggataaaacatttatgtgatttcacacaacacggagttgaggattgcttgatcttacaggtcaatgatatcatcgggcccagggttgtgtcatccctcccaccgaccattctttatgttggtttcatcttcaggatactaggaaataggggttgtccatttaagttacgacattcatataaagcaggcaatgtaaccatttcttcaggttttcttaagagcaacaaaaaatttctcagcagcatccatcctgttcccatctctagctgattgcctcccaggtctcactgaccaaaactgggtcacctgctggctctgaaaccagccactgtcaaggagaatgggatttccatgactgaattaaattaattaatcagtgtctacattaaatttggggagatcaccttcctcgtattatatggagaggaggtagatacaggagcaaaatagaacttttattagaaagaaaaaaggagaaaataaaacctctaggaaatcaagagtaagcattattctatattccaagatccaagagaattaaacagagtagttaagtgtggaatactgagacatgagaaccatatgcagagaagaagggtaaataaattttgcatccaacatttagaaaacaaaaagaatatatggaattattgaagatgttgagaattgagtgaaagtaatagacatttttggaatacaacctgtagcataaaatctcatattgggcaactaagtgaagttttgcagatatatgacaagctccacaatgattaggcaaacccaaagaatccaggtttaatgactaactttaaaaacaaagctcttttaaaacctttcattgataatatttgcagaaatctccctaggtatctggaatagctataaaaactttggtgtgtgaaaatatgggaaaggataatgactgtattccttttctcacttatgcctctggattaggtttctgttatcagtggaacctatcttggtttggattacatgagtaagcaaaatggaggtgaaggcggcatcattatcaatatgtcatctttagcaggtaagggcaattattacattaaatgtaacattttcttactggtaatttggaccacaaaaacaaatcttcaaagcatatttattatcagctcaagttggaaattaaaaatctgatcgttttatagttccatggaattttctattgcaaaatatcaaaagtttgaaaaatatgtttatttctcttaatttaacttgtggcttttaaagttatcttactgcagtaatatttgaaaaaatatatataatttttttttagagccaatatttttcaaaggttgtggtgagactcctaagcaataatgcatgtgaaagcacctttggcaaagtaaaaagcactaaagtgaagttaagatgtctctgctcccatgtgattttagtaacagtgtgtaattttaaaatatggcatatatcatagttaagatatgttaaactaataaataaagccaaacttacatgtagtataagcacattccttaactcgtacatcagtctgaggcaagatccttgttgcaggtatctcttctgtatgcagacatttgaaaacctggctggcagaagttctgccgtcttcagcagggagctcccagggttactttagaactgctggattcctttttctctagcagaaagagaagaagaacatggaggaggcatggctactcttttaagaaccccagcccagtaatggcagaccttctgctcacatttcagtatagaacttgagctcatgtttcacctaactgtaagcgagtctgtctgggaaatgcagtctagctgtgtgcctaagagaagaatggatttcagagggcagctaatcatcttttccacagcatgcaatcctaaactatagtattttcagagtagtatgatttagtatcagctgatatcttatccttcaatactagccttaaacctctgactggactttttggagcaactgagtcaagtgactttactttttaaaactctaggaaaaaatcatcaatgattcttgaatagttcaagtgaaattgtgaagtttaagaagtctgatcaacatggacagcaaatctaagctatcttgtccaaaaaagtgagactttaaaaaattatctgtttggttttagttaatgtggtgatttcagaatagaaatttcagccccacaccccaccccaaccttggcatctcagctccagtgatttgggaagttgggtttggaggtacctgtgattgaacctctgtctgattctcagcatttgtctcatccctctaggaatgattatcaaatggttcttttatatcactgtaaagctgccaccagaggagatttagaaatctcctttagaagttctcaaaaatagactagcatctcattttctgggtcgcttaaagtcaaaatcatgtccctaaagctattacaaacctatttctataaatttttcagggtaatcagattctttttcctagtggtacaactacttataaattataacattttaatcctaatgatactttaaaaggtgagcgcacgggcaatatttgaaaggggtatgtgttccagagagggccaaatgttaagctgtgggagactgaaaccctaaaagcaaattggcaaagctaaatctatactattttgaaataaaatcataagaaaaaaacaagtgactggagaattaaaaagagatatttagtattttcttaaaagtttaaatatttaaaaacctggggctgtgatcaagattgataattctctgtattctttcataaagctaagagggtcagcaaagcttggagtaccatgaatattctacaaggagcccctggcctttatgtcactggaggcactgatttcattctttggaaggctgaaagcctcagagttggatcaatttaggacgatctgggagaaattctttaccataagagggtgcttccttgccccaaagagcatgaataaagaaatgcaatgtagaattactgccttttatctgtttaaaatattcaaatatataatatcatttattgagcactgtttacctgatatcattttaaacactgtacattaactcatttaatcctcacaacaaccctgtgaggtaaactctatataatttccattttgaaaatgaggaaactaaggcaggagaagtgtgaaatatcttgcctaagcttatacatcaagtaagcctcagagctggaattcacatgcaaatagcctggtacaagtcttcttagaattttaaccactagattatttatctatctctaatatctatgcatttatttgttaatctacctgtatttatcccagcctaacagaaaagtaaaagcaactgaaatcgtttcaattgaataaacccttgcaatttgctagtctcttcaggcttcatgggcacagctctaatctcatggctgcattactaaaccttcagtgaaatcttaagcttttgccccatttgatacttccagtaaagtcctaaaaatatctggggagcttaccagtgtcacaagtcaaaacatgccattgagcagagcagtttaaggcttgcaatttgatgtccactttgctttgttggctaggagcttgctttgtcatcccgctcaccgccacctcccgccaaccccaggtgttaatcctctttttacctatgtcagatacaacatttgcaatcatgtgtgggcatttctctattcatgcagataaaacgatgacttgatataaattcagtgataagattgctttggttttaaattactttcctggcactggtacaatttaatgaataatattgcattacaaactgcttctccctctgattttcctccacatgtacaaggcaacactatgtaaaatggttaaatagcttaagtttgtcattgttccctctgcttggcttactactctctccattttcagaagttgtccttggcaccctctcttcgtaattccagcctccgcacctcttgtgtttatactgtttcctcgttgccactggccaatgtggacagtctacttcctttcccatccagggctcccactaacatgccttcaactcacaaagtcttaaaatgaattgccttgtattttatccaccaacggagagcctccaattcttcccataatgaaattagtttgataaaaattcaggatattgtaataatgggagaaggcaaaagaggacccctccgtcttcatcattccctcagaaatggtatcaacaattttatgcccttgagtcatagcatgtaggaagaggtgagagcacaaaaataatctttaaggagttaacagagtacttctaatatttgcctactctgtgttttccaaaccttgcttcctcacagatttttttttcctgtttttctctgtactgcttactctattgaaggaatggctgtgggtaatattcagtattcaactcaacagggcctatcctcatgatctctagcgtggatacagtggagtccttcactgtcacagtaaaaccttaagttggcacactggtttgagtagagaagttaatgagtaatgaccactgacgcagacagagtatcaaatgcaattaataggtttaataaacaggagtagttaagtagacaatgattcctcagcagattatgggatgggtatgctctagtctggagttccacaagttgttctgagtgtggttaacccacatggacttttctacacgagtttttatttataaacataatatacaaacagacactaattttgccacatccatcctgaactattaaaacaaagttggaaggaacaatagaagaacgaagtctggtttaatgcagataatcaaacagctatgctccattaaaacatctcatgagtcaaatgcactccgtttgtttgtttgtttgtttgtttgtttgtttgtttgttttgagacagagtttcactcgtgtcacccaggctggagtgcaatggcgcgatctcggctcactacaaccaacacctctcaggttaaagcaattctcctgcctcagcctccccagtagctgggattacaggtgcacaccaccacgtctggctttttttttttttgtatttttagtagaaacgggatttcatcatgctagccaggctggtatcgaactcctgacctcaggtgatctgcctgcctcagcctcccgaagtgctgggattacaggcgcagttcttaagtatttaattgcttcagattgtgggaaaggaaaagttattgtcacaggaaaaggagcctacctaccaaccctgctacatattcagttagtgaggctgtggtgttcactagggacatgctctgtcactcagtagcattttgtgagagataccatgagggtcttatttactcagaagtcaaaacattggagtctccagaaaatatttaaaaatcatacaaaattttcagcatgtcttaagtaacaacccagtggcatatctgcttgtgctataagttttatctataataatataattagctcataatttgtgttaaggtagaagtgctaaaattactaccttaaataaaaatttcaacttaatcaaacatatgttgagcatttgcagaagggaaatggagatattaaagtaactaggcaaagtttctaccccaagagctgtatatcagtgtctcttatcaagatgacagaaccaaataatttccatgacataaactgtttaaacagaagcattggccaggtgtcatggctcacacctataatcacaatgctttgggaggccaaggcaggaggatcacttgaggccaggagttagagaccagcatgggcaacagaatgagacctcatctgtataaaaatttttaaaaattagctgggtgtgatggtgcacacctgtgttcctagctactcaggaggctgaggtgggaggatttcttcagcctaggagttcaaagctgcagtgagctatgattgcactactgcactccagcctgggcaatatagtgagaccttgtctctcaaaagaaaaaaaaaaaaaatcaaaaaacccagaagcatgatatttaagttgcaaggccttgggactccaatagccgaagaatggactagaatatccagaaattccaggtgaaataaaacattgatcatcttcttctatctctgggccaaaggtaagaaaatcgcatggcaccaccctctactactgctctcgtgataaggaagcaggcctaacacatattgagcaattgccaagctccaggcattgtggtaaactattggctttatgacatccacatctaacttttacaagtctctacaatagaggtcaatttaattatctccaatttatagttgaacaatgaatctcaaacagatcttgaagaatgtgggaattagcagtggtaataaaagcaattttattttgctccattttagcctgtgtcatagagtggatgtactgttcctatgctgtgattcataagtgctcagatgccaactgccatgagtatgggagccacccttcctgcttagtgctggcaaagttctcccaaatggactctgcagagtccattttgctctcttttggcttaaaatagtttaaaagacacatagtagaagtaatcagtaggaatgattaaatatttgtaaatgaggcattttgaaggatagatgagagattcgaggtttcttaacataggaatgagagggctactgagaaacgaatagtcttctagaacagtgcttctcagatttaatatgtctagggactttgtcagatgcagattctgatttcgataggacagagatggctcctgaaattgtgctcccaggtgataccgctccttgaaccacactttaagaagccagccactagtatgcatagggatggatattctttgaatgggtaagggagcttctgtcagtttcctctgaccacagcctaggcaatgactgaacactagtagcaactgtctgagtcactagaaattgctattaaacatatctttctgggaagatttttgttatagaatatatagtggttttatgaaagcatgtgtcactttttttttttttttttttgagacggagtctcgctctgtcgcccaggctggagtgcggtggcgcaatctcggctcactgcaagctccgcctttcgggttcacgccattctcctgcctcagcctcctgagtagctgagactacaggcgcccgccaccacgcctggctaattttttgtatttttagtagagacggggtttcaccgtgttagccaggatggtcaccatctcctgacctcgtgatccgcccacctcggcctcccaaagtgctgggattacaggcgtcagccaccgcgcccggccgcatgtgtcactttttaatgtcgtgtcacactctaaagcataacttaatggcacccataagaatgagaaaaaaaacagccatcagataaggtgttccattatgcggaaaatcacaaatgaggaagttcaccagttactttggtcaggtgtatgcacgaatcgtagataaatatttcttgctagttctcccttttttcttcaagttggagaagtggtggttaaaacagacagacgggtacacatttttttgttgttgttggttgtaaagaaaatgtgacagctttagattcctgcttttttagcgtagttacagaactccaggttatcatacgagtatcagcatccttagattcaccatttatttccctaagttgaattttcagcatttttatatagtccattctacatggtttctctctccttaaaagcaaatcttgtttgcggatttagtatgactgccctgtctgaggaggtttctgtttttgcaaaaaaatctttttgagcttttttaccttctgtgaaatgattaaaactggcttttgtaaatatgggtagaaagattatgaagaatagaagaactaatgtagagatggaatttacatttttttttctgaatgactttctttgttctattagtacacatgtaattttcagatattttaaatgctttcaggtattttaagtgctatatatattatttcgtcagtctaattgtttagtgttattatcctgagtggttttagaaaatatttctttgttttgtgggtagaatttctccctctactgatttttttttctgtaactttacagttgtgacagacataaatctgctactaattatacttggtatattttaaaaagagccattgtgtatttctataaataaacttgcacaatggtgggcctatcagaggtactgaaaaatactgttcttaactattttaatataaggtatctatttttaagcacacaggatttctcacaatgttaaacaaaatgccatttctttaaaagcagagactgctctcacatggtcacaatcctttgttttattgttgttgctattcttaaatcccttaatgttgtgacagaatatttccatgtgctccctaattttgagaattaatttgcaagattaaaaaaaacccatattagttatagtaactggtcctatagtcattatactggtatctggctcttcaaccggtaaaattccaccttcgtcctgcaacaggggtcctcccattggttttacacacttcaattgagtatatttaaaatattacttcattatactttgcatttaaaaggaactaaacacatagttcttatgtgaatttacttctgtagagcctgttgatttaagattagaaacagtccagtttgccaaggttcagaaatcaaaccaagttaggacactataccagatttgtggcattttagtgcaaaagatacattttcattaaaaagtacaatgtggatgaaccgataaataggtcaataaaataattatttgaggtttcatctggtttactcttgatgttgtacaatctgtaggcttgaacaaaggtataataacatatatctaccactataatatcaaacagagtggtttactaccctaaaaaccctgttctccacctgttcatcccttcctcccaccacctcctggtaaccactgatctttcaactgtctccatagttttgccttttccagatgtcatatagttggaatcatacagtatgtagccttttcaggttggcttctttcacttagtaatatgcatttacgtttcctccatatcttttcatggcttgatagccctttgttagagttgaatattattccattatctgaatataccacagtttatttgttcattcaactactaaaggacactaggttgcttccaagttttggcaattaataaagctgctataagcatccacacacagatttttgtgcaagcatgttttcagttctttgagtaaatgccaaggaactaaatgttggattgtattgcatgtttacttttgaaagaaattgctaaattgtcttccaaagtggctgtgccattttgcattcgcaccagcaatgaattggagttcttgtttcttgacatattcatcagtatttggtgtcttcagcatttaaattttagccattctaatgtgtgtagtagaatctcattgttgttttaatttgaaatttcctataacatctgatatttatcatattttctttttcgtttgttgtttgagacagagtctcactgtgttgcccaggctgagcacccactatagtttaaggagagaaaactgctaggaaatattacaagaagtaacccaaggctccctctctagagttcaaggcagagtaagaggtcttggcttgagataagtattttaaatttgagtgtgtgtgtgtgtgtgtgtcatacaaagattgagagagacaaattgagagaattaatttttatcctcaggagtgaataaaatcatgtagggaaagagtgttcatagaaaagcaaagaggaccaggtatatctctggagttttccagcatgtttatgggtctagtcaaggaagaggagccagccaaagacatgaagaagaagctgccagtgaatgtgagataggagaccagcctggaggaggaaatgtttcaaggaaagcatggctgtgctagttgctgctgaggaagggatcaaggaaaatgagacagagatttagccttagcaaaccattgctcattggcagcctccataagatctgtttgactggagtgatcagatgaaagcctgatgggaatgagttgtagagcaaataggaggtcaagaaagtggagacaatgcaaggcatataataactcttctgaggactttccattgaaaagagaaacaaggtggtagctggagaaaaaataagtattatttttagatgggtaataactgagatatgtttatatctcagagtgattctgtttctgcagttgatatcagtgaccattttaagtctcttaaaatactttcatccgtaatttctgttacacaacacttaattgcttctcttcctacctgggctggtttattctgtccttttgctcagtcacctactctccaagagatgactaccatgtatagttgtgcaggttgtaaatggtaggaacataagcggcacagtttacaccaactaccttgtaaattgtgtctccagagtcataccgtgcacacttagtctaactctatgagctgacccttattaccagccccagaacacaatttttatttgaagcacatggaaacaaattctatgttggtgttgtgggcctacagtaagtagtggaagcgtggttaaccaatcctgaagctacaccacagtagcaataatactatacctacagaagaaaaatgaatcagatgcagtagaaaatgttggattcctaaaaaatgtccacccccaactaaaatcattgtcaaaaataataaaacaacaagagcttttctccctccatttaggcttcattttcaaagcaacaaactgaagtataggtagtaaatttctacattgagagtcagtttgcaagttggagagaaagcactgcaaatccaccctgcctgttcaaaacataagaagcaccagttaaaatctacctatattagggaaaaaaagaaaaaaaaacttcaattaacaacttgactaaatgaaacaattgaaaaaaatagaatgttccttacacattacaacatggatgaatctcaaaacagctatcctgagtgaaaagtcagacaacaatataatttatactatatgattacattatataaattttagaaaatgcaaagtatagtaacacaaagcagatcagtggttgcctgtggggaggagaggggcagcagaaagggattaccaaggggcacaaggaaacttttagggtgatggacatgttcattatcttgactggtcatggtttcattggtatatacatatgtcaaaacttatcaaactgtatactttcaatacgtgcagttttattgtatgtcaattagatctccatgaagctgtaaaaaaaaaatgaaaaaaggaaacttggtttctgaatgtctgaaattgatttgtgtaggttttcatctaatactaaaaagtgaggggccagtgctgtggctcaggcctgtaatcccagcactttgggaggccaaggcaggtgcattgcttgagctcagtagttcaagatcagctaggcaacatggtgaaatcctatctctaccaaacatacaaaaattagctgggcgtggtggctaatgcctgcagtcccagctactcaggaggctgagatgggaggattgcttgagccaagtaggtcaaggcttcagtaagccatggtcctgccactgcactccagcctgggcaatagagctagactctgtctcaaaagagagagaagggggcagaaaggaagggagggaaggtatggggcggggggaagagagagagagagagaaagagagagagagaaagtgaggccggccatggtggctcatgcctgtaatcccagcactttgggaggccaaggcaggtggatcatgaggtcaggaaatcaagaccatcctggccaacatggtgaaaccccatctctactaaaaatacaaaaattagctgggcaccgtggcgcatacctgtagttccagctacttgggaggctgaggcaggagaatcccttgaatccaggaggcagaagttgaagtgaacagagatcaggccactgcactccagtctgttgatagagcgagactctgtctcaaaaaaaaaaaaaaaaaaaaaaaaaaaagaaagaaaaagaaagaaaagaaagtgaaagcaatgcaagggtaaacattttgcagaatagcagtgaaaatgtgattagaatgttacaagattcataaaaccaactgccatttaaaaactgcaagcaatttctttcacattccagttgcatttacgaatccacctttaaggaaagtatgtatgttgtctttgcttattaccagaacccacaaagcagtatatttctttcgcctctatgacaccttgaactagctggggttccaaagttcatcatctctgcatatgtaacaaaaattcatttcaaattcatctttgacaactcttatgaacaatgtctttgtagttcttgcggctgtgtgaactagtttatctctgattaaggttcatgctgcatttcctgctatatatgaacattgtcctgaaaccactgcctttgtctcataaacatttaaggaatgggtaaagcagggactaacaagaaccagaagcagcaactcctggttatacttttttattccctttatcttccactcctagtatacctatgtagcctgtggaaacatcataaattcttgttgactgacactgacaaacttaattaacttacacattttacttaacaacaacaatgacaacaagagaagcaacatattaacaatactttgaaatcattgggtggacacactaggtgtgatctaccatcctcagggatttaaactgcccttgtgcaaacatactttataaattgaaacctggcaggcacccagggagtggttatggtctgcatttattgctgaactttggcccaacaccctcaaatgattggtggcattctgggaatagttagctgggtggagatgagcatgtctcagcagaataatttggtattattagcatgacatttgatattaaatatagtataataatcagggatcactgttacttgactcagagaagtcacaaacttaaaaagcattaaaacaagttaatccaaattagtcaaaaacaaatacaagaatgactctggttcaatttgattgctgattagataattaacaattttgagaaataagcttgataataatagttactagagtaaaataggtttttattgttgttgttttgtgtcttttcggagagctgagctaggctggagttgggggagaagagatgctataggtatatgctatactgttttttctctccagaccatgaatttaatcagttactgttgtgcatatgtggaaaattacaaaataaaacattctgtaattgattgaatttcatagttgactacataattatgaaaggaaataaaataggaccacaaatgtttatttctatcttcctaagtcataggacaaaaagatctaggcatctacaatagatcaaataaaaagaagaagttaacttttaattttcttaaacttttggaggcattgttcaagacagattggtgacaggaaattgcatactaatttgtagtgaagactaataatctccaagactctctgaagattcaaattccttcagccattaggaagctttaaaaatgtagaatatatactttttaaaatccagacttaaaaatggaaacttaggtggtaatttactgactttaaagatgattttctttgtgttttagataccatttactttccttgactttccagaaggcctggggaggcagaaaaacacatataactcttggctgtatctctgtgtaacttagctactataaattctggacgacacgggtcatggagcaaataaactacacttaggctactgagtttcacaaagctatctggttttatgttactgtgttattcagattcatcttaaattgaaattatcacaaaatattcatttgcattttcattactgggtatagtctacttattttttcatcaaagcatttaaatgttatatttgtctgtttcaggactcatgcccgttgcacagcagccggtttattgtgcttcaaagcatggcatagttggattcacacgctcagcagcggtgaggctacaacaaccgtcatatctcattttctctttgtacacatttataaaacatgaattctgtagagaggaatcacttgagaaatcacttggatgaaaggtggaaaaatgacatacctccatctcaattataaaaagttatcagatcacataaagaaccaaataaataatagatcatttttaaatgaagtggattctaaatacagatgtgttatttaaaaaaaatgtattaaggataagtaatggggagatagtacttatttccaaaaatgaccccaaatggaaatattattaacttcagcttttctgaaatgcaagatgcaataggccccagccattatttgtcaccagagatacgatgaaaaggagtgagaacatggagctggaaggaggggtggggccaggcatttacttgatagagtggtcaaggataatgtctccatggaggcctagggtgaaaggtgcacagaccttagaaaaatactttagacctaattgatcacatgcattgacagcatgaggtgagaatgcctgcctttttataactcacaaaagagacgcttgaaaggggcctggcaagcaaagggaatgtagtttgaggtatgactcaagacaccagcacaggagctagaccaaaagcagctatgggccactgttgtgagcttggattttatttcaagggcaaccatccatggggcttttacacgcaggagtgataagatcagatttcctttttaagaagaccattctgtctgcttttgcaaattgtgttacaaaagacaagtgtaaaagcggaaagaacagttgtagggggtctctgggtggttcatctaggtgagacaaagagagcagctagagagatgaagagaaaaatattagtaatcaaagaattagtaggagacagaaaaaacagatgcacaaatgttaactgttcagtcaaaatggaagataagtagttctcacactcttaaattgattggaaattattgcttaatttgcaaagacataatcttcagacagacttcttataaacacataaagctctcttacaaagcaaagtaaacctgaaagaccagaaattttatatttaaaattacaagactggaaacttctacagtcaattctcagtatgcatggtggttatgttccatgaagtcacttacaaacactacattagtgactactgaaccattgcttttaggggaaatagagggttaagttcctgaaagcctctggtcacaaaactccaatcaaccagtcaatacataaccttattttatgtgtattcctgtttaaagaaccttatttatcataggttgtatgaacattgaactcattactaaagcacttattactcatgcctgatcaaaatttatctaacacaaatattttctgtacaggacatcagtcttcttacactaaggaacactacacagcacttctgcagtgggtttggcagccattttaaacagcagaatcaccaataaaaaagcacaaaattagaaaaacatggcacgacagagtatagtcttacttgacctcagcaggaacatgcacatcggtgactcaaatttctcactgccctgtgcatgtccacaaataactacaaatgctccacaagtattgatttccagggttacaagtaaattttagcaagcaaatttaacaaatttgtttatatgtaatccatgaataatgagaattgactaattttttaataattgcaaataaaatcaatagtttgtaaattaagccaaataatgttagtctgaaaatacttaaattgtcttccagataggacagattattaagagtgtctttagaatcaaagttctaaacattttcactaaaagtctttttaattaagtattatttgttatacaaccaccatatttgaaataacacttgggatatcgattctaagtctcagctacttagcttcaggctcctgcagagttcagtagataagagaagcttacataattgtttccaggagttgtccagtaatactgatttttaaaaaaaattaattaggtgagattttcaggaattaatacaatactttatgtatgtgttattttactatctatttaccagtcattgttacatagctgggaggatatctaattagtattttttacatcagaaaattgtaagatgctttaatgatcagtttgtcctgtgctatatgtttatgaaactgctgaaacctacaaccttctaattggcagttggctgctaatcttatgaacagtggtgtgagactgaatgccatttgtccaggctttgttaacacagccatccttgaatcaattgaaaaagaagaaaacatgggacaatatatagaatataaggatcatatcaaggatatgattaaatactatggaattttggagtaagtaaaactatgtctattttcttttaaatgatgaagcaaagcattatttagataagctataaaaagggaagaaataagcttatacagttgagaaatgaacacaagcttcaaacttttggtttggcaaactctctgggagaaaatatatttttctgggtttataaatagaatgtaagtttatacattatgaatgttactttgaaatatgtaaaatgcttcattactaccatcagtcataaagttgatatttagtcacctttgaaggcaatgataccttctctgcctaaattccaagcaatattcaaatatagtctgtgaaatattgcaagtttccatgacttcaaccacttttataagaaatagttgatacacacacatacatggacacatactttctcagtgaattatgtctgaattcaagcaactgaggatttcatgaatcatagttatcatgttgaaggaatcagacctgagatcaaatcttggctctaccactaaccatgaacttacccatcatacctctagatgcttcaattttctcacatataaaatagagataatacaacagacttagggactttgaaaaacttaaataaaatgatacatacaaggtacttaaaatggtaactggtaaaaaataaaattttcagtaaatgctagctgttaccaatcatatttctacactaataacatctatatctggtaagtctaagatctactgatacgataaagatgagaaaatgatcatttgctcagtgaaaataatgagtataaattcctcctgccaaaatgatggaaggttacagctaaatttatcaaataatttagttaatatccaattgaaagaaatctaattgaataaattagataaataagatatctaatctagatatctaatatggaattaaataaaaattggaagtagcaatagtttaatgacacacatttccctataacatgttcaacttaatagattcttcagaaaataacttaaaatgaagtggtaatatgcctcattctttcgtttcaaaatactgttttctttatttttagcccaccattgattgccaatggattgataacactcattgaagatgatgctttaaatggtgctattatgaagatcacaacttctaagggaattcattttcaagactatgatacaactccatttcaagcaaaaacccaatgaacagcttatgtgttagccatagctgaaaataagcacaaatagcttatattcagatcctatcttcatttgaatatagcttttaaatgaaatgttacagtttgaagttttccttcatgcacttggtgataaacgttttctaaatttttagttaagtatatggataaaaagttatgaactattaaaaatgtgatgtggaccaaaggctaggttgtaatcttgatagtctaaaaaatgatcaaaacaaatgattttcaaggaatattcaatattctgcctttcagaaagtgtatttatatctgtgcttcataaatattaatgttcttcagaacatcattttaaaggagatacttgaattgttatttaaatcaaaccagatgtaaaacactcacatacaagttcatactttaaaagaggaaagctacttaacaatgacaaatatttcacaataataatttttacttatataccatctttcaactgaacatttcagttcttccaagagcttcttagagtagtatattttgggggcagtcaaggaataaactacagtgtaaacatatcccagatgaaaactgctgtatggaaaaatgacagaaagtaactgattgacactgttgattcacagttcagcctcctatctgggaaagacatttctttcctctgctcactttaagaacttttaccgactccaaaaatctcaggaattaaacttttaacagttacagcaataaagaatagttagtactccaaaaatattatatttaagatgctcaacaagaaaaaaatgcaaatgtaatatttttttcaaattacttctttattgacttgtccaaatttcaaaagtgcctacccttcaataaaacttttttattctgatctccataaattacttagtcttctatgtatagctatcaaggaaataaaaccaattttgccacagccacaactgtaaatgtttttgtacccatgctgaaactcataacaacacagacataaaaatagctgtgaggttttgctttttttgttgtcagctatcttaagaatcattaaatacacctgctttgggtaaaactctttgcaagcagtaattaacactagtaacagtgaaagcacaagatttccaaatcagtcgttttctcaaaaaaatatcgtataagtgactcatcctgtctgctaactccagacctcccagcttgaagccaaatctttccatgtgagattgatatggatttcctagaagtactggaatgttgtcatatcttgccctattttaattctgctatagaaaacaattgccttcacttttaaggagtaatttgaatattaataactctggtctagattttcatataatgtattaaagacaaagtagtgaacatcaatgaacatctgatagagataaactgtaatcaggcataagcttgtttgtatgttctggcagtgactaatcagtaaatgatgtcggtttgcccagtatcacttatcttctgtatttttcctctgtcgtgtaaatagtataaccttttcatttatggacaattttttggactagtagccttcaatatacattctgctttgaattaattttttcaaatcaataaattatgtagacatttaaaatcaaatatcaagtagaattgaaaaatgtgagttacataagttaaaaacttactttaaatcttaccttctataggtagctctaaataaattcatatggttatatggc

SEQ ID NO: 46 - DNA, 51193 bp, Homo sapiens
tagagcccgtggggccccggtgaaaggctgtggctctgggtgactggtgtgtgtgtgtgtgtgtgtgtgtatcagagtgggtggcggcgtctctgctcggcagtggcgcgtgtggcccgccccgcgcgcgtgttctcgcgggccggggcagggcgtgggccccctccggcggagccgcgacccctcccccgggcggcgggaggtgcgcaccggcgcctctaggacccggcggcggccggccgctgtccccgggccgcgcgagtgagcatgtgcagagcccggcgcccgctcgcccgcccgctgcccgccccggctccgcgcccgcccgcccgccccgccgttcagcccggacgccagcagccccggggagccaggcggcggcgccctgtgcccgggcgcgtgggtccgcttgccgcgggcggccggagacgtgcgggcgccggggcttctgggctccgggcactgcggggggctgcgggctcggcgcccggggaaggcgggccatgggcgcgggtgcgggcgccccagccggccgcgatcgcggggtgagtcctgtctctcggcgctccagccggacccccgcgcgggctgcgagcagggtgttccccttgccgcgggcaaacaagtttgtgcagacgcggttgggagcgcggcggggctgcacctgctccggctgcagggcgggcttgccgggggcaccttcccgggggcccggggcggctcggccggggcaggggagagtgagcgggtgcgtgcaggggttgtgggggggcgggggcggcgctcggcgcggccgggatggggtgggggtgcgcgaggcgccgcacgagccgcgtccccctccggagtcctgagagcccgtccgtcacccgggagggcgctgcggttggtcccggggagggggcgagggcagggtgtggggtgcgcacagcttccctcctaggcggcgacgtttacccagaagcagctccctctcgttccgctaccaagagaggcttccggtcagcggagggtttgctccgtctcttggtgaacttgaacagaggcagaggcaaaagcaaaacgtatgtattttgtccagaaaattacctagtgtagagctttgcgtcttcgtaggtgtggacggagactcacgactgaaggttgctaaattgcgtttttcttggctactcaggagcgtacgtacctggctgggtcccctgcctccgggtaacctcgctggtggttttcctgagcatttgtgcgcctgggatgatgcctgctctgctgatcgggaatgcgggtggggaaggggaccgctcttccttccgctgagcagtgggaaggctcatataggagttctagcctcatagccctgcactgggatccagctgctccccacactggccctgcccctgcagctcccaagatggacagatgcaggactccgctgtacttttctaacatgagatacccgcatccctcttgttgctggaacagcatgcttaggtttatggaggcacttggtttatcccactttggcatcaggagtgggggcctttcttttttcctctgatttgcctaggttgtcaggcacagaaagtgagggtggtggggagtgaaagttacaggagatataaagctggcttgccctgcgctgtttgcaatcacccactcctggtggctgcaggtgctggggagagagctaggggaggtttccttgggctatgggagaatgaggtttgtctctctcaatcatgcccccacccccacacacttagattggccctcaggagatcctccgggaaggggcctcaaccggctgccagagctcagggtttctaggaggaagagcaggagctctcccaggcatgggatctgaaggaggcttggcggtggttgggctggtggctgagcctgactgcctcatcttctccgccagaaggctctcacctgtggctgcatcctccaggcctcagcagggccatttccacagctcctctgtaaaaatgccttcttctggggtgaggggatccctctcttcagtgggcattgtgccctatggggtactgccctgtggcctgtggcatgtctggttggaagtgaagagaagctgggataaggcagaaggccagactcctgtctcttcctcctgtcttcctaaccgagcagaagtggatattcagtgccactagtgggtctgctgctgaagcttgagcctccaacctgatcagtttggccagagcactggggaatgagtcacagagctggttccttatggcatcagcctgagcaggcgactcagagcctctgaatccagagcctccaggccctgatggaacccctccgagcagggcctctagggaagtggtgtttctcattatagaagctccaagcttgtactcccatccagctcagacccccatcagccttggtgagaccagctccctgactctttctctggaggtacaatgaggtcaaggccaaggactttggggcagctcagtgtttagaccttcagggccttaggccttaaaatgcaggtgataatcatatacactagcagggccagagctgggccctaacatccagggctgctcatctggggaatgagggaatgaatgtggctttccgctcaccaccttctccctgggcctcctggtctggccttcacattcttcctttaatctctcctcatcatggctttgacaatcgtgctgacatacggcctgaaaaattatcggaagtgtgccacttggagaatgtggtcagggaggaactctgcatatgccctgcctcctggtgtggatgtgagaagtggatggaagaatgggctggattcatttcatcagctatgaaatacagtgcacctgctggtagctgttaaggcccctccccttcacttcgcttcccttcctttgctgccggaagcccctggagatgtgagctcccttctagagagtggctcccttgacatgagggggtcgagagtattctgaggacaaggatgtgcagcaggctgtcttggcctctctcccatagcccgagtgcccagtggcagcatcaagttgggcaggtctgactttggttgggcactccactcacttgtccacctgtatccaactcactccgtggggtttcaacacctgtttaccttccagattctgggatgggcttgagacgacccttaagctttcagcaccaggtggaagaaacacatgaataagtaaacaaaataagattctataaaagagatagcccaggccaggcgtggtggctcacacctgtaattctggtgttttggaagccaaggtgggcagatcacctgagtccaggagtttgagaccagcctggcaaacatggcaaaaccccatctctactaaaaatacaaaaattagctgggcatggtggtgtgtgcctgtaatcccagctactagggaggctgaggcaggaaaatcgcttgaacccaggaggcggaggttgcggtgagccaagatcatgccactacattctagcttgggcgacagagcgagactccttcttgaaaaataaataaaaataaaagagataacccagagataggctggaaaaggttgcgactggctgtttcaaaagtgagaaaggctccaaatcaggcaccaggaaaggaaaaatgccggccccggcgctggtgctgtgtctttctgtgtggacccagcctccagcatggtgcttggaaggatctctgtccttggtattgcacacatgaagaccatgtgatatggctggtgatgatatgctctggaatcagagcgacttagcaatagccgtttgtatttgttcaagttaattggccttctctgtctcagattctgcatctgtatgatggggacgataatgattttggcctcacagatttgtgggaagatcactcattcatttgttcatctgatcattcatccaatgcacttgacagttggtgaaagtacctggaactctaatatggtatgttaaattttttatttatatgaaccccaacagtgggttaattgaagaggtttccctcctttgtgtggaatggagttttgacctattatgttttatacccttttagcaacatattaaaattttgaatcttttttcaagctctgaagttcaaactctcaagagatttgcctcatcaaagacagggatcccaccccatttgcatttcccagaccttgttcccccaaagggcccaacagatttttgtttagtgggtctcttgctttttctcagtctccaagacccagagttgttaggcctgtcagtaatggcagcatggccctgagcatcgaaggatgtccagtccagcaggcacttattttcaggggcattccctgtgccccacccagaggtgggcagaggcactgactgtgcctttgacaggcctacaggctggaaggagaggtagggacattagcagggaaccctgactcaagaccacacactacccaggcacagtttgtagcagcagccttgctgcttagtgcctagcactgaggagtggttctgctccagagatcagggaggcttcatggaagaggaggcatgggagctgaaccttgatggcctgaagcatttcagagccgtgagatggggcacaagcatccctggctggtggaagggcatgcgtgagggtgcttgacgcctctctcgctaaccaggtgatgctctggtgggatacagggcttgcttgtcaatccctgggaagccattacaggctgtggcatcattagctcctcatattagaaagatcactttcttagatggaaaggggacagtcttttggagaggggatggggtacagaagccaggcgctatgcctgagcggggtaggggcaggggcaaggggaaagtcacaggaggggaatccaggagctgtgagcccagctggaggctcctgcatgtactctgcccgggtcctgaagctgagaccccctggctgccagtcactgaggctgaggcttcgagcttctaggacccagatgcccatcaccttgtctagagagcaacgttctgggccctattcttgtcgctggggctcctgccctgcaaagagcaggcagctccaagtcccaagaggtttgcagcccttgctgcagctgccacagtagctgagatccttctggggatgtctggtgtcattttcccttcagctgcctctgcctgttctctctgaccgggggtcacggggaggttgagtcatctgactgaaccccagtggccactggctgcacctgggccagctccgagttctatcttgcagcccccagccccagggactgcctcctctcctctccctgctgccacccctcagtctctggacccctagcctggctgagaagtggccacctgaccagcccaagccacccatcattcaggctgggcagttgctgctccctcggtcccagatggcaacaaagtaatagacaaaagctcaggttgtctgaatatccaggtgctctgggctcctgctccctccctgagacttccagaagcccatttgttctgttactctcttctcatgcttgacagggaactcagaatctccctccccaggccctgctcttctgtagggtgaccccaggacagggcagtgggtgtgcacctttgtccagccctggcgtgccccctctacccccaataaggccaagccccaggcagggatagaacccctctagcctccccctgaagcactctgcagggttccaagatgggaggtgcccacaggaagcacaccttggggaaaaattctccagactttcagaggggaggggccccaggctgcctcccagtcccagtgggctggggcgggaacactcacggacaaggcactgtctggaaggcttggctggggagacaccatgtgtggcatcatctctaggagctttggcccggcatgacttcaaaaaggtgctgacagaggcgcactaaactcctctcaagaataaatcttgcctcgtgtgaaaccggagctgggatggggagagaaataggaagcttcgtgggcataatgtaggccctgggagcaggtggcctggtctgagtgctggccctgagctgtctggctttaggcagtgtgcatcacctggctgagcttcagagacctcagtgctcaaatggggtatgcggggcatttgcttggtgggttgtctggaggaaatgagatggtgcaggtaaagtgcacagcccagttcaacctattcacactgcaaatgcttcataaatggtggcattgacaaagcaattgctaacagcagtctcagcatggggatcagctgtgagcaagagtgggatcctgggtgcactccagggactgtgggggctcagagctggggagaggcctcttgagtctgacttcaccagtggcacagctactacaggcccgtcctccggcttttccttgcttgcctcttttgcattcataaccaatccatgccacagtctgtagggaacagagtagcggaggtttcatgtccactccctaattcgatcccataaagcatatttacccccatttaatggacaatgagcctgaggccctgccctgtgcaatgctttgctcgaggtaggtttactgtcatggacagcctgctggctttcggatgtagtgggtatagctgatggcctcccaggccctatgcagatgagcagtggctagcattctgcccccgaccccaggtgttggccggttgtgctgtctgacttacctcgtggcttggctgtgagcccttgtgtagatgctccaagtttcccagcccacccccaggtctcttttgggttcattcacttagcaaacatttaccatcactgccctgctagctgtgtgctgggatctgggaacatggagataaacgaggtgtggtctgtgccctggaggggggctgccagccttgaggagagacagtgtgatgtgatgttggctataaagtgtggtggaagtccagggcagggtgacaagttcctgcaagttcctgatgctttttttttttttttttttgagacagagtcttgctctgtcaccaggctggagtgcagtggtgtgatcttggctcactgcaacctccgcctcccaggtttaagcatttctcctgcctcagcctcctgagtagctgggattacaggtgcatgccaccacatccagctaatttttgtatttttagtagagacggggtttcaccatgttggccaggatggtctccatctcttgaccttgtgatccacccgcctcggcctcccaaggtgctgggattacaggcatgagccactatgcccagtcttttgtttctccctaccagtctacccgcaatgagttttccaggctaggaatctgctttgtgattttaaaagttgggagtgcagcctgcttcatagaagacctgggccatggaaatctggcctgcacgtggctgtctgttgtgtccacaccagcacccacctccccagaccagggaaaccccttctgggaagggggagcgccagaaaatactttggaggaccttgggaccctgtgtgagatgtattgaatcctgattcatcagctctgaccactcctcaccccagccctacttgtattgtatatccaaatcctatctagaaagtctatacggaattcaccagtatactctgccttcaaaattccgaattgttgaactcctgcctgcctttctgctccatctcatcagaaaacttttcacagcaggagtgctaccctcttcccttcagttatacaggattaatgtgctccctagtttgtaaccggagcccctttgtgagcagacctggagacccctcctcatagaattacatcacagaaaggatgacataaagctcagcccaggcactcttgttaactccatgcgtctgaaagccctcagctccgttaagctgtgttcctggaccgcctgggggcctgtgcctatgcactgctccatctctcccatgtttcaggcttcatccatggctctgggtaagtggaatttgagatttcactgccctgactccataggagcaggtttctgatgtcaggatttgcgtatcaatttatctgtggtctcgttcatttttaagatgtattcataaacaatgatcactgagcatccacactcccaggcctcatgctggggctggggttaggaaaatgaatgaggcatggcctctacccctaaggagattacagactttggagggtaaccgacaagtagatggacagttctgatcaaccccgggatggtgagtgctgggctgagggtcagcaggggctgtggaaagactgaggaatcttcagggaagctttctctgaggaacaatatctggcctgagccttagaggatacacagggatttgataagtgaagaggaaggaaacagcataaataaagggtagcttgtgcaaaggcaccgaggcagatgtgctgtggttccggttcccggtggctctgctggaatgtggagggtgtgtgtgtgtgtgtgtgcgtgtgtgtgcgtgcatgcatgcgtgtgcatgtgagatggggaagccaaaggaagagacctggcaagagatgaggctggatgggctggatcatgaaggggcccttgtgtgtcatgctaaggagcttagagtttatccagtaaccacagggggctattgaacggggttttaagcagggacgcgccatgatcagatgtgcatgttaggaggatcaccctggcagccttgtggaagatggattggagggtccaaagctggaggcagagagatcagtcaggatttcttgggattttctctgtggttttacaaatctgatgaggttgtctggggtgggcctggcagacatatcagcctagaaaatagaagctctggagaaccgtctgcaatttcccagcccagagtttaattccaccttcatttgctgattactgagtctgctacctccgccccagcctaaaggaccagccgacccagatttccagatctctgctctccccgagggcctcggaacctggcggccctcgccatttactcagagagggtcatgcctatctggggtctttgtccgaagcctccaagctttctgggggcctggaatgccagcccaaacattgtccttcctctcacacccgctgtctgtccctggtgcacagagtagccattgagtggctgcacaggcctggcggggggcccggaccaagttagttacgggcagtggcttagtcacgcttctaggggcctttttttctgggataagcctgtccttgtgctaagggctttgctcacgcaacagcccaggtcgtggcagctgcaaaaccctctcccaaccccaacagcacacttcagaggtgccgccaatgagaaccgaaacccagagtgacagctgagtcctggggagtggagagacccatggaaggcagatcagagagccttctgccttctcttctctgggtgctcagcctctgtttgcaggtgcacggctcaggcgctaccctggtcctttgattctggcctctggagtccaggaggcctgggaaggctacacaagcccctccctcccctgggccccatcctgtgtgaaagccaacgaccagcctgtgcagaagctccttccaacccaggctcacagttccagtgcacccctgggagtcagctgattgcatgcatatatcaagcatctgcaacatagtcctgcctgggctaggtacatttatatgtggtagtgtctcattgcaggctgggccatgcagtcattgagagtccaggctccgaacacagactcttcaaaaccttggctctcctgtttaccagctgtgtggcttgggaaaaactagctaatatgccttcttttgccagtttcctcatctgtgtaacagggatatgatatctctaggttgttggattggtttcagggttaagtgagataatatgtaaagtgtttagctgagtgcttgacacacaggaagggctgaggaagagcccctgctgctgttcctcctcccccttattgatattgctgtcatcactgactcctcattattcctcaaggggagagctgttgtccccattttacagatggggaagctgaggcccagcaaggttaagcaacctacccagtgtcacacagctggccagtaacaaagctgggatttaaacctggctttgtccagtgctcctgcaacacagctggtccttggataaagcaagcacagggtgaggggtgtcccagcctgggagtgccaggtagtggacccgcctattacatctcggtgctctttctccaccttccagatttctgcgccaggagatgaggggcggtagagccctggaatggagatgtccttgacgcctgggcagaggctgcagctgcaggaccctgtggccactggagataagtaatggtgccatttgaacacctactggaaacggggcaggaacagtgagtgaccccaggcgagcacaggcaggtgccaggagccaggatgcaaggatgacgcctccggaggccctggcctcactcccacctgggcgctaggagccatcccggggctccagccaggagccctgctgcccaggggcatggccaaacctttcttccgactccagaagtttctccgccgaacacagttcctgctgttcttcctcacggctgcctacctgatgaccggcagcctgctgctgctgcagcgggtccgcgtggctctcccacagggcccccgggcacccggccccctgcagaccttgccagtggccgccgtggcgctgggcgtgggcttgctggacagcagagccctgcacgaccctcgagtcagcccagagctgctgctgggtgtggacatgctgcagagccccctgacccggccccggcccggcccccgctggctccggagccgcaactcggagctgcgtcagttgcgtcgccgctggttccaccacttcatgagtgactcccagggaccgcccgccctgggccccgaggctgccaggcccgccatccacagccgaggtaggcgctcagctgcatttgggggagctgttcccaggaccccccattcagggtcacaggtttggtgtcccctttctctctgcaggcctgtggccttcaccgctagatggttctttccttctgctctgcaggacaggaaggggcctgcgatgcgaagtccttcagggttttgctcactcaccagctggagttccacatggctcaaggctgagatgttgtgagcaggtcacttagcgctccggctttggattcagacagacattggctggaatcctggccaacaatttttttttttaatctcagagaatctagtaggacaagtttcattgaatatatgaaaataggttgggcgcagtggctcatgcctgtaatcccagcactttgggagaccgaggcgggcagatcacttgaggtcaggagttcaagaccagcctggccaacatggtgaaagcccatctctgctaaaaatacaaaaattagccgggtgtggtggcgcatacctgtaatcccagctgctcgagaggctgaggtaccagaatcgctggaatctgggaagcagaggttgccgtgagcagagatcgggccactgcactccagcctgggaaggagactctgtctcaaaaaaaagaaaaaaaaaaaattagacgtgtcacttaatgtcaccaggtctgcctgaaatggagctaaagacgccattcctgggctattgtgacaagcaaatgtgataacacagaggaatgggtcacaaagtggggtccctgaccagcagcatcagctccgcctgggatcttgtcacaagtgcaaattctcagattctcccggagttgcctagtcaggaactctggggtaggggccagcaggctttgtatttaacgctgtctccaggtgagtctgatgcatgctgaagctgagaactcccaggacagaggccctggtatattatttggcactctaactggcagctattatgacttaataaaagcagctaatgcatatgggatttcctatgcacctgtaagtctgctgtttacaggtattattattatatcgcagttttacaggtaaagaaaccaaggcatggagaagttgagtcaattgccaaggttattctcttagtgtgggttccctagaagcaaactctgaaaccaggattcacgtgcatccagtatatttgggatgtgatcccagggaacactagtgggggcgcgggaagtgggacagggaagggaaggcagccagtgaagggtgtgttatcaagcaggttacaaatgggcaaccagacttcatccggctggaggctcagtaccagagcagaatacacatctcaaaggacccgctggaagtggcaggcctgggagacatggaagggacacggcagggtctaccatcgtcacactgctggatgccagcgtggggacagtctggctccgggttggagctgtttatgctgaattatgcagactctctctgcagggtgcagcaaatgtgcctggtgcttggggagctcccagtaagcgtggaagttgttgttggagggtgactgagctcagtcagcttctcagcatccctgtcaccacctcactgggccctgcacccgaagtcagaagaggaactgctctctggactgtaataagtgtggccagagcacagtggaccacctggcagaatataaaaggagatgaggcaggaggagcactggggcctgggttagggagggccacgagtgccaggcctaggagtttggctttattttgatcatgacgagaaggttctgtggaagagaacggagcccaagctgtccttactttaggagactgactggtagctcagtcaaataaagactggagggctgtgggttcatgtcgctgtggaaggaagttccttcagaaatcattcaggccattgcacttgctgtaggatttctcagcaaggctcgtgtgtcagaagggagggaggaatgaggagctgatgcttcagctcatttgacacaggcatgatttctgcaaactctccgcaacacaccaagagactgggtctctgtgcaggttttatcagtgaaacttctttggactaaagtatacttgaccggcaggagtcaacgttacttgagaggaagccatgtaaaatgcacacgttttaaaaatagacctgtgtattgccacttattgggcatgtgaccttgggcatagtgggctcagttcctctcttcattgccttcattccacgcttactgatgagccaccaaatgactcttcacgtgtgcacctcactgtgccctggaggagctcggtctggtgatagagtcagatatgcacccaaattatttctacaaagcacgaccgaggtctgctagaggcacgtgcgaagtgggctgtggactcagtgagaagtgacctttataactgaccagcagcctcccaaagcgctaggattacaggcgtgagccaccacgcccagccgaggcaggcggatcacctgagactaggagtttgagaccagcctggccaacatggtgaaaccctgtctctactaaaaatacaaaaattagccaggcgtggtggcacgtgcctgtaattccagctacttgggaggctgaggcaggagaatcgcttgaacccaggaggcagaggttgcagtgagccgagatcgcgccactgcactccagcctgggcgacagagcaagaccctgtctcaaaaaatatatataataataataaaaataaaaatagaagtgaccagcagaggggagggctcagccctgactgcagagtgtatatgtctcagggaaccagtgagcccccctttactttaagttacccctaatgacttacagaagtgatggaaggggctctagtaaaagctagagagattgtggctagatataagcaggactgatatccaaatttatataccactatggtcttatcagttgttaaaataattataatacttccaggttggctggtaaatggttgctgccctgggccgctggggtgccatctacactctggctgcctccccagtggctcccagacctcccccttatccagcaaagagagggttaatgtgattccagtgccaaatggtggcaattctgaatggtcagtgccctccataggttgtcaagtattgtgaatgtgtgccaggaccgaaggaagaatttgctctcctttgaacagcaaaacaaccaagtctggggaggctgtgctctcatggtcatcagagaatgggggaaggcagggtgctggcctgcaatccctgtgggccccttcctgtcgtggggctccatgggccaagcacagccagtccggcctcactggtggagagtagcctgcagcccagccctcaggacagctgctggggcctcaaacaaagcgggtgtctctttgtggcccgggcagcccgccatcctcctgaaaggggatcctgtaaggcgcggaagctgcaggaggctccatcaatcactgagcatttcattataccttggacaacatccataatggaataaaatgtctgtaagtttactaggggaaaaatagtaacttctccatagccagtttgttttttattgatagtaatttccaaagacattccaatatcttcaaagccgtcgttactagcctcacggtatgtccattttgatgtgcaaatgaacagatgcagagtgacagacaataatgcaatgcctccatttcagctgaaaggaataaatccgcctcagagtgggtcccagtgtatccctcggaagttctttctttcctgaacattctcgcctctgtcggggagttagaaaagctgttcattctgcgtccagataaaagagctcgcctcctcttttatccccgtcgcacactgagacggggccagccaggcccgggctcgccctccacgccggtgagctccatcaaatggccagctggtcacaggtgggccactccctgtttccagaagaaccagagcctgactgcttgaaacaattttttttctctcttttattaacgtgttaattattcagctaatatttactgatccatccatcacacgtcccaggttagagtgtaggatcagaataataatggctgttatttatttggacatctgttatgtgccaagcattgtattgtatagacatacatctgttatctcatttaatttaatcttcaaacagccttatgatgtaagtgccgctatcactgttttaatgatgaagaatttgagtttctgggaagaaaagtaatttaaatgttttcattattaataacaatatattaacagtaaaaacaatcgctgctgagtaattactgcatgccaagccttgtattagacattttacatgtgttaccttatggaattttcacaactacctcatggaattggaaccgtatccccattttatagatggggaagttgaggctcagagagaggcagctgcacatcccagcttgcacagccagatagtggtggagcctattcccaaaggctgtctccatccacttcctcagaagcatgtacagcctgggaagcatgtacagccacgtgcagtctcagtctgggaaggtcttgagcccaagcaccttgaaaaccttgtggttaatttcccatctacaatgataaatgtttaataatcctgagcttatgctttggctgtttaattgaaagctgaaatggaacttctttgctgagcaacccatcagaaatttctcaaatattagttttcttttactaagtaggcaggcagaggagaaggatccattctcactgacccgggtgaaagctctgtgcagtggtccgtgctggtggcggtggacctgagacttacagaagtagagagatgcacgtgggactggatgtctgggcagtggagggcagtagcatgtgcctgtgggcgtggccatgtgtgctgatgggcgtccccagatgaaggtgacctcaagaggctcagagcctggctgggaaccagaccctttggcaaacactggagaaggtggccgttgttccctcctcagccctggggttctgtggtccgagggtctcctgggtcccttgggtcttggtgtggtggggagtcctgtctcctgccatctcgcttgttctcctctgctttgccttaacctggggccctggatattgcaccttggtgcagtcagtaagaccgtcctgacttcatatatatatatatatatatatatacttatgtacttcatgcattactgctagtccccatggataataaatagtactataattgttcattcatatatatatattcagacagagtcttgctctgtcacccaggctggagtgcagtggcatgatcccagctcactgcaacctccacctcctaggttcaagtgattctcctgcctcagcctctggagtagctgggattacaggtgtgtgctaccacatccagctaatttttggtatgtatatattttttgtatttttagtagagacggggtttcaccatgttgaccaggctggtctcgaactcctgatctcaagtgatccacccgccccggcctcccaaagtgctggcattataggtgtgagccacagcacctggcccccttctttgtatttaggctctctgctaagtacaaagaaaagtcactccccgattcaggcccagaagtggatggttggcagacttcctcccctaggccactcagcagtggccccactcccccagccgctgccctggaccaggctcttggcaggaacagagacagtctcccttgccctcacggagcatccaggcctgtggaccatcaggacttttctcctcactaaaaagccgcttgggagccactggcaggctgctgggaggtcctgggcatgttacttcccagagacagcctaatttctctggaggcagtggtgcgctccccaggtgacatgaatgagcggaacgcggcccttcctggggagacgtgcagcgtgtttatcacaggtgcccgatccagatctcggcgcagctattgtgggtgtgcgttcacggcttggggactgtgtgacggcgtgtttgcaaattcccatgccgctccttcaaaacactggtgcgcgtgacatttacatgcctacccgcgtttgcatcaggactgccatctcccaacttctctgtgcatctctgggagatgtctccctccctcggggtggcagggcagggctgtgacagactctcactggcgcgtgcacggctggcttctcactgcagcatgagtgtccccagtatccccttccagggatgtgtgcaggtgaccagcctggagaggcctctgcggtcacttggccctgttgtttcccacacaggacacttgctcccattcttaacagactctgcggacacactccagagatggggtcttactccctcttgggacgacagactttatcttgaaatagctttccccgtttgaaagatcttccttaaatttgctaaaatcaaacttgccctaactgatttcttctctctggcccccaaggaggcaacgaccctgtctctcagggcatttgccaaggtagagaggcctctctgagcccagggagggcagggctagagaggaggggtagagtccatgagaggtaatccagccttcccaacttctgagttggggtagtggaagaaagcagtggtcaggccgacgcctggctcctggcagagccgtcagggtggacagtgggccattaaaaaagagaaaatgggcaggaaacaaacaagtgggaggtgtcagatgctcactttgctcagcactgagtgggagggaggtagcctgcagcactcatctcccgggtttctctgagagtggccttggccaggaaggcagaggttcccctggcttttcctaagggtgggcccatgattcctgggcctctggtattagccatgcttccctttctgcaggcacctacattggatgcttcagtgacgatggccacgagaggactctgaaaggagctgtgttttatgacttgagaaagatgactgtctcccactgccaggatgcgtgtgctgagcggtgagtgctggggccctggactgttgattctagaggcaggaaggtccagggacagttccagaatgaggaggcatatcagctaccagttggctgtcatagcataattggaactcactgctcagatcccagttttccagaagaaaggaagtttgttggcagatgacctgggtgccgggagctgggtgctgggtgatggcctgggtgctgagagctgggtgaccgcctgggtgctgggagttgggtgatgacctgggtgctgggagcttgggtgctggtgctgggtgcagggagatgcgacttccagtccagccatagcagggactcagcgtgtgactttgatgagttcttttccttctctgggcctcagtttacttatatattttacaataagataaagggctttaactgagatttctctgagaggatctttccagctctggtaggaaaagtattttcaccttgtgtctataacaaggtttactttttctgatacttccagctcacccagtagttgccagacacttgtcatgtgccagggaaatggttcctaatgtcaaggccctcacaactgactgtgtgtctgtgtgtgctgcacacacacacacacacacatctgagagaggtgggttaaacagaatcagacttccctcttcacttatttctcccacagatttttttcaccttttttttttttttgagacggagtctcgctctgttgcccaggctggagtgcagtggcgcgatctccactcactgcaagctccacctcctgggttcacgccattcgcctgcctcagcctcccgagtagctgggactacaggcgcccaccaccacgcccggctaattttttgtatttttagtagagatggggtttcactgtgttagccaggatggtctcaatctcctgacctcatgatctgcccgcctcagcctcccaaagtactgggattacaggcgtgagccaccacacccggcctcacctttgttatgtcacataaattctttccatagtcagccaggtagcaattagttatccccattttacagatggagaaactgacgctggagaaagaaaagacaaggtccttacataaacatacgttatggtctagatacggtggaaacaggatgatacattctctttttagtctcctaatagatcaggaaactgagactcagagatggtaagtcatgttcagggtctcaccgccaggacgtggtcaaatggggacttgaagcttgtgtttggattttcagtctgggcttttcacatctaaatccactgatttgaaagtgttgactgctttctgtagctgaagtcctgtgtgattcattgagggttctgtttccaacctttctttacctacggtattactaggtcaaagtaagtagagaaatggctgtggagatgggggctgtgcagtagggcccatgtgtaacaagatgtgacacgtggcaggcacttcagaccagctcacggccgctcaccatgggaagctgttaaatgtttagagttgttgtgagcccgttctaaaaccattgggagcttaaaatctcctatagtgggagtgtttacatcacagaaattggcaaacagtacaaaccagagctctccctgtcgcatactgagaaccagcttacaggcacatcacagatttagacccattataacctgtaaccacggcactctgcagggcagagctcagggctggcaagagggaccaacggggctggttccattcgtttatcacaaaggaaagactgttgcctgaacttagcctggtggcccttgagtctggctagagactgattcctaaggccagccataggccgatggctgtggcccctgtctgttcacctagacccaaactcagcttcaagtccagtccgtttcctgactccagactcagttgccattgcatgacccacataaatcctctccacagtctgccaggtagcaaggagttatccctcttatacagatggagaatctgaggctggagaaagaaaagacaaggtccttacggcacatgtatacatatgtaactaacctgcacgttgtgcacatgtaccctaaaacttaaagtataattaaaacaaaaaacaaaaaaaaaacatactttctaatctacatcaagctgaaacagtctgcagtttagaccgcagccctagctctgggccaaggtccggactcacccaggcctcctccctgcaggtcctatgtctacgccggcttggaggccggggcggagtgttactgcgggaaccggctgccagcggtgagcgtggggctggaagagtgtaaccatgagtgcaaaggcgagaagggctctgtgtgcggggctgtggaccggctctccgtgtaccgtgtggacgagctgcagccgggctccaggaagcgtgagtgtgccagcctcttcctgagctttgtccgtctgtcccacccgctctggctgcccatcccccacaacctctcaatgaaactacctggggcagaacctgtgccaacctctgccctcccttccctattgccatcactggacaggctcctggcagggcagggatggggttaggatccatcgaaggcttaactgcttgagttcatgactgaagcatacctttgcctgtcccctgcaggagagagaaactgattagggggcctgggtatgcctcagacatgctgtgtggcctccggcagctcactgcccctctctgagctacggtctattttgtaaattgcagagggagacctagatttctttcttttttttaatttttatatttgattttttatttttgagacagagtctcactctgtcacccaggccaggctagaatgcaatggcccaatctcggctcactgcaacccccacctctccggttcaaacaattctcctgcctcagcctcccgaggagctaggattacaggcacctgccaccacacccggctaatgttttttgtatttttagtagagacggggtttcaccacattggccaggctggtcttgaattactgacctcaggtgatctgcctgtctcggcctcccagagtgctgggattacaggcgtgagccacgcacccatccaggagacctagatttctagcagtggtgtgagctagataatcagaaaattccctaactataaagcacctagaaatgctgcataaaatttagcaaacattattgtaaatgcatagctgaactagcagaaaagtaaggcaatcccttggatccaaaaatgaagaaagaacaaagacccacagtggagagagttagagataggctgtgtggccgtggggctcagcggagggaagtcgccaggctgcatggccactctgtttgggtcttaatgtccaagcaggatagggaaggaggccttgggcttctcagggtaaggaattggaccctgaaggggcccagctcaaaggaggaatgggaaactcaggtttgtcctcactgcaagatgatgagcacaaatccgcttcctctaatcacagaaggctcctttgtaaaataatagggctgtgcactgttgcacatgctgggggccattcttttcatggctgggagaggcagattgggaaggagtcagagcctgggagaccacccccaccactggcaagggtaggacagtggtgatggaggcagaggcacagcccagggtccaggctcaccgcctctggtcatgccctagtaacagggctccaggagagctgacggattagttcaagaatggggcagagcccaggtaaagaggtattggaacagccgggcgcggtggctcacgcctgtaatcccagcactttgggaggccaaggcgggcgaatcatgaggtcaggagttcgagaccagcctgaccaacatggtgaaaacccgtctctactaaaaatacaaaatttgccggatgtggtggcaggtgcctgtaatcctagctactcaggaggctgaggcaggagaatcgcttgaacccgggaggcggaggttgcagtgagccaaaatcatgccattgtactccagcctgggcgacagagtgagactctgtctccaaaaaaaaaaaaaaaaaaaaggtattggatcaaaagctaaggcttcacaggggttctggggagggctgtcgagtgagttttccaagcagcacagaagccgagccctgagaaccgtgggtgaacctaaaggccaccctggctggcaactgtctgtggggtcacagtgcccagaagagctgctccgtgtttgaccccagctgaccggggcttcttagatgcctcttgcattcagacaggatgtgtctgggagctcaggggtccagatggggcaatggggacaggggcggagaaactgaccacacatcgtttagctgacaggttcactagtgacaccatgaacttggcagtgtctcaccgacacctactctgccaggccctgacctcatagaggggtttgccatggcacgtgggcacagtcctatcctgtcacctggacatgcaaacgggcttcctgaggaccaaactgctccacgctggcttcttggagcttttatttctttggtttcaaacaacattcctgcccccaagtaagaccaattctatatatggactcccggcggccctcccagccccatctgcctgctcagtaattgattctgaaaggcagttgttttgctttaggttgcccatggattaagagacagatggtccaatcattcaagccagccctagatccggagttggctggacttgctgtcatggttagtgttgaagatggtgtcctagctgcctctttgggcaggctgtggagccccccgtgaggtacctttgccttcctgcccccttcctgagggaatgagctgacaggatctctctcaagaggtgaccaggtgaccaccattgtgagctgcagcttctgccagcaaggagcattcacaaggagtaagacccatgaatttgctccccaggttggaatcggagtgggttctgagcaagtcatcaacgtcttcgccttggaggcgtcattctgccaagtgaccctcaggctcccacctggggaatgagggagactggactgtaccaggtgacaacctgtgtcctgagagtcgcatcagtgaagtgcggaggcagccaacacttccttctttagcggctcatggaccactcacctgttgcagtatatgcagtgccttcctgctttatctcattcagttcattcgttcgctcaccacgtagtgggcacctgctgtgtgtcaggatcagggcttggtgtggggaacacaggggtcacccaggatgtagcttccccccaggagctgtgttctggaggcctcatggcccccttttgtccctccctgtggcccagggcttgctgaaatcttgatccctcccccatctctggattgtgcctaccctgatgactctccccattgtctgttctatccccgtggagctggttgaggaccagtgcccagtccattgaaatgtttgttctttggggcatcaatcatgccaaagaacaggaaagagttttgtgagcccagcacctgccaccaccctcgaccttgacaccaaaagccagggcagacacacggtggtggggagacatggccccatcaggggatgtgcgtgggtatacattgttcctcatgacaaccctaggaactacgctgtatgtaggtgaggaaattgagagtctgagcccgagacatggcagagttgcagagctggtcactggcagtgcaaggacttgaacctaagcacttataaccctaagccctggtgttttccccacactaggctgttgtctgtgccctaataggtcgtgccctgacacgtgcaccacaggtgctgtggtcagttgagatgggcttccagatccagggtttggtcctacttggcagattctggctggtaaaagggtttctgtttgcaccacgtggtgtggcagctagagagccaggggagatactgagccctgggagaccccgtgtagagaagagcatggggtaataatcaggatgccatctagagaaaccctgatgagtctggaagaaatacgagcagttggtgcaagaacattccagaaagtttgttcagctccaaggaagccagctagggcactggacttttccacctggaggctctacagagcagcaggaggcttggcaggaggcttctttgtaacatgggcttgaggagttcctagaaattgagtgggagttcaagatcagagagaggcaaaccttgcaaagaggcaaagcagtggtatgactccaacggcacagcaagaacaaacatggctgggtttcagatttccatgtctgcttttcttttaatgcatcttccggtaggacattgaatttttcacaatatcagcctctcaggtcacctaccatgggaggaatctggcacctagtaaaagcaccatccaaatttgttgaaggaaggaagaaagaaggaaggaaggaaggaaaaggaaggagaaggaagggaggaaggaaggaaggaaggagaaggaaggaaggaaggtaggcaggccggcaggaaggctggcattatggagaactggcagaagcaagagagggaaggaaggaaggaaggaagggagagggaaggaaggaagaaagggagggagggaaggagggagggagggaatggagaactggcagaagcaagagaaggaaggaaggaagggaggaagggagggaggaagggaggaaggaatgacttatggagaactggcagaagcaagagctgagcgctgcagtttcagccaagtggtcccttgtagatgaccctggacggtcaaggtgctgatgcctggtttctctcagaagctcagcatgactatgtcccatgcagggccgttttccctccctgatttgaactcgcctcgtaagtttatttatacctgtctcaggacctaaagccagcattttccctggtgacaggcaccaacaactggacaccatctcttaccagaaacccctctcttttcccccagggcggaccgccacctaccgcggatgcttccgactgccagagaacatcacacatgccttccccagctccctgatacaggccaatgtgaccgtggggacttgctcgggcttttgttcccagaaagtaagaccaagtgatcatttcacaaccctttcctttaagtgtgtgtggtggtcctgagagaggggggcacatgtgctgggctgcgggtgtcccctctggcagtccagatgggagcagaggaagggggcatggatgggaggcaggcaccaggtaccacagagggagccggcagggagcccttcgcctctgtccaccatgtgaggctgggtggggaattgtcagcaaggcttgtaaagccgaaaggagagtgcctttctggatgcgaactcttgccacaagtgtcagatgttaaattgacttggtttggaagccagaagatgctggctcgggacttggggatagctgatggattttctgttattggtgctgacggtgttgggccgtgaatctgatgacaggggctggagccacacttgcatctttggtttagcctgggctgaggagtagagcgtgaccccatggaggggcagggctaggcaccaaaggccactgaccccgcattgcatggtagctctggggtggggaaagttggtcaaggccagaggtggcttgcaaaaagcagggcctggagtgtgtgaagcaaggctgggggagacccagcagactgtgtccaaagaacattgagatctcgggctggagtcaggcagactccagattggggtggatgctgtggctctagaaatggcccttggtggcagtaggcttggggctggggctgtttcacatgcgctgggattgctgtaccctcaatgtggctttgatacttggcaatgtaatagaacagggctaaggtgagaggatggccttggccaggatgatgatgacgattatgacaatcaacagaagctgccattcgttgatcgctcattccatgccaggtactgttccaagcgctttatgggttaactcatttaatcctcctaacaaccctacagctaggtgctgtgattatctgcattttccaggtgaggaaactgaggcagagggtttgagccgtgtgcctgaggtcacacagccagtaagtggtggggtcagggtttgaactcaggtagctccatagtctgctgtgggttgaagggtgcaggggtggacttcaatgacagcagatgtgatcggatctgcaggagcagcacagccatcctctgctgcacccccccactcccgctctccctgcttcatgtgttcctccgcactctggggacacctcccttggagggggctggagaacaagggggctggacacctcccttggagggggctggagggggctttcatatgtgctttcttcttgtccaagtgcatcctttgaagtggctctcctgcgtcaccagcatttccgaagccacagccaaggatgtcttgggcatcagggcacccacgacacaattaaatgagccaaaaaggcagtttgttgatttgcggacatctggcctggggacctcctcatcccttctcctcctcatgggagcagagcgatgggtagaggcagcaaggatgcgcgctcagctgccggccctgctggtgctctcaggagaatgagccaccctcctagggcttccctcacacctgcagctcagagcagttcccttgagaggccctctggttggaatcaaaggaactctgtggtccagaccaggctggaggcaggcctgccttgagcaaccagcttggatagtcctgctgtgtgctgggcatggcactaggagccttcctgcggggggttatctgctttaatcctcccagtagctcccaatgggggatactcagatgcctgcttgctgcgagaggctgggcaggtgtgcagagctgagagccctcaaacacaggcacagagtggccggctttgcagctcctgctcctgatgccacacacagccacacactggcacagagcggccggctttgcagcccttgctcctgacgccacacacagcccgtggttttacacactgctgccattcggcgttatggaagggggaagagacggagaagatgaggaggaagagaagggaaagaaaggggtggccattgtggccatgagccattagtgtttcggactagttttaaataggaacatgcttacttggagcataatgaagacgccaaagggcatagcagggaagccttcctctcactccatgcatttccttgcctggattgtcctggcttctcatgtctacttccagagagactgaatattcaagcaactgcatccttgcccattctctaacaagccccgcagccgggcaggagctgcacccgcccttctgcactgaactcttcaccggacagcctgtctcggagattgtctcacgtcgcgacacaaagtgctttctcattcttttttaccattgcacggaggtcctataatttatttaaccagtttagcatttcgcctatttccagccttcacaaacgatgcggcagtgactacctgtgtatgtacgtagatcactttgtgtgagtgaatctgtaagaaaaatattccttggagatgctgggtcaaagactgagtgtctttatcattttggtaaactttgtcaggttgtccttggcgaggattgtattcattttataccccgatcagtgatgtgtgagggggaggcaaggcaccctcgtaacccttattttgtgtgtgttggggggctcaaagcagcattttaggcagatgcctcagttttctgggggtcctccctttgtgtacctcattagggcccagagagttctttcttttttttttttttttgagacagtgttccgctctgatgcccaggttggagtgcagtggtgtgatcatagctcactgtagcctctggctcctgggctcaagtgatcctcccaccttggcctcctgagtagctgtgactacaggcacacactaccatgcccagctaatttttttgtgtattttttgcagagacaggggggcggggtggggggggtctcaccaagttgcccagactggtcttgaactcctgggctcaagcaatctgccctccttggcctcccaaagtgctgggattacaagcatgagccactgtgcccggctggtccagagagtttgtatttgtgattacagacaagaatttaaaggcttataactcttcaacttgtattttcagccttccttcatatttactggcataaatccagattgctgcagtttcacactggagcatgtgccagaagatacacgcaggctcttggtgtcttgtgctatcacacattagcaccttgtccatctcccctcacaacgcatttcaaggacaagttcccttctctgctatggccggagcagtcgtgaattgtttgggtcagaactacatggaaagggcatccaggtttctcagaaacagcctctgtcctcagcactcacaacactggagccagtgctgacacctgatccttatccgggctgcctctgcgtggtcagatgggactgggagggtggtgtttcctgagttccattgtttagggctgcaacatttgcagctgtgaggaacagagtcatcatttccagctttaaagtttaaagtgggtattggcagcgcatatttagtgggacttggcaaaacgcaaatgctgagacggtgggcacagccaggggcaggtgactctcactggtggcagagtaagggcagtgcctgaagaaggtgaagaaggcttggaaggaggctgagaaaggaagatggttgcaacttttgggaagggttggaactggaggatgtggggcagtgttggcaggtggctgaggggattaaggagtgtgttccaagaagaggcaactgctgagcaggaaccaggtggcaggaaagcagcccaggtggcccagcgtgcagggttacttggggggctgtgaaaggtcagggggtacaaattgcagagggctttgtgatacaagagttattaagaagttattttaggcagaaagtaaggttctgggtggaaattttcctgtaataagaaacaacccccaaaccatctcttttctaacagaaaaggcggcttaaagggccaggcacggtggctcatgcctgtaatccctgcactttgggaggctgaggtgggcggatcatgagttcaagagattgtgaccatcctggccaacatggtgaaacactgtctctactaaaaatacaaaaattagccaggtgtggtggcgcctgcctgtaggcctagctactcaggagactgagggaggagaatcgcttgaacccaggaggcagaggttgcagtgagccgagatcacaccaccgcgctccagcctgggcgacagagcaagactctgtctcaaaaacaaaaaaaaaaagagagcaactgggttcactcaatatggtgattcccactgtcttttccttgttaccaggtgtaccgagtgtcatggccacctccagataacaccatgtgttcagaacatcatgatgacctgcatttgcatattaaaggactaaggtgggagggccaggtttttcaagggctacgtaaatgacacacctggtcaaaccaatcccctgggccttatggaacgcagacaccgcttcctccagcatcccaatataagcagccacttttccgctgcacacggggttttctctttgttcaaatcccccctccctctgtctctgtacggggagctgttttcttcttccttccttctttcttgcctgttaaacttttcactccttaaaatcaccccacatgtgtccatgtctaaaccggcacgagaccaagaaccctggtgtccctccagtcatcagagccatatagcttgaatgcctgcctcaaggttgagacttttttcagtgggtgggaggggctggtatggcttgtgtggcactttatagctgcaggtaggatgttctggagcacggagaggatgagagctaataaagaagggagtaggtctaagagacaccacagggttggaatccacaagagaggatgtgggggcatgaaagaaggagtgggaacccccagggaggaggatgaggcatggatgggtttgtgggtgagcggggcagctgacctgtccaatgtgggagggaagttctccttggatccttctgggatacagcatttctcaggggtaccctcagagatgccttggcaaagctgccacagaagtcgacctgtgacctggttctggagttagggatttcaggtagggcaagaacagtgccctggatgtcatgcctttaagtcaaaccgccatctgcccaacggagcgagcctttggctcccagattgtccatccattctcgcttgtctcgcccgtggatgtgggtgtaacttgaactcaaaccgtctgtactgttagcccctcagctctgagctctgcagatgcctggcaggggttttgctggaattctgacttcactctagagcaggggttcacagccttggatctgttggcatttggggttggatattactcatgttgggatctgtctgtgcattgtaggatatctagcagcatccctagcctctacccactagatgccaacagcccatattccctcagttgtgacacacagtccccacacattgccgtatgtcctctggagggtaaaatcacccctggttgagaaccacagccctggagagccacctgaagatgccaggcagccatgcccagtcatggcccatatccccgtggggctgaatcctggggagcaatggtctcttccaaccattgtgaggatggagaagcaaattctccctctagtattgaggtctgatggatgtgaaattgtttggaagttgatctgacccagacctgcagaggccagagaactctttgcagggaatggtatcctctcttccctcctgaatgttgagggtggcgagagaggtgaatctggggatgtctggccgtatttgcctgctctgaagtgccaagcacgtcctctctggaaaggccagtggtgtggaggctgcctggcagtcccggtggcagctttatctcatcctaatttggccgaaaaacaagctcaaatgtcctatgatgtgggaatggttaaattatgccacggccatacagtggactataatacaaccattgaaaatgttttcaaagactttgatgatggaaaatgctcacagtagaatgttaaatggggcagagctgagcctgggggtaggaagctaggggcttaattagagctggccgggcagtggggctgggagcagcagatgtgagaggtggggcttggaaacaggaaaagaggagggggttccttgtagtgcccccacctttgagcaccatctgaggcttatttgtggccccagataaaatgtctactgtttttgctagttcgcgaaaatggatttggggagatccaagagtgtagtttgacagaaaaagaacattccaggtgatatctgcatcttaatgatctgactctctgccagcaagagggaattgaccaatgtaatgtgtttttaaagcccagtgaaatgatcttgtctaatttcctgtgatcgtatggagatggaaagagacctgctcattctcagtccccttcaggatcctatcggctcctttgtttcaacgcaaggcaagagtgagcagggggcagcttcgatatttgcattgctaccaattcagatctggggtaattagttttgtcgcctgatatttgtgctcaagtagataggccatttgtgggggtgctccgaaaggaggctgatgagcgaaatctaacaccatctgcaaataggttactaatgtgagacactccaccggcgattataccttgtgatgtgaggtttgttctcccagctgctgttagtgattctactgataaaggaatcgcagggagaggaggaagaaaggtgttgagctttctttttcccctcttttagcctcttttgggcgtctaaattctttacgcattaatcacctggatgttttcccattgacatttcttctaagtttttttgcttgtttggccatttaatggtggtgctcatctagccacctttcaaatggaaaagcatgcattaatatggaacctgtttgttctcagctgggcagctgctcttgcaaaatccacttggattccaatagattcggtctatccaaggtagccttatggtctccatggggcacccaagttcatgtctttgccaatggttgggtctgtaagagtctgggttttgtgagccttgagaataagaattttctctttgacaaaatgctgtagtcattccaagagctattggatatgctttgaattgcttataaaaagtctgtggtaaacctgttgatactgtactctctgcatattttgaaaaacacgtattgtttgtttttctggggggttaacacatatctattttagagaatttgaaaattttccaagtgcagaaataaaaatagaatgcacctgtaacaactaataacattgaacatctttttggtcttttgttctaggtgtatctctacgtaatttgttttataaacattgactcattccttctcacatttgttcctttttctcattgaatatgttgtgagcattttctttcaccgtgctatgccttatcgcttattggcattctgtcctctcctgagggacatttaggccatttcctttctttttttttctttttccttattgctgttataaacaatgctgccacaaacatccttgaaaataaacctttgagcccattcataagtatttcattgggctatattggcagataaggaattgctggggcaaaggataggtacattttatatgagcccttttaagactttttatacattttgggaagtgtgtcttctagcctcatccttctgaagctggtaaaagggctttagagtcgtggtaacctgggttcatactcctactccaccactttctcattttgtgatcctggccaggtcacataacacagagccttagttttctcgtctgctaaatgggatgggtggagatgaaagtgcctcaccagactgtgatgaggattcagtgactttgtgggcacgaacagttttgtgatttatgttttggggtgtgtctggagtagcaagtgttccagacaatgcttatgatcattgtgattattcagtgtcccctagttctttcagtgtgtgggggatgtttgagaaacttcctgggatgaagagccagtcctttcccaggtcagtggaaagccaggtaccttaggatcccaatggttgggcggttctgagtcacactgtgtttcacagactcttctgtctgaaggatgtttgtttggctttgatagggatggtgttacctggggtggttggtgggttaagtaggtctgctgtctggggctcaagtcttcagagagccatctgcccctggagacatcccacatcccacagggtcccctggagacactctgacatttgccacaaacaatcatgcttggcctgctctcatatgcatagagtggatattgcagcctctgtttagagtgtgtgctacagcgcacggagaaggggactggtgagtgtactctttttgtggagaaaagtgaatgctgtgggggtgggaggaagcccctgcctctgaccccatgcatttgcctcccctggactcagcccatccatgcttactgagtgtctactctctgaaaggcacttcaagagtatttcaatccccagatccaccatatggatggaggaaccaagactcaattcagctaaatttaaactcacacctatagactccagagcctgtgttagcccatttgcattgctataaaggaatacctgaggctgagtaatttataaagaaaagaggcttatttggctcatggttctgcaagttgcataagtatggccctagcatctgcttccggtgaggcctcaggaagcttccaatcatggtagaaggtgaagggggagccagcatatctcatggtgagagatggagcaagagatggggaggaggtgccaggctcctataaacaaccagctgtccgtgaactgagagcaagaactccctcattcattaccaagcggatggtgctaagccattcataaggcatccccacccctatgatctaacccctccaaccaggccccacctccaacattgggggtcacatttcagtatgagatttggaggggacacacatccaaactctgtgagagcccttagtcattaaactgcaagcccttttacagatgataaagccaaggctcagagatgcccagttgctcgttggcagtccatggatgggattcaaagcccacagttcctgatgacaagctttgtgttggttccactcccagcatctgcctctccaaatcacaaggccccattctcagttacagcatcactggacaagttttcagccaacctgacatatgcctgaaagcaaaagtctgtcccctttgtccccagtccttgaagtcatctttgtgggtgtcttctttcctttttgtaccttgaatatccagatctgcctctggagtgaagggaactgctctggaggcaagagactggcagagctaacctccatattggtttgcagatttcactggaaacccagcacatccatgtatttgcctcttaggagttgagctgtgttgatgtggcaaggtcctggacttggagtccagaaggctggctccttttcccactcacctggcaggctgggcatcctgggctgttcactgcctacctccgagcctcagtttccccttctgtgatccctgaaatctctgtcattctgtgtaaccctggggatcctagaaaagtgctcaaggaggactgaagatggaggagatgatgccgagaggggctggtttgttacagaggtcccgcctggaaccttgctccttacctggaggaatgttcactccttgacctagtggccacagaccaagcctcccgcatgtggatccccgccagcctcagagccctgcccttgctgagtcatgaccttgctctaggctgaatgcccacccatacctcagcccagcccagcactagccgtgcgtccagaccgacccaggctcaggctgtagatgcaggatcaggatgaggatgcatatctttctgccctcggacacaggctgagccagctctttctttaacccctcacctgtctgattgaaacaatcccaaatctatcttctcactttctttttttgccttgtattcttggatccttttttcctcttctttctctcactgaagcaccctttctctctctcactgaagcatagggtagggtgcgagaagcagggaagttggcagagagataagattcatcaatatttaatttttatggaaatcatgtcctagaaatccccaaggggctgaaaattgtactgtgttttcagaatccagtgatgttgctggagcggtgatgttgtaaataaaaccacattactgtctgcagctctcctgtcgctctgcaaacacccggaaacttgacagtttaatccactcaaggaagcaaaaaggttcgggtcactgctgggggcagcccattctccagtcctgggatataagattgtggggcatcaacgtcagtggggctgttactgctgggaagggagacggagccagcgtgccttgagtagatttaccatgctggtggattttttttcctcggaacaggaatcccaggacagcagagccccctctgggctttctgatatggggaagatttgcttagagatagcggcttttcttttccctcatgcctgtggtgcagttaacccaatgaccagcagaaaaatcagactcaagttagtttccagcagcttctggtgcaattgggatttggaagggacattcatttgcttcttcattcattcactcattcattcatttcttcattcatcaaacatttattgagcatctgccatgtgcaaggcacttttctagattctgagaatataacaaagcacacaaaaaacacaacaaccctgcttatgttcttgtggaaagaggcagacaaccaaccaggtaagtaaattatatagtatgttgtatggtgatctgtgtcatggaggaaaaggaagtaggaatcataggtgtttacccatgagaaatgcaaacttttttggaccaaaggcttgcacaagaatgttcagaggagcattattcacaatagctaaaaaccgggaacagcccaggtgtcaatcactagtggatgaatcaacaaaccagtgcattcttggatggaatactacacagcaatgaaaaaggaatgatccacagacacagataacaacatgaatggatttgacaaatgtttttctgaatgaaagaagccaggcacacaaaaaacatgtgctgggtgattctatttatatgacattccagtatagataaaacgaatccatggtgatagaaatctgaaaggtggttgctctggggagggaaggaggatggtgaatggggagaggggcctccggtgtcaccgatgtgctgcctgtcttgattgaatggtacacctgggatcagagcatgtcatcagataggttagtacacaaaactgtaaagcatggtgagggaatagcatgtggtggtgatggtgggaagggtttgcaacttgaaaagggggtggccagggaaggccccacagagaaggtgacttgaagaaagtgagggagagagctatgagggtatctgggtgaagggcattcctggcagggggaacagcaagtgcaaaggccctgaggtgggatcatgagtggagaagtcagggaacagcaaggaaaccactgcattcatcaacttggctgctatgagagcgtgccacagactgggcagtgtaaacaacagacatttattttctcattctggaagctgaaagtctgagatcaaggtctcagcagggttggtttcttccgaggcctccccacttggcttgcagatggaagccttcttactgtgtccttgtgtgcttgtcccttggtctgtgtgttggctgtatcctaacctcctcttcttgtaaggacctttgtcgtattagattagggcctaccctgatggcctcatttgaacttaattatctctgtaatcccagcactttgggaggctgaggcgggcagatcatctgaggtcaggagttcaagaccagactggccaacgtggtgaaaccccatctctactaaaaatacaaaaagtagccaggcatggtggtggctacctgtaatcccggctattcaggaggctgaggtaggacaatcgcttgaacccgggaggcagaggttgcagtgagccaagatcctgccacagcactccagcctgtgcaacagagtgagactctgtctcaaaaaggagaagaaaaaaaaaagatcctacatccaaataaggtcccattctaaggccctggggttaggacttcaacatatgaatttgggggacacagttcagcccatagcagccagcatggacagaggtacctgagacacagatgggccgccgtgtgccgtggacatccgggctgcttgtttctgctgctccctgtgatgaaggtgttggtgtggaatgaggtgggatgagggttttgtgatagagggtggatgaagctgtagaggccggaggtggcaattcttgaagttgcctttcatgaattcacatgaccggggaaacttgcttctggaaaagccagcagtgttgagattgagggtcaggccccagctctcgctttccatagaagagtggtgtaggggccgtgaggatgggtctagttggacgtactaccgaggctcaatagcctatcatgcactgactcacagcgcaggtgcctccttggcttgaagaaggacgaggagagtcgggagaggctttccttgggggctgcttggcacctaggagagcatgcggcctgtacttataagaacagcctgacagtggggggcaacctccaacagcatttcccctgactccctccaaagatacctgccctcccgccaatgccccaggccctgcgtcatcttcgcttgcatgggacacaggctgttgtcttttatgagtgcccaaatcctcagctttacctagccatgctcaaaaaatgctattgattttctttttcttatttatttatgagatttttgctgtgagcaaaaaataaaaaggtttgtgcagtgttccccttagcagtgagaagttttctccacccactgcctccctccctggcacacacactcacagattactctctcatctctctacgctccaaaagtcctagcatctcccgactgtaggatgcagagaaggaagagatgaaaaggggctagtgcctggggcagagtgaggactctcccatacatgtgggagaggtgggtggatacatttttgagcaagacacagctgatgcccagagagttagggaggtcgagaatgacctcttcctccttggaagcatgccaggcccggtgctgggcactttggacctgtctcattcagccctcaccttaaacctacaaggcagattttattacttttttcagtgatgaaattcaaagaagttaggcaccttgctcaagggtgcctagcaagcgagctagaattcactttcacaccttcaggatgccagctctcttcagtgtgtggtgcagcctccccaaaggggaacaaggacccacttaagagactgctgggagctgggctggcccacagagtgagacgactcctctctcctacccctgacagggcccccctccattttgaagaatcctccttgggctgagcatcttgggtgggaacaaagtctgttcttctccaccccttccatctttggaaagatgactgtatgagaatctctgcaccctgcagtgggacatctggcatgagagttggttttagtctctttccagggaggtggctggccaaggaagaccagagggaatcgaatctcagtcctctctcagggcttgaggtctgttcattagtggtgtgacacgtggatccttggggatgccctaagtcagctgatctgccccgctctgtgccatgcagacatccactcatatggatgcccctgcccagagtgccatttctatctctggcactcctgacaaatgccttggaatctcaaaaacatgattccagcctctgccccctgctttctgcacgtcgctcatccctcagtcatattgctgctcatactgttgacttgtcaaggaaccaaccaagtagggctgtgcttataagaacatgggctacttgagctgcttgaagctcacatcttgttgatctttgtctcccctggaattgggcacagagcacagtggtggaaggatggtggtcatccctgtggattccatacagatacagctggcaatacatcgtccatgttcatcccattcctgagccctgggaagcatgaccctcaaattcactcagtgtgcttctcttcttatcgttccctggcaggagttccccttggccattctcaggggctgggaatgctactgtgcttaccctaccccccggttcaacctgcgggatgccatggacagctcagtatgtggccaggaccctgaggcacagaggctggcagaatactgtgaggtctaccagacacctgtgcaaggtgggttctgcatccccgactggtagtggcatttggtctggggggtggggagagcttccagggtttggagatgccagtcatggccaagcatgcagttatgaggtatggcatgtgtctgtgtaaaggtcttggcatcttgatgggtgttggagataatggggagggtcagttttccaccctccacagaggctgaatcctggactcactttaaaaaacactggaccctttatctaagtctctctggagatgacaatggtaagaggatgaacagagaggggcaggtcctagagagatagcaacagaaaggtggtaggattgggaggcgtgggaagaatgagatcccaggagctgcaggggccactggtgcctccaggacctgggaaccctccttggtgtgagcatcaggtctgcccctgttgaccttaggaactgatgaaaggaagagccggggacgagggatgttaccacctttatcaagtgcctactgtgacccagcatggccctggatgttttggggctttcccctggtgatttcatgtgctccttgtagcagccctggggatgagacataacgaatgacttgcctgtcattagtccagctctggtttattgttggcagtacctgggtgtgttactttgctcagcctagcctcaatccccacccacttcccctattagaatctggaattatctgtgctatgtcaggagcaagagtttggctgtggccatagagacagaatgggagtcgagggtccatagggtgtctgattcccatcttactcctgcactgcagtattgcaggcctcattacggggctttctcggactggccacagacctgtgcagctaaggtatatttggaagatctcttcccttctttgggccttggttcccccatctattaaatgggagtcttcgttcatcagttcctctaagggagtttagtggtgaattggtgagtcataatggaagtgagtaaccccgtgatgacttttggactttcagacactcgttgtacagacaggaggttcctgcctaacaaatccaaagtgtttgtggctttgtcaagcttcccaggagccgggaacacatgggcacggcacctcattgagcatgccactggcttctatacagggagctactactttgatggaaccctctacaacaaaggtaagtcaaagctacaggggacgatggaaggcagctcccggtgaccaaactgtcaccttgccagccaagcttctcagagcactagagcagtgcatctcaaacttgagtgtacataagagtcacctgtgggtggagccactgtgtgccatactcacccttcaggtattgaagaccagcccgcctggtggtccccatccacaacaaagttacgccattgtatccacaaacacccacgatctaggccactgaggcacttgcagacaccactgatattgattacagccaaagaaattacactgagactacactactccaccacccagaaccaaaacctaagcatgctacccaacccacactataggatacatctactagaaaaagtcttttcctatgaaagctgctccataaaattggaagaggtgactgttccaccagatgtgcagatatcaatgcagtcacacaagaaacatgaaaaagcaaggaggccaggcgcagtggctcacgcctgtaatcctaacactttgggaggctgaggtgggtggatcgcctgaggtcaggagtttgagaccagcctgaccaatatggtgaaacctcatttctactaaaaatacaaaaattagctgggcgcggtggtaggcgcctgtaatcccagctactcaggaggctgaggcaggagaattgcttgaacctgggaggcagaggttgcagtgagtcgagattatgccaccgcactccagcctgggcaacagagtgacactccgtctcaaaaaaaaaaaaaaaaaaaaaaaagagcaaggaaacatgacgtctgcaaagaaacacaataattctccaataacagaccccaaagaaaaggaaatgtatgaaatacctgaaaagtaatttaaaataatgattttaaggaaactcagcatgatacaagagaatacaaatagacaattcaatgaaattaggaaaacattttatgatccgaatgagaaattcgatagaaatagatatcatacaaacaaccaaacaaatctgttagttgaataattaaaatgaatttttaatgaatgaaattaatgatctagtctgttacaaaagctctcaactgtgtttttaattttataccaaaacctatgggatacagcaaaagaagttctaagacaaaagtttacagcaataaatgcctacatcaaaatagtagaaagattttaaataagcaacctaatgacgtacctcaaggaactagaaaagcaagaacaagccaatccaaaagtactggagggaaagaaatgatgaagatcagagcagaaataaatgataaaattcaacatccctttagggcaaaaacaatcaacaaattaggtatagagggaacgtacctcaccacaatgaaggccatatgtgaaaaacccacagctagtatcatactaaatgaagaaagtgttgaaaaccttttctctaagaactgaaacaagacaaggatgcccactttcaccatgtctgttcagcctagtaatggaagtcctatgcagcaattaggcaagaaaaagaaacaaagggcatccaaattgggaaggaggaagtccacttgtccctgtttgcagatggcatgatcttacatatagaaatgcctaaaggcttcaccaagaaacccttagaaccaataaatgaattcagtaaagttacaggatacaaaataaacatgcaaaaatcagtagcatttccatataccaatagtgaactacccgaaaaagaaatgaagaaagcggtaccatttaaatagctatgaaaaaatacctaggaataaatttaataaaagagatgaaagatctctgcaaagataactataaaacacttatgaaattgtagaggacacacaaaaaaatggaaagacatcccatatttatggattggaagaattaatattgggaaaatgaccatgctaccaaaagcaatcaacagatccaatacaatccctatcaaaataccaatgacattcttcacagaaacagaaaaaaacaattctaaaatttgtatggaaccacaaaagaccctgaatagccaaggcaattctgagcaaaaagaacaaagctggaggtatcacactactgacttaaaaatatgttacaaagctttagtaacaaaaaacagcatggtactgctacaaaaacagatgcatagaccaatggaacaaaatagagaacccagaaataaatccatgcatttacagccaactcatttttgacaaagatgccaagaacatacatttgggaaaggacagtcttttcaataaatggtgttgggaagactggataaccatatgcagaagactgaggctgtacaaatggtgttgggaagactggataaccatatgcagaagactgaagatatacccctatctctctccttatgcaaaaatcaactcaaaatcaagacttaaatgtaagacccaaatctattaaactgctagaagaaaacggggaatatttcaggacattggtctgggcaaagatgtttttgcttttgagataggacctcaagagcacagacaacaaaagcaaaattagacaagtggtattatgtcaaagtgaaaaacttctgcacaaccaaggaaacaatcaacagagtgaagagacagcctgcagaatgggagaaaatattggcaaactattcatccaacaagggattaataaccaaagtatataaggaactcaacaacaaaaacccaaaagaatctgatttaaaaatggacagatgatatgaatagacatttatcaaaagaagacatacaaatggtcaacaagtatatgaaaacatgctcagtatcactaattatcagggaaatgcaaatcaaaaccacaatgagatatcatctcgccccagttagagtggctactatcaaaaagacaaaaaataacaagtgttggagaggatgtggagaaaagggaactcttatactctattggtgggaatgtaaactagtacagctcttacggaaaatagtatggaggctcctcaaaaaaaagtagaattgtcatatatatgatccagcaatcccactgctgggtatatattcaagggaaaggaaatgagtatgttgaagagatacctgtactctcatgcttattacagcaccatacacaatagccaaggtatggaatcaaccttagtatctatcaataggtgaatttttaaaatgtggtacatatacacaatggctagttagccgtaaaaaaaaaaaaaaaaaaagaattaaatgctgtaattcacggccacatggatgagcctaagggacattatgttaagtgaaataaaccaggcacagaaagatgaataccacatgctctcattcatatgtcaaagcttaaaaagttgatctcactgatgtggagagtagaatagtggtcactagaggctgggaagggtaggagggagggcaggatagggagatgttggttaaaggatacaaaattacagctagatatgaggaataagtcctagtgttttatagcactgtagggtgactacagttgacaataattgattgtatgttttcaagtagccagaacagaggattttgaatgtttccagctcaaagaaatgataaatgtttgaggcgatggatatcctaattactttgatttgattattaaacattgtatacatgcattgaaatatcacattgcaccccataaagaagatgtacacttatcatgcatcagtttaaaataataataaatatatttatatttattattattttattttactttcagttctgggatgcatgtgcagaatgtgcaggtttgttacataggtatgcatgtgccaaggtggtttgctgcacctaccaacccatcgtctaggttgtaagccccgtatgccttaggtatttgtcctaatgctctcccttcccttgtcccccaccccccaacaggcccctgtgtgtgatattcccctccctgtgtccatgtgttctcattgttcacctcccacttatgagtgagaacatgtggtgtttggttttctgttgctgtgttagtttgctgagaatgatggcttccagcttcatgcatgttcctgcaaaggacatgaactcattcttttttaataaaaatatttttaagtaaaaaagagaatcacttggtcctggcccacacccctgacagtctgattcaggtagtccgaggtggggcctgagaattttcatttctaacaagctcccaggtgaccctgatgaaggcagcccgaggaccccacttagagcggaacttcatgagatcgtgcctattctggattcaaagagaaagactagcagcttgaattttctctctgtaaacatttcttgaattttccttaatttttagaaccctcaataattaggggtgaaactgatttaatctgctcattccttttttgaggcaagaactagttcatcaaaatgtaataaaaaatgtccaaaaatcttttaagagttttgatttgtaatctttcccttgtagaaataagagaaattaagttaaatggctgaagactgtgttttgtttaagaatgaaaaacctcagacaagtccattggcatcaaatttggcaaaaatgtattaaaatgtatttctctgttgtcaagcattttctctggatttctttctttccttttttcttttcttttcttttctttttttttgagatagagtctcactttcactctgtcgcccaggatggagtgcaatggcacaatctcagctcactgcaacctccgcctcttgggttcaagcgattctcctgtctcagcctcccgagtagctagaaatacaggcacctgccaccacacccagctaatttttgtattttagtagagacagggaggtttaccatgttggccaggctagtctcaaactcctgacctcaattgatctgcctgcctcaccctcctaaagtgctgggattataggagtgaaccaccatgcctagcccattttctctggatttcttaaccagagtttggtgtaggaaagttgatactgtcagtaacatcctagagaagcagaaacttcccaagcttgggattgggctctggaatcacttataacaatcttggttctggggaaaagctatagttgtccatataacccagccttgtactccctgggaacctcgagtgttacaggcatcttcaggtgagggaggaagtggccacatgagcacatggccctgtccactctggcttagtcccctaggaatcacccactgtgcccaggctgcagttacccaccttgttcatctccaaggcccttaccttattcaagcagctggctgttttggtctacatatggtaagcggcccaatgactgatattgccagctatagaggttgggtcgacactgcctcagaaatgctttagagatacctcacacacatctttgagccttacaagaccattagatgtggccagtggcctcagagcactgacagagtgatcacacacacacacacacacacgcacaattcacaaggcatctccaatgcccaaccaccaaatctattgtggtaggtcgaatgtggtctgagctgcaaggcagaatagctgttgttggaagaggcggaggcagtatggaaggcaccccgggtctcagggttgttaaagactagatctcaagtttattcattccagtttgactcttcctttcatagcattttccagctgtttgacagaatgaatcaaagcgaggccttttggtatttggcccatggcagagataagtttgaagcttgttgagtttcagtgggtaaacccggacttccagattcaaaagagacttgcattttccaggcatcaaagcgtccctcagtgctcactgcagatacaaatgctttccagcaattcctgcagaggggcaggtggtaggactcattttgtttccaagagcccaagataagcacatgagcacttacggaacatgtctcagggctgggagcatgggctacattgggtgtggccaggagactagtttcaggagacctcttcccaggaagtcttctaggacatcccactatttgggatccctgctctttgtttccataagcccctatagcctgcacttaggctatttcctctactagaacataagcttaaagacaaggtctgagtcttaaccctctgtccccaaaataaagtctaacatagtgagcacataataaccttcattgataaatgtgtggctctggatgaatgggcggagtctggccttctctgccagtagtcagtcattcaggttctgagtgcccagtactatagcaagggaccaaggaaagagagggcccccgatgggctgatcaatgggaacaagtctccattcatagaaattgggccctgggtcctcagggccaggctcaagcactgtggatgaggccttgaccagacctgctctgaggcaaggctgggccctgtcatagaaccatggcatcaggtcagagggtggatctatacctgctcacagccattgaatctgtaaatcaggatcctgccctgactgtggggaggtgagaggaggctgggggtctcacagagacacacggtggcatgtggagagagccctggcgctgttttcacagcactgtgtgatcttgggcaagtcccatgctcactctgtgccttagtctcttcattcagctatgtttgcagctatggttaaatcaaaggttgtttgtaatgcttgtgtaaaattatctctatgaagatgcccaaaacatatgcgtgcatctgcaatgacgggtcttctgccctctgactcctggaggtcttcagggaatacctcatctcatttctcttgcagatgccatctttccccactgttagataactcctgctgtcactttcccttggacagggtcactcctgtggaggccgttcctatcaccatccataggtcctctcagtgtcctctgtgtcttccatgggccctctcttatgcccctgatgccagctttacccaatctgtctgctgctatggtagggtgccccatggacaccatcttccacagagaccctctcatttttccctgcagggttcaagggcgaaaaggaccactggcggagccgacgcaccatctgtgtcaaaacccacgagagtggcaggagggagattgagatgtttgattcagccatcctgctaatccggaacccatacaggtccctggtggcagaattcaacagaaaatgtgccgggcacctgggatatgcagctgaccgcaactggaagagcaaaggtaatcaaggaccttgcggtgggggtgggaggcttgtcagtacaggtaggttgctcatcaggatgcaggatcaatttacacaggtaggcactgcaggatgcaggatcagtatacacaggtaggcactcaaaccccatcctgctagggacttagtgctgctgtgcctgggcttgagttcacctcctccccttgccccccatgcctgctgaggtccatacgccaaggcattttacttagatgccagcttgattaccaagaatcttctctgcctccatgagtgcatagtggggtgatatgcacccctttccatctctgcttctgcccaggagctcatgcagggctgggagaagagcacatggggtgcacatggacctgctttgcaccttcctctgtgttcagcaccaggttcctcttttatagaatgagacctgcaccttgtggggcattcagggagcagtgagatgatgtgcctgcctggtctctggtcagagctcagcatgttaattccctcctaagctgcctcttgctgactcttcacagtgtctggtggggaaatcacatcagccctacattccagatgagcccagagaacatggctgcaggacttggccttggtggtgagcagcagagctgggactcacacccaatgtcttagtcagctctggctgccataacaaaataccacaaaactgggggatggggcagggggtggtgcttaagcagcagacatttatttctcatagtcttagaggctgggaagtccaagatcaaagtgctggctaattccattcccaggaagggcctgttttcaggcttggagacagctgccttctcactgtgtcctcacatgtccccaacagctctctggtgactcttctgataaaggcactaattccatcacaagggccccaccctcatgaccatatctgactctaatcgcctcccaaatcccccatccctaataccatgatatggtgggttaggactctctgtgaatttggggggcatacaagcatctgggccccaacatccagagtgtctgattctgggtcagattggcctgttccccactgcagctttattcatggaatcagtcttctgactcacacttgctgaagtcttcctgggtgccaggcatggggcaaggtaccaggagcgcaggctgatgaggtcagggtctctgccctcgaggcatgcacagctgagcctttgggtggtgacgaatagagtctgggtggtaagtgatgtgaaatgaagttggtcagaaacaaagcagtgtccaggcagggtggggtgagagaagtcacaggacccatggccagaccagcttgtgctcctgtccacttgttactggatcacccagtgggtggcctctgccggcctctagtcttccccttcccccatcatcctttacttagacagcccccgacagtcaggcaggctgatctctgacgcctcctctgcctcttatgagccgtataactccgggaaagctgcttatcttgtcttctgagcctgttttctcacattaaaaacaaggataggccctgtctcctagggtcattgtgaagattagagaaagcaaacgcttcagacggcgtttgaggtgtgttaatagcccaataatggaaactttttattgggatgatttctgatatctggaccctgcacacccctcccccaaaattaatttcttaatttgctggaaaagaaagctcataaagtagattacctgcaaaagtccgaggccaccccgtctgtggcttcactgtatgtcctactgccctgcagtttcacaggttcaaactggcaatcaaaccacaagatgcgtatttgcccatcaggcatcacgctgacttagctttataggaggacctgggatgggaaatggaggctgcacagcgtcctcatcccaccaggatgcccagagctgcccccacccaccacggacacactgctcagccaccaaagggtcctcctccatggggaatgccaggttgactctaggcagtggacagtggaaaaccctgcccacttccctctcccgagcagccccccggggaccggcagccctggcagggccagcccccgactctgcatctctcctgtcctcactctagagtggccggactttgtcaacagctacgcctcgtggtggtcctcgcacgtcctggactggctcaagtacgggaagcggctgctggtggtgcactacgaggagctgcggcgcagcctggtgcccacgttacgggagatggtggccttcctcaacgtgtctgtgagcgaggagcggctgctctgcgtggagaacaacaaggagggcagcttccggcggcgcggccggcgctcccacgaccctgagcccttcaccccggagatgaaagacttgatcaatggctacatccggacggtggaccaagccctgcgtgaccacaactggacggggctgcccagggagtatgtgcccagatgataggcctggcccacgccgccgcccccgctgagtgacgcaatcgcaccacggggctgcgctccccactctgatgctcaggcccgtggcctcactgggacgaacggtgggtggggggctcaccctggtgctgcctcccgcacaaggagacctggacacaacagacacacatcacaaggcgaacacaaatggacacacatacctggccacgaacccacacctcctcagacactcagacaccactccaggctcatagccccgtcttgatgcagagaagccacccacgtggggtgtgccaggcacccccagatacaaatgcagccacgcacagacgtaacacacaggtgccaggccgtgtgctcctggaggctggctggctgtctctctcacacagatacacgtgcgctccctgggatccgggaggccctgggcttcctgtgtgtagccctggcatagacttgctcgtcagggtgttcgactctgggatgctgggccgggcagacatttatgctctgagcagcaaggaccattgggatggaggtgggcacaaagactgctgcttccagggtgtgcggccctggccgtgtgtctgacatcccataaatgtgtgtgtggtgtgactacgggcaccacaaactccgc

(The sequence listing continues in the following parts.)

1. A method of identifying one or more nucleic acid sequences useful as a biomarker for a disease to be detected, comprising:
(a) identifying one or more nucleic acid sequences that are down-regulated in diseased cells compared to normal cells, wherein the nucleic acid sequences comprise at least one methylated CpG site in a promoter-first exon region;
(b) comparing expression level of the nucleic acid sequences from (a) with expression level of the nucleic acid sequences from (a) that have been demethylated; and
(c) identifying those nucleic acid sequences exhibiting a significant increase in the expression level after demethylation treatment as compared to the expression level of the same nucleic acid sequences in the methylated state.

2. The method of claim 1, wherein the methylation at one or more specific CpG sites of the nucleic acid sequences from (c) in one or more clinical samples obtained from a subject having or suspected of having the disease to be detected, significantly increases over the normal samples.

3. The method of claim 1, wherein the promoter-first exon region spans about 1000 base pairs upstream of the first exon and about 1000 base pairs downstream of the first exon.

4. The method of claim 1, wherein demethylation is accomplished using a bisulfite compound.

5. A method of detecting, the presence or stage of a disease in a subject, comprising:
(a) determining the degree of methylation of one or more CpG sites on nucleic acid sequences in a biological sample obtained from the subject;
(b) determining the presence of, predisposition to, or stage of the disease in the subject based on the degree of methylation.

6. The method of claim 5, wherein the CpG sites are hypermethylated in cells with the disease.

7. The method of claim 5, wherein the disease is cancer.

8. The method of claim 5, wherein the disease is colorectal cancer.

9. The method of claim 5, wherein the nucleic acid sequences are the ones identified by the method of claim 1.

10. The method of claim 5, wherein the nucleic acid sequences are the ones identified by the method of claim 2.

11. The method of claim 5, wherein the nucleic acid sequences comprise a nucleic acid sequence selected from the group consisting of SEQ ID Nos: 1-129.

12. A method of monitoring the onset, progression, or regression of a disease in a subject, comprising:
(a) detecting in a biological sample of the subject at a first point in time, the degree of methylation of one or more CpG sites on nucleic acid sequences, wherein the CpG sites are differentially methylated at different stages of the disease;
(b) repeating step (a) at a subsequent point in time; and
(c) comparing the degree of methylation of the CpG sites in step (a) and (b), wherein a change in the degree of methylation is indicative of disease progression in the subject.

13. The method of claim 12, wherein the CpG sites are hypermethylated in cells with the disease.

14. The method of claim 12, wherein the disease is cancer.

15. The method of claim 12, wherein the disease is colorectal cancer.

16. The method of claim 12, wherein the CpG sites are the ones identified by the method of claim 1.

17. The method of claim 12, wherein the nucleic acid sequences are the ones identified by the method of claim 2.

18. The method of claim 12, wherein the nucleic acid sequences comprise a nucleic acid sequence selected from the group consisting of SEQ ID Nos: 1-129.

19. A method of determining the efficacy of a test compound for inhibiting a disease in a subject, comprising:
(a) detecting in a first biological sample of the subject, the degree of methylation of one or more CpG sites, wherein the sample has not been exposed to the test compound, and wherein the CpG sites are methylated in the disease;
(b) detecting in a second biological sample of the subject, the degree of methylation of the same CpG sites, wherein the sample has been exposed to the test compound; and
(c) comparing the degree of methylation of the CpG sites in step (a) and (b), wherein a decrease in methylation after the sample has been exposed to the test compound, is indicative of the efficacy of the test compound.

20. The method of claim 19, wherein the CpG sites are hypermethylated in cells with the disease.

21. The method of claim 19, wherein the disease is cancer.

22. The method of claim 19, wherein the disease is colorectal cancer.

23. The method of claim 19, wherein the CpG sites are the ones identified by the method of claim 1.

24. The method of claim 19, wherein the nucleic acid sequences are the ones identified by the method of claim 2.

25. The method of claim 19, wherein the nucleic acid sequences comprise a nucleic acid sequence selected from the group consisting of SEQ ID Nos: 1-129.

26. A kit useful for diagnosis, prognosis, staging, monitoring, and therapeutic treatment of a disease, comprising a bisulfite reagent, and one or more nucleic acid molecules comprising at least about 9 consecutive nucleotides in length that is specific for detecting methylation of one or more CpG sites on one or more nucleic acid marker sequences.

27. The kit of claim 26, further comprising one or more primers and probes comprising at least about 9 consecutive nucleotides in length that is specific for detecting the expression levels of said nucleic acid marker sequences.
